United States Patent Application Publication US 2007/0072175 A1 - sequence listing, part 10

SEQ ID NO: 26113 - DNA, 940 bp, Macaca Mulatta
  misc_feature (1)...(940): n = A,T,C or G
taaagatcataaataaatgtctttcaagaaaatatatttggatggcctttaaaaataacaggatatttaataagagtcctagatagccagcagagactttaagaataattgcccctagccaggtgtggtggcttgcacctgtggtcccagctatttgggaggctgatgcaggaggataacttaagcccaggagtttgagtctgggagtttgagtccagcatgggcaacatagcaagaccctgtctcttannnnnnnnnnnnnnnnnnnnncctcatttcatcattggtcttcatatgcagccacaaacactgacctcatgtaggcaccttactaatatatgacattaagtgagagtggaatcccttaggactggaacacttcaagctcaaccaactgactcagttgtcattcttcacaaaagaatagtagaggatcacgtaaacctgagcctgactcttgttccagtatgaaacttgggggagagcaccagccacctaagaaaattgtatcttacctttttactcaaaggagtcccccttcccagtaacagtcctattagtgtttaatttccgagtttgtgtctggtagacctctacctgattcagatttggttttgatatttcaaccatagttagagacaatttctcatgtactttcagaaatcaatatctgcagccactgttacttttaattgacattaaaagacgctttgtaagttcccacaattcagtatgggttaggctttttaaaaagtaaatacagaccaggcgtgnnnnnnnnnnnnnnnnnnnnnnnnnnnnnnnnnnntggagacaggcagatcacctgagcnnnnnnnnnnnnngannnnnnnnnnnnnnnggcaaaacacgtttnnnnnnnnnnnnnnnnnnccagtacgtantgcatgctgtaatcncactactgggagctgagcag

SEQ ID NO: 26114 - DNA, 363 bp, Macaca Mulatta
gggaaggaggagatgagcagtgtcagtaaatactgtgcattcaatagaagttgaagaatcattgttagaagcatttccaaacaaaacactaagcaaaatgggaattaggcttatttcgaatgcatctttaacttatgaaagatgtactaattgtgggggtgcctgagtcaggtggagctgacccaggggtgggaacgatggcagctgcctgggacccatgtgcttggctcaggctatgtcctcatgagaggtgctgggctccatggatatgtgttgtggggcagacagtcactgtgggatgtcttcaaagtgagcagttacagaattagtttactttgaattttgttgtctgaatagctcctg

SEQ ID NO: 26115 - DNA, 699 bp, Macaca Mulatta
gggactgccaagcccgtgggcgctgcgtgcagggcgtgtgcgtgtgccgggcaggtttctcagggcccgactgcagccagcgctcctgccctcggggttgcagccagaggggacgatgtgaggatgggcgctgcgtgtgtgatccaggctacgctggtgaggactgtggcatgaggagctgccctcgcggttgcagtcagagggggcgctgtgagaatgggcgctgcgtgtgcaaccctggctacactggcgaggactgtggggtgaggagctgccctcggggctgcagccagaggggacgctgcgaggacgggcgctgcgtgtgtgaccccggctacactggcgaggactgtggtacgcggagctgccgctgggactgtggtgagggcgggcgctgcgtggacggccgctgcgtgtgctggcccgggtacacaggcgaggactgcagcacgcggacatgtccgagggactgccggggccgcgggcgctgcgaggacggcgaatgcatttgcgacacgggctacagcggggacgattgcggcgtgcgcagctgccctggcgactgcaaccaaaggggccgctgtgaggacggccgctgcgtgtgctggccagggtacactggactcgactgcggctcgcgcgcctgcccacgcgactgtagaggtcgcgggcgctgcgagaacggcatatgtgtttgca

SEQ ID NO: 26116 - DNA, 8699 bp, Macaca Mulatta
  misc_feature (1)...(8699): n = A,T,C or G
gctggtggatgaccgctgtgtggtggagcctgcggccggggacctggacaaccctcctaagaagttccgnnnnnnnnnnnnnnnnnnnnnnnnnnnnnnnnnnnnnnnnnnnnnnnnnnnnnnnnnnnnnnnnnnnnnnnnnnnnnnnnnnnnnnnnnnnnnnnnnnnnnnnnnnnnnnnnnnnnnnnnnnnnnnnnnnnnnnnnnnnnnnnnnnnnnnnnnnnnnnnnnnnnnnnnnnnnnnnnnnnnnnnnnnnnnnnnnnnnnnnnnnnnnnnnnnnnnnnnnnnnnnnnnnnnnnnnnnnnnnnnnnnnnnnnnnnnnnnnnnnnnnnnnnnnnnnnnnnnnnnnnnnnnnnnnnnnnnnnnnnnnnnnnnnnnnnnnnnnnnnnnnnnnnnnnnnnnnnnnnnnnnnnnnnnnnnnnnnnnnnnnnnnnnnnnnngtggtcgtgggggacaaggtgatcctgaatcctgtcaacgccgggcagcctctgcatgccagcaattacgaactcagcgataatgccggctgcaaggaggnnnnnnnnnnnnnnnnnnnnnnnnnnnnnnnnnnnnnnnnnnnnnnnnnnnnnnnnnnnnnnnnnnnnnnnnnnnnnnnnnnnnnnnnnnnnnnnnnnnnnnnnnnnnnnnnnnnnnnnnnnnnnnnnnnnnnnnnnnnnnnnnnnnnnnnnnnnnnnnnnnnnnnnnnnnnnnnnnnnnnnnnnnnnnnnnnnnnnnnnnnnnnnnnnnnnnnnnnnnnnnnnnnnnnnnnnnnnnnnnnnnnnnnnnnnnnnnnnnnnnnnnnnnnnnnnnnnnnnnnnnnnnnnnnnnnnnnnnnnnnnnnnnnnnnnnnnnnnnnnnnnnnnnnnnnnnnnnnnnnnnnnnnnnnnnnnnnnnnnnnnnnnnnnnnnnnnnnnnnnnnnnnnnnnnnnnnnnnnnnnnnnnnnnnnnnnnnnnnnnnnnnnnnnnnnnnnnnnnnnnnnnnnnnnnnnnnnnnnnnnnnnnnnnnnnnnnnnnnnnnnnnnnnnnnnnnnnnnnnnnnnnnnnnnnnnnnnnnngaactcgtacgtccggctgcggcacctctgcaccaacacgtggatccagagcaccaatgtgcccattgacatcgaggaggaacggcccatccggctnnnctgggtacctgccccactaaggaagacaaggaggcctttgccatcgtgtcagtgcctgtgtccgagatccgagacctggactttgccaatgatgccagctccatgctggccagcgccgtggagaaactcaatgagggcttcatcagccagaatgaccgcaggtnnnnnnnnnnnnnnnnnnnnnnnnnnnnnnnnnnnnnnnnnnnnnnnnnnnnnnnnnnnnnnnnnnnnnnnnnnnnnnnnnnnnnnnnnnnnnnnnnnnnnnnnnnnnnnnnnnnnnnnnnnnnnnnnnnnnnnnnnnnnnnnnnnnnnnnnnnnnnnnnnnnnnnnnnnnnnnnnnnnnnnnnnnnnnnnnnnnnnnnnnnnnnnnnnnnnnnnnnnnnnnnnnnnnnnnnnnnnnnnnnnnnnnnnnnnnnnnnnnnnnnnnnnngcggcattcccagtaggacttccccaagaaccaggnnnnnnnnnnnnnnnnnnnnnnnnnnnnnnnnnnnnnnnnnnnnnnnnnnnnnnnnnnnnnnnnnnnnnnnnnnnnnnnnnnnnnnnnnnnnnnnnnnnnnnnnnnnnnnnnnnnnnnnnnnnnnnnnnnnnnnnnnnnnnnnnnnnnnnnnnnnnnnnnnnnnnnnnnnnnnnnnnnnnnnnnnnnnnnngacctgtgtgtgtccacccacattgccatccccgtcacccaggagatcatctgcaagtgtgtgctggaccccaagaacagtgacattctcatccagaccgannnnnnnnnnnnnnnnnnnnnnnnnnnnnnnnnnnnnnnnnnnnnnnnnnnnnnnnnnnnnnnnnnnnnnnnnnnnnnnnnnnnnnnnnnnnnnnnnnnnnnnnnnnnnnnnnnnnnnnnnnnnnnnnnnnnnnnnnnnnnnnnnnnnnnnnnnnnnnnnnnnnnnnnnnnnnnnnnnnnnnnnnnnnnnnnnnnnnnnnnnnnnnnnnnnnnnnnnnnnnnnnnnnnnnnnnnnnnnnnnnnnnnnnnnnnnnnnnnnnnnnnnnnnnnnnnnnnnnnnnnnnnnnnnnnnnnnnnnnnnnnnnnnnnnnnnnnnnnnnnnnnnnnnnnnnnnnnnnnnnnnnnnnnnnnnnnnnnnnnnnnnnnnnnnnnnnnnnnnnnnnnnnnnnnnnnnnnnnnnnnnnnnnnnnnnnnnnnnnnnnnnnnnnnnnnnnnnnnnnnnnnnnnnnnnnnnnnnnnnnnnnnnnnnnnnnnnnnnnnnnnnnnnnnnnnnnnnnnnnnnnnnnnnnnnnnnnnnnnnnnnnnnnnnnnnnnnnnnnnnnnnnnnnnnnnnnnnnnnnnnnnnnnnnnnnnnnnnaggtggtcagcctggcgcacaacctcatctacttcggcttctacagcttcagcgagctgctgcggctcactcgcacactgctgggcatcatcgactgtgtgcaggggcccccggccatgctgcaggcctatgaggaccccggtgnnnnnnnnnnnnnnnnnnnnnnnnnnnnnnnnnnnnnnnnnnnnnnnnnnnnnnnnnnnnnnnnnnnnnnnnnnnnnnnnnnnnnnnnnnnnnnnnnnnnnnnnnnnnnnnnnnnnnnnnnnnnnnnnnnnnnnnnnnnnnnnnnnnnnnnnnnnnnnnnnnnnnnnnnnnnnnnnnnnnnnnnnnnnnnnnnnnnnnnnnnnnnnnnnnnnnnnnnnnnnnnnnnnnnnnnnnnnnnnnnnnnnnnnnnnnnnnnnnnnnnnnnnnnnnnnnnnnnnnnnnnnnnnnnnnnnnnnnnnnnnnnnnnnnnnnnnnnnnnnnnnnnnnnnnnnnnnnnnnnnnnnnnnnnnnnnnnnnnnnnnnnnnnnnnnnnnnnnnnnnnnnnnggaagacaagcagcatgctggaggtggatgacgagggcggccgcatgttcctgcgcgtgctcatccacctcaccatgcacgactatgcgccgctggtctcgggtgccctgcagctgctcttcaagcacttcagccagcgccaggaggccatgcacaccttcaagcaggnnnnnnnnnnnnnnnnnnnnnnnnnnnnnnnnnnnnnnnnnnnnnnnnnnnnnnnnnnnnnnnnnnnnnnnnnnnnnnnnnnnnnnnnnnnnnnnnnnnnnnnnnnnnnnnnnnnnnnnnnnnnnnnnnnnnnnnnnnnnnnnnnnnnnnnnnnnnnnnnnnnnnnnnnnnnnnnnnnnnnnnnnnnnnnnnnnnnnnnnnnnnnnnnnnnnnnnnnnnnnnnnnnnnnnnnnnnnnnnnnnnnnnnnnnnnnnnnnnnnnnnnnnnnnnnnnnnnnnnnnnnnnnnnnnnnnnnnnnnnnnnnnnnnnnnnnnnnnnnnnnnnnnnnnnnnnnnnnnnnnnnnnnnnnnnnnnnnnnnnnngggtgatgccaagatgatggagatcctacgctacacgcaccagttcctgcagaagttctgtgcagggaaccctggcaaccaggccctgctgcacaagcacctgcaccttttcctcacaccagggnnnnnnnnnnnnnnnnnnnnnnnnnnnnnnnnnnnnnnnnnnnnnnnnnnnnnnnnnnnnnnnnnnnnnnnnnnnnnnnnnnnnnnnnnnnnnnnnnnnnnnnnnnnnnnnnnnnnnnnnnnnnnnnnnnnnnnnnnnnnnnnnnnnnnnnnnnnnnnnnnnnnnnnnnnnnnnnnnnnnnnnnnnnnnnnnnnnnnnnagctgaccaatgcaggtgacgatgtggtcgtgttctacaacgataaggcatcgctggcccacctgctggacatgatgaaggccgcccgcgatggcgtggaggaccacagccccctcatgtaccacatttccctggtggacctgctggctgcctgcgccgagggcaaaaacgtctacactgagatcaagtgcacctccctgctgccgctggaggatgtggtgtctgtggtgacgcatgaggactgcatcactgaggtnnnnnnnnnnnnnnnnnnnnnnnnnnnnnnnnnnnnnnnnnnnnnnnnnnnnnnnnnnnnnnnnnnnnnnnnnnnnnnnnnnnnnnnnnnnnnnnnnnnnnnnnnnnnnnnnnnnnnnnnnnnnnnnnnnnnnnnnnnnnnnnnnnnnnnnnnnnnnnnnnnnnnnnnnnnnnnnnnnnnnnnnnnnnnnnnnnnnnnnnnnnnnnnnnnnnnnnnnnnnnnnnnnnnnnnnnnnnnnnnnnnnnnnnnnnnnnnnnnnnnnnnnnnnnnnnnnnnnnnnnnnnnnnnnnnnnnnnnnnnnnnnnnnnnnnnnnnnnnnnnnnnnnnnnnnnnnnnnnnnnnnnnnnnnnnnnnnnnnnnnnnnnnnnngccaagggccgggccatctcgctgcccatggacctggacgcccacatcagctcgatgctcagcagtggagccagctgtgcagctgccgcccagcggaacgcctccagctacaaggcaaccacgcgggccttcccccgcgtcacccccaccgctaaccagtgggactacaagaacatcattgagaagctgcagnnnnnnnnnnnnnnnnnnnnnnnnnnnnnnnnnnnnnnnnnnnnnnnnnnnnnnnnnnnnnnnnnnnnnnnnnnnnnnnnnnnnnnnnnnnnnnnnnnnnnnnnnnnnnnnnnnnnnnnnnnnnnnnnnnnnnnnnnnnnnnnnnnnnnnnnnnnnnnnnnnnnnnnnnnnnnnnnnnnnnnnnnnnnnnnnnnnnnnnnnnnnnnnnnnnnnnnnnnnnnnnnnnnnnnnnnnnnnnnnnnnnnnnnnnnnnnnnnnnnnnnnnnnnnnnnnnnnnnnnnnnnnnnnnnnnnnnnnnnnnnnnnnnnnnnnnnnnnnnnnnnnnnnnnnnnnnnnnnnnnnnnnnnnnnnnnnnnnnnnnnnnnnnnnnnnnnnnnnnnnnnnnnnnnnnnnnnnnnnnnnnnnnnnnnnnnnnnnnnnnnnnnnnnnnnnnnnnnnnnnnnnnnnnnnnnnnnnncttccaggagagcattggcttggccatccgcctgatggatggtggcaacacagagatccannnnnnnnnnnnnnnnnnnnnnnnnnnnnnnnnnnnnnnnnnnnnnnnnnnnnnnnnnnnnnnnnnnnnnnnnnnnnnnnnnnnnnnnnnnnnnnnnnnnnnnnnnnnnnnnnnnnnnnnnnnnnnnnnnnnnnnnnnnnnnnnnnnnnnnnnnnnnnnnnnnnnnnnnnnnnnnnnnnnnnnnnnnnnnnnnnnnnnnnnnnnnnnnnnnnnnnnnnnnnnnnnnnnnnnnnnnnnnnnnnnnnnnnnnnnnnnnnnnnnnnnnnnnnnnnnnnnnnnnnnnnnnnnnnnnnnnnnnnnnnnnnnnnnnnnnnnnnnnnnnnnnnnnnnnnnnnnnnnnnnnnnnnnnnnnnnnnnnnnnnnnnnnnnnnnnnnnnnnnnnnnnnnnnnnnnnnnnnnnnnnnnnnnnnnnnnnnnnnnnnnnnnnnnnnnnnnnnnnnnnnnnnnnnnnnnnnnnnnnnnnnnnnnnnnnnnnnnnnnnnnnnnnnnnnnnnnnnnnnnnnnnnnnnnnnnnnnnnnnnnnnnnnnnnnnnnnnnnnnnnnnnnnnnnnnnnnnnnnnnnnnnnnnnnnnnnnnnnnnnnnnnnnnnnnnnnnnnnnnnnnnnnnnnnnnnnnnnnnnnnnnnnnnnnnnnnnnnnnnnnnnnnnnnnnnnnnnnnnnnnnnnnnnnnnnnnnnnnnnnnnnnnnnnnnnnnnnnnnnnnnnnnnnnnnnnnnnnnnnnnnnnnnnnnnnnnnnnnnnnnnnnnnnnnnnnnnnnnnnnnnnnnnnnnnnnnnnnnnnnnnnnnnnnnnnnnnnnnnnnnnnnnnnnnnnnnnnnnnnnnnnnnnnnnnnnnnnnnnnnnnnnnnnnnnnnnnnnnnnnnnnnnnnnnnnnnnnnnnnnnnnnnnnnnnnnnnnnnnnnnnnnnnnnnnnnnnnnnnnnnnnnnnnnnnnnnnnnnnnnnnnnnnnnnnnnnnnnnnnnnnnnnnnnnnnnnnnnnnnnnnnnnnnnnnnnnnnnnnnnnnnnnnnnnnnnnnnnnnnnnnnnnnnnnnnnnnnnnnnnnnnnnnnnnnnnnnnnnnnnnnnnnnnnnnnnnnnnnnnnnnnnnnnnnnnnnnnnnnnnnnnnnnnnnnnnnnnnnnnnnnnnnnnnnnnnnnnnnnnnnnnnnnnnnnnnnnnnnnnnnnnnnnnnnnnnnnnnnnnnnnnnnnnnnnnnnnnnnnnnnnnnnnnnnnnnnnnnnnnnnnnnnnnnnnnnnnnnnnnnnnnnnnnnnnnnnnnnnnnnnnnnnnnnnnnnnnnnnnnnnnnnnnnnnnnnnnnnnnnnnnnnnnnnnnnnnnnnnnnnnnnnnnnnnnnnnnnnnnnnnnnnnnnnnnnnnnnnnnnnnnnnnnnnnnnnnnnnnnnnnnnnnnnnnnnnnnnnnnnnnnnnnnnnnnnnnnnnnnnnnnnnnnnnnnnnnnnnnnnnnnnnnnnnnnnnnnnnnnnnnnnnnnnnnnnnnnnnnnnnnnnnnnnnnnnnnnnnnnnnnnnnnnnnnnnnnnnnnnnnnnnnnnnnnnnnnnnnnnnnnnnnnnnnnnnnnnnnnnnnnnnnnnnnnnnnnnnnnnnnnnnnnnnnnnnnnnnnnnnnnnnnnnnnnnnnnnnnnnnnnnnnnnnnnnnnnnnnnnnnnnnnnnnnnnnnnnnnnnnnnnnnnnnnnnnnnnnnnnnnnnnnnnnnnnnnnnnnnnnnnnnnnnnnnnnnnnnnnnnnnnnnnnnnnnnnnnnnnnnnnnnnnnnnnnnnnnnnnnnnnnnnnnnnnnnnnnnnnnnnnnnnnnnnnnnnnnnnnnnnnnnnnnnnnnnnnnnnnnnnnnnnnnnnnnnnnnnnnnnnnnnnnnnnnnnnnnnnnnnnnnnnnnnnnnnnnnnnnnnnnnnnnnnnnnnnnnnnnnnnnnnnnnnnnnnnnnnnnnnnnnnnnnnnnnnnnnnnnnnnnnnnnnnnnnnnnnnnnnnnnnnnnnnnnnnnnnnnnnnnnnnnnnnnnnnnnnnnnnnnnnnnnnnnnnnnnnnnnnnnnnnnnnnnnnnnnnnnnnnnnnnnnnnnnnnnnnnnnnnnnnnnnnnnnnnnnnnnnnnnnnnnnnnnnnnnnnnnnnnnnnnnnnnnnnnnnnnnnnnnnnnnnnnnnnnnnnnnnnnnnnnnnnnnnnnnnnnnnnnnnnnnnnnnnnnnnnnnnnnnnnnnnnnnnnnnnnnnnnnnnnnnnnnnnnnnnnnnnnnnnnnnnnnnnnnnnnnnnnnnnnnnnnnnnnnnnnnnnnnnnnnnnnnnnnnnnnnnnnnnnnnnnnnnnnnnnnnnnnnnnnnnnnnnnnnnnnnnnnnnnnnnnnnnnnnnnnnnnnnnnnnnnnnnnnnnnnnnnnnnnnnnnnnnnnnnnnnnnnnnnnnnnnnnnnnnnnnnnnnnnnnnnnnnnnnnnnnnnnnnnnnnnnnnnnnnnnnnnnnnnnnnnnnnnnnnnnnnnnnnnnnnnnnnnnnnnnnnnnnnnnnnnnnnnnnnnnnnnnnnnnnnnnnnnnnnnnnnnnnnnnnnnnnnnnnnnnnnnnnnnnnnnnnnnnnnnnnnnnnnnnnnnnnnnnnnnnnnnnnnnnnnnnnnnnnnnnnnnnnnnnnnnnnnnnnnnnnnnnnnnnnnnnnnnnnnnnnnnnnnnnnnnnnnnnnnnnnnnnnnnnnnnnnnnnnnnnnnnnnnnnnnnnnnnnnnnnnnnnnnnnnnnnnnnnnnnnnnnnnnnnnnnnnnnnnnnnnnnnnnnnnnnnnnnnnnnnnnnnnnnnnnnnnnnnnnnnnnnnnnnnnnnnnnnnnnnnnnnnnnnnnnnnnnnnnnnnnnnnnnnnnnnnnnnnnnnnnnnnnnnnnnnnnnnnnnnnnnnnnnnnnnnnnnnnnnnnnnnnnnnnnnnnnnnnnnnnnnnnnnnnnnnnnnnnnnnnnnnnnnnnnnnnnnnnnnnnnnnnnnnnnnnnnnnnnnnnnnnnnnnnnnnnnnnnnnnnnnnnnnnnnnnnnnnnnnnnnnnnnnnnnnnnnnnnnnnnnnnnnnnnnnnnnnnnnnnnnnnnnnnnnnnnnnnnnnnnnnnnnnnnnnnnnnnnnnnnnnnnnnnnnnnnnnnnnnnnnnnnnnnnnnnnnnnnnnnnnnnnnnnnnnnnnnnnnnnnnnnnnnnnnnnnnnnnnnnnnnnnnnnnnnnnnnnnnnnnnnnnnnnnnnnnnnnnnnnnnnnnnnnnnnnnnnnnnnnnnnnnnnnnnnnnnnnnnnnnnnnnnnnnnnnnnnnnnnnnnnnnnnnnnnnnnnnnnnnnnnnnnnnnnnnnnnnnnnnnnnnnnnnnnnnnnnnnnnnnnnnnnnnnnnnnnnnnnnnnnnnnnngagttgtatgcccaggcaaacaagggctgagcggcgttcgcatggctgtttcatgaccgcttgtttttctccttttggtgtaatgttttacaaatcctttggcctgagaactaatatgttaattgccttaaataaattaatagaagtcta

SEQ ID NO: 26117 - DNA, 76 bp, Macaca Mulatta
aagacaggggctatgggaatgacttccccattgaagacatgatccctaccctgaaggccgccatccgagccgtcag

SEQ ID NO: 26118 - DNA, 844 bp, Macaca Mulatta
  misc_feature (1)...(844): n = A,T,C or G
tcgtggtccaagaagcatctgaagcgggtagcagctccaaagcattggatgctggataaattgacncggtgtgtttgctcctcttccatccaccggtccccacaagttgagagagtgtctccccctcatcatcttcctaaggaacagacttaagtatgccctgacaggagatgaagtaaagaagatttgcatgcagcggttcattaagatcgatggcaaggtccgaactgatataacctaccctgctggattcatggatgtcatcagcattgacaagacgggagagaatttccgtctgatctatgacaccaagggtcgctttgctgtacatcgtattacacctgaggaggccaagtacaagttatgcaaagtgagaaagatctttgtgggcacaaaaggaatccctcatctggtgactcatgatgcccgcaccatccgctaccccgatcccctcatcaaggtgaatgataccattcagattgatttggagactggcaagattactgatttcatcaagttcgacactggtaacctgtgtatggtgactggaggtgctaacctgggaagaattggtgtgatcaccaacagagagaggcatcctggatcttttgacgtggttcacgtgaaagatgccaatggcaacagctttgccactcgactttccaacatttttgttattggcaagggcaacaaaccatggatttctcttccccgaggaaagggtatccgcctcaccattgctgaagagagagacaaaagactggcggccaaacagagcagtgggtggaaatgggtccctgggtgccatgtcagaactttgtacgtaatttaaaaaaattgtggg

SEQ ID NO: 26119 - DNA, 782 bp, Macaca Mulatta
gggcaatggagatgcttctagctctcagataatacatatttctgatgaaaatgaaggaaaagaaatgtgtgttctgcgaatgactcgagctagacgttcccaggtagaacagcagcagctcatcagtgttgaaaaggctttggcaattctttctcaaccgacaccctcacttgttgtggatcatgagcgattaaaaaaatcttttgaagactgttgttaaaaaaggtcgaaactacaacatatttcagttggaaaatttgtatgcagtaatcagccaatgtatttatcagcatcgcaaggactatgataaaacatcacttattcagaaaatggagcaagaggtagaaaacttcagttgttccagatgatgatgtcatggtattgagtattctttatattcagttcctatttaagtcatttttgtcatgtccgcctaattgatgtagtatgaaaccctgcatctttaaggaaaagattaaaatagtaaaataaaagtatttaaactttcctatttatgtacatattaagataaatgtcatgtgtaagataactgataaatattggaacttggctagaacaagatcctgtagaaatagtaataataggtgaagtttggccaactcttaataaggttattttggttaaccaatggttctatgggcaacttaaagagtcaattatccagccgctacaaattctgttgggcgatttacaccaccctttttaaatcttgtaatccctgtcccgaaaagagataagcccttacgtgtggtatcccaggt

SEQ ID NO: 26120 - DNA, 822 bp, Macaca Mulatta
  misc_feature (1)...(822): n = A,T,C or G
gggattctggggcggccggctttgttgggtgtgcttggtttggcgtccctgcggctgaccgtgattggtgattcgcagcatcttcgtaaccgctgacaggtcaaaatgcacatcttcgtgaagaccctgaccggcaagaccatcacccttgaggtggagcccagnnnnnnnnnnnnnnnnnnnnnnnnnnnnnnnnnnnnnnnnnnnnnnnnnnnnnnnnnnnnnnnnnnnnnnnnnnnnnnnnnnnnnnnnnnnnnnnnnnnnnnnnnnnnnnnnnnnnnnnnnnnnnnnnnnnnnnnnnnnnnnnnnnnnnnnnnnnnnnnnnnnnnnnnnnnnnnnnnnnnnnnnnnnnnnnnnnnnnnnnnnnnnnnnnnnnnnnnnnnnnnnnnnnnnnnnnnnnnnnnnnnnnnnnnnnnnnnnnnnnnnnnnnnnnnnnnnnnnnnnnnnnnnnnnnnnnnnnnnnnnnnnnnnnnnnnnnnnnnnnnnnnnnnngccgctctcctttctgactaccacatcccgaaagagtcgaccctgcacctggtcctgctccctgacaggtggcaatgcagatcttctctgaaaacccctgtaccggacaaaaaccattcacccctggaaagttggcatcccaaacttgccgaaccaattcgaaaaaattggtggaaagggccccttaatctcctaggattcatagcaaagggcgcctccctccacctccgaatcatagtaccaaagagggtcttctcattcttatatgatcaagggctctatatgccccagcctcgtgtgtaaaaaataaagtgaggccacnccccccaa

SEQ ID NO: 26121 - DNA, 2901 bp, Macaca Mulatta
  misc_feature (1)...(2901): n = A,T,C or G
tatgaatataagcaagagcgagataacaaaagaaacttcgttaaaaccgtctcggagatccctgccttgcctcgcccagagttacgcttactcaaagagcttgagccagtctacctccctcttccagtcaacagagagtgaatctcaggctcccacatctataaccttgatctccactgacaaagcagagcaagnnnnnnnnnnnnnnnnnnnnnnnnnnnnnnnnnnnnnnnnnnnnnnnnnnnnnnnnnnnnnnnnnnnnnnnnnnnnnnnnnnnnnnnnnnnnnnnnnnnnnnnnnnnnnnnnnnnnnnnnnnnnnnnnnnnnnnnnnnnnnnnnnnnnnnnnnnnnnnnnnnnnnnnnnnnnnnnnnnnnnnnnnnnnnnnnnnnnnnnnnnnnnnnnnnnnnnnnnnnnnnnnnnnnnnnnnnnnnnnnnnnnnnnnnnnnnnnnnnnnnnnnnnnnnnnnnnnnnnnnnnnnnnnnnnnnnnnnnnnnnnnnnnnnnnnnnnnnnnnnnnnnnnnnnnnnnnnnnnnnnnnnnnnnagccagctattgcaagccatgatataatgtttattaaaattcacattccatgggacacgctgtgcaagtatgcagagaggctgaatatcaggatgcccttcagnnnnnnnnnnnnnnnnnnnnnnnnnnnnnnnnnnnnnnnnnnnnnnnnnnnnnnnnnnnnnnnnnnnnnnnnnnnnnnnnnnnnnnnnnnnnnnnnnnnnnnnnnnnnnnnnnnnnnnnnnnnnnnnnnnnnnnnnnnnnnnnnnnnnnnnnnnnnnnnnnnnnnnnnnnnnnnnnnnnnnnnnnnnnnnnnnnnnnnnnnnnnnnnnnnnnnnnnnnnnnnnnnnnnnnnnnnnnnnnnnnnnnnnnnnnnnnnnnnnnnnnnnnnnnnnnnnnnnnnnnnnnnnnnnnnnnnnnnnnnnnnnnnnnnnnnnnnnnnnnnnnnnnnnnnnnnnnnnnnnnnnnnnnnnnnnnnnnnnnnnnnnnnnnnnnnnnnnnnnnnnnnnnnnnnnnnnnnnnnnnnnnnnnnnnnnnnnnnnnnnnnnnnnnnnnnnnnnnnnnnnnnnnnnnnnnnnnnnnnnnnnnnnnnnnnnnnnnnnnnnnnnnnnnnnnnnnnnnnnnnnnnnnnnnnnnnnnnnnnnnnnnnnnnnnnnnnnnnnnnnnnnnnnnnnnnnnnnnnnnnnnnnnnnnnnnnnnnnnnnnnnnnnnnnnnnnaagccaagaaatttgtaaagccactgaagtctttatgtgccctctctgtgacaagaactgctccctgcagagactcaacgacagctgtatctatgccaaggtgnnnnnnnnnnnnnnnnnnnnnnnnnnnnnnnnnnnnnnnnnnnnnnnnnnnnnnnnnnnnnnnnnnnnnnnnnnnnnnnnnnnnnnnnnnnnnnnnnnnnnnnnnnnnnnnnnnnnnnnnnnnnnnnnnnnnnnnnnnnnnnnnnnnnnnnnnnnnnnnnnnnnnnnnnnnnnnnnnnnnnnnnnnnnnnnnnnnnnnnnnnnnnnnnnnnnnnnnnnnnnnnnnnnnnnnnnnnnnnnnnnnnnnnnnnnnnnnnnnnnnnnnnnnnnnnnnnnnnnnnnnnnnnnnnnnnnnnnnnnnnnnnnnnnnnnnnnnnnnnnnnnnnnnnnnnnnnnnnnnnnnnnnnnnnnnnnnnnnnnnnnnnnnnnnnnnnnnnnnnnnnnnnnnnnnnnnnnnnnnnnnnnnnnnnnnnnnnnnnnnnnnnnnnnnnnnnnnnnnnnnnnnnncttatgaaaaaattgcttacctcctcaccaatttagnnnnnnnnnnnnnnnnnnnnnnnnnnnnnnnnnnnnnnnnnnnnnnnnnnnnnnnnnnnnnnnnnnnnnnnnnnnnnnnnnnnnnnnnnnnnnnnnnnnnnnnnnnnnnnnnnnnnnnnnnnnnnnnnnnnnnnnnnnnnnnnnnnnnnnnnnnnnnnnnnnnnnnnnnnnnnnnnnnnnnnnnnnnnnnnnnnnnnnnnnnnnnnnnnnnnnnnnnnnnnnnnnnnnnnnnnnnnnnnnnnnnnnnnnnnnnnnnnnnnnnnnnnnngttgatccagaactggtggtcacgacataaaatcaagcggggaatccatgatgcttccatacctcagtgggaaaatgattggaatctacagcccatgaaccttcacggactgatggatgagtacttagaaatgnnnnnnnnnnnnnnnnnnnnnnnnnnnnnnnnnnnnnnnnnnnnnnnnnnnnnnnnnnnnnnnnnnnnnnnnnnnnnnnnnnnnnnnnnnnnnnnnnnnnnnnnnnnnnnnnnnnnnnnnnnnnnnnnnnnnnnnnnnnnnnnnnnnnnnnnnnnnnnnnnnnnnnnnnnnnnnnnnnnnnnnnnnnnnnnnnnnnnnnnnnnnnnnnnnnnnnnnnnnnnnnnnnnnnnnnnnnnnnnnnnnnnnnnnnnnnnnnnnnnnnnnnnnnnnnnnnnnnnnnnnnnnnnnnnnnnnnnnnnnntgcttaaagggatatgtcaacaatagcctatccttctttgacctgagtgagcttggcatgggaaaatctggttattgcaggtacncaggtacagagactacagaggccccccttggagttccaagccctatgagtttactttacaatactggcatattcttgctgctaaattggccttcattattgtatttgagnnnnnnnnnnnnnnnnnnnnnnnnnnnnnnnnnnnnnnnnnnnnnnnnnnnnnnnnnnnnnnnnnnnnnnnnnnnnnnnnnnnnnnnnnnnnnnnnnnnnnatgatgtatgaggctgaactggaacatttgcaacaacaacggagaaaaagtggtcagcctgttcaccatgaatggccttag

SEQ ID NO: 26122 - DNA, 581 bp, Macaca Mulatta
ctggttgttcaaatggaaggaatagttaaaatctttcttctatagaaagcaagcacattagctaggatgacttcaaagtggcaacctgtgggggagttcttgagagcaaggtcccgtctgatcagcctgacacacctgccacctgcagcaagtattttcagtgctttgtgggcctccctgagggtctgtcttacccctgtgatctttagggtaccccagtgccacagccacttctgtttccacccagtgataggactgacgttctcagccagcttccatctgagagggtgttggctctgggctccagaagcctgaactgtggcacttatgtcctgggttgtttgttttgattgtgacaggtttgctgctcaactgagaaagcttcatggcctagaaattctcaactctacaatgaaatacatcagtgattcttgagagatacggtgtctgtgtgcatttagggaacacacaaatgcacactatgggttgttcctatgctaataaagacctttgatatatccacttcagaatcaaatattcattgtcagagtgtttgcatgtcgggttttcatggataacaa

SEQ ID NO: 26123 - DNA, 693 bp, Macaca Mulatta
  misc_feature (1)...(693): n = A,T,C or G
ataatttacagaaagcaagccactgaatccttcagttacatcaacctggcaatgtatcttcgatgcaacataatgaggtggcaggagcgtgatgaaataacagtcttcgaaaacatcatgtaagggagtccagttgtgcttgtatagtctctagctttgttatagaaatcatactactccttgtgactgaattccacaaggactttctccaggctctttgaatcttcattgttcactccaagttgtaacacagcttgaggagattttagttttgcttgagcagagtgagccatctgaaggttaagctgccatccaaccgtctctagcttatagggagccagaattctctgcctgaacttttcaactgtttcttgacccatagaagaccacgtattgacaaatgcttcagctttgtcttgtctaagatgaatgttctctaattggtgctgcaaagctgctggcttcacattgtgatatactgcctgttctaaaataaatgatattgtttcaagaactaggtgaagatcttgtttctctagagaaaatgccacttgaagtnnnnnnnnnnnnnnnnnnctgaaactgctctcagccttcaggtgaagtttctgaagaatccgagtgagcaactcgtggaaatcttcctatatctattgcattgatcagtgacactgcttttacacnctgggctct

SEQ ID NO: 26124 - DNA, 841 bp, Macaca Mulatta
  misc_feature (1)...(841): n = A,T,C or G
ggtgaaaattaacttttggggctatggagaaatagttaagtatcttaagttgctaaacatttccactgaatttttggagtgagccagggttactataaaatacttgggaagatgatttctctacctggaattagtttggagggtaagagtagcttttaacagaaataaatcaactgcagattttaagctcataannnnnnnnnnnnnnnnnnnnnattggcataaaaatgaaaatgttgtataaattggcaccaaatattccacttaaatgcatacacagtattagagtcaaaaactattttatccctctttgctgtttttcccccttctgcccactttcctgngtgttgggggggcccgctgacaacagtcacaaatccagcgacctaggaaaaaaattgttaatatggaatgaaaaattatctttacaggactgaattttaagcccatctaaactcttcttccttagctatcactaatgatattcctctgtggattttgtggtgagaaaggcactatgagttcctgaatttaaggagaaaaatataaacttgtaatcaatgccatgcaaaattcattgcaagtcaaggggggatgggagaaatgcaatgccatacagtgatacagacctttaaaaaagtacagtaatttcttgaaattcaaaccctaatctaacttctaaaggtcaattaactaatttccaaaagttcaaaacccattctgggaaatttggccttttttttaacctttttccctcccctggctcacctggccacctggggtgtccttaaccacccatttctttccaggggctgggggtaacccctggcggaacaaccac

SEQ ID NO: 26125 - DNA, 904 bp, Macaca Mulatta
gggaacagtcttcctggcactctggaatttcccttttttaggccccacagccttgtgcccttggcgcaccgtttctctccttcaatgggcacctcttttcaattcacgggattgcgcacctttcgttagggacactaacacagtccagacagtgccgcgtcatgtgtctctgcggtgtttgtgaacaggaattgcacgaaactgaattcccggcatcccagctgaaactcaggatgaaaaccgaagaagaggcccggattcatatggacattgaaatgttccttagaaagcagcagcagaaacttgaggagaggctagagttctggatggagaaatatgataaggacacagaaatgaaacagaatgaactaaatgctctcaaagccacaaaggccagtgacttagcacaccttcaagacctggcaaagacgataagagagtgtgaacaggtcatcattgaagatcgtatagaaaaggagaagagcaagaataagatagaacaggatctcttggaattaaagagcgtcataaagctccaggcctggtggcggggcactatgatacggagagaaattggtggtttcaagatgcctaaagacaaagttgatagcaaggattcaaaaggaaaaggcaaaggcaaggacaagaggagaggcaagaagaagtgaccaagtttctcttctgtcttttcctctggtatttctggaggtggggaaaggactttgaggagagtttaagaaaacaccctgggttacccatccaaagaatggacctccatcttacagggttggtttttcccaaattggagaacctttttccccgaggggaaagcccctggatttttcacacttcctggcccggggtttataaatttgccccctcccctgggcccctggaatattta

SEQ ID NO: 26126 - DNA, 852 bp, Macaca Mulatta
  misc_feature (1)...(852): n = A,T,C or G
ggcactgcaggcggcgggccatggtggtttggattgagccgggcccggccggggcgccgagtcggagggggtggcagtgagcggcggcagaggctgcggggctcggtttggctgactggggagtcggcaggcggcaggnnggaaccatgcgaggccagcggagcctgctgctgggcccagcccgcctctgcctccgcctgcttctgctgctgggctacaggcgccgctgtccacctctgctccggggtctagtacagcgctggcgctacggcaaggtctgcctgcgctccctgctctacaactcctttgggggcagtgacactgctgttgatgctgcctttgagcctgtctactggctggtagacaatgtgatccgctggtttggagtggnnnnnnnnnnnnnnnnnnnnnnnnnnnnnnnnnnnnnnnnnnnnnnnnnnnnnnnnnnnnnnnnnnnnnnnnnnnnnnnnnnnnnnnnnnnnnnnnnnnnnnnnnnnnnnnnnnnnncctggctaaacaattgtgtgggccactataaccatcgatacttcttctcattctgctttttcatgactctgggctgtgtctactgcagctatggaagttgggaccttttccgggaggcttatgctgccattgannnnnnnnnnnnnnnnnnnnnnnnnnnnnnnnnnnnnnnnnnnnnnnnnnnnnnnnnnnnnnnnnnnnnnnnnnnnnnnnnnnnnnnnnnnnnnnnnnnnnnnnnnnnnnnnntaactgtatggcatgctgttctcatcagtcgaggtgagactagcatcgaaaggcacatcaacaagaaggagagacgtcggctacaggccaagggcagag

SEQ ID NO: 26127 - DNA, 344 bp, Macaca Mulatta
gctccttcccggcgacgtgctggccctgctggagacctggatgcccctctcgcctctggagtggctgcctgaggagcccaagtgacagcggacaactgacgccgtctctatgagcaccgaggctcttttggcctcagccccttcgaagtggttccttagcagactgcctttcctggaagagggcaccggcgatcccggcaggggcattcctgcgggtgagagccttgcccaccacagcggcccttctcagcaccccccctccatggagggacccatagagttagacactttgaagcaagcaggaggctctgcctaatgtgaatttatttatttgtgaataaact

SEQ ID NO: 26128 - DNA, 196 bp, Macaca Mulatta
  misc_feature (1)...(196): n = A,T,C or G
ngcctccaaagttctcatctatgggaatttgtacgagacctgcttctatctcctgaagaaaactgtggcattctggaatgggaagatagggaacaaggaatttttcgggtggttaaatcagaagccctggcaaagatgtggggacaaaggaagaaaaatgacagaatgacatacgaaaagttgagcagagccctga

SEQ ID NO: 26129 - DNA, 2039 bp, Macaca Mulatta
  misc_feature (1)...(2039): n = A,T,C or G
ccagagtccggagcagccgccgcccgaccacgccgagctcagttagctgcctgcgccggctcccaccccggcccgaccccgacccggcccggccaggccccatactnnnnnnnnnnnnnnnnnnnnnnnnnnnnnnnnnnnnnnnnnnnnnnnnnnnnnnnnnnnnnnnnnnnnnnnnnnnnnnnnnnnnnnnnnnnnnnnnnnnnnnnnnnnnnnnnnnnnnnnnnnnnnnnnnnnnnnnnnnnnnnnnnnnnnnnnnnnnnnnnnnnnnnnnnnnnnnnnnnnnnnnnnnnnnnnnnnnnnnnnnnnnnnnnnnnnnnnnnnnnnnnnnnnnnnnnnnnnnnnnnnnnnnnnnnnnnnnnnnnnnnnnnnnnnnnnnnnnnnnnnnnnnnnnnnnnnnnnnnnnnnnnnnnnnnnnnnnnnnnnnnnnnnnnnnnnnnnnnnnnnnnnnnnnnnnnnnnnnnnnnnnnnnnnnnnnnnnnnnnnnnnnnnnnnnnnnnnnnnnnnnnnnnnnnnnnnnnnnnnnnnnnnnnnnnnnnnnnnnnnnnnnnnnnnnnnnnnnnnnnnnnnnnnnnnnnnnnnnnnnnnnnnnnnnnnnnnnnnnnnnnnnnnnnnnnnnnnnnnnnnnnnnnnnnnnnnnnnnnnnnnnnnnnnnnnnnnnnnnnnnnnnnnnnnnnnnnnnnnnnnnnnnnnnnnnnnnnnnnnnnnnnnnnnnnnnnnnnnnnnnnnnnnnnnnnnnnnnnnnnnnnnnnnnnnnnnnnnnnnnnnnnnnnnnnnnnnnnnnnnnnnnnnnnnnnnnnnnnnnnnnnnnnnnnnnnnnnnagctcccctgtggagtcggtcctgttctacgccatcaccacgctgcataacctgctcctgtaccaggagggcgccaagatggccgtgcgcctggctgacgggctgcaaaagatggtgcccctgctcaacaagaacaatcccaagttcctggccatcaccaccgactgcctgcagctcctggcctacggcaaccaggagagcaannnnnnnnnnnnnnnnnnnnnnnnnnnnnnnnnnnnnnnnnnnnnnnnnnnnnnnnnnnnnnnnnnnnnnnnnnnnnnnnnnnnnnnnnnnnnnnnnnnnnnnnnnnnnnnnnnnnnnnnnnnnnnnnnnnnnnnnnnnnnnnnnnnnnnnnnnnnnnnnnnnnnnnnnnnnnnnnnnnnnnnnnnnnnnnnnnnnnnnnnnnnnnnnnnnnnnnnnnnnnnnnnnnnnnnnnnnnnnnnnnnnnnnnnnnnnnnnnnnnnnnnnnnnnnnnnnnnnnnnnnnnnnnnnnnnnnnnnnnnnnnnnnnnnnnnnnnnnnnnnnnnnnnnnnnnnnnnnnnnnnnnnnnnnnnnnnnnnnnnnnnnnnnnnnnnnnnnnnnnnnnnnnnnnnnnnnnnnnnnnnnnnnnnnnnnnnnnnnnnnnnnnnnnnnnnnnnnnnnnnnnnnnnnnnnnnnnnnnnnnnnnnnnnnnnnnnnnnnnnnnnnnnnnnnnnnnnnnnnnnnnnnnnnnnnnnnnnnnnnnnnnnnnnnnnnnnnnnnnnnnnnnnnnnnnnnnnnnnnnnnnnnnnnnnnnnnnnnnnnnnnnnnnnnnnnnnnnnnnnnnnnnnnnnnnnnnnnnnnnnnnnnnnnnnnnnnnnnnnnnnnnnnnnnnnnnnnnnnnnnnnnnnnnnnnnnnnnnnnnnnnnnnnnnnnnnnnnnnnnnnnnnnnnnnnnnnnnnnnnnnnnnnnnnnnnnnnnnnnnnnnnnnnnnnnnnnnnnnnnnnnnnnnnnnnnnnnnnnnnnnnnnnnnnnnnnnnnnnnnnnnnnnnnnnnnnnnnnnnnnnnnnnnnnnnnnnnnnnnnnnnnnnnnnnnnnnnnnnnnnagctcctgtactcatcggtggagaacatccagcgtgtggccgccggggtgctgtgtgagctggcccaggacaaggaggcggctgacgccattgatgcagagggggcctcggccccactcatggagttgctgcactcccgcaacgagggcactg

SEQ ID NO: 26130 - DNA, 625 bp, Macaca Mulatta
ccctccaggaaaggcaatagactcatgcccaggggacagctgccccggtagcctcaggagcaccccttgctggtgaaggatgcggcaggtgctctgtggatgagaggaaccatctcaggatgacacctcccgggtccccaaacctgttcccctctactactcgccactgagaagtgcactttaagaggtaggagctgggcagaccccgctacctcctccaggctgggggacagagtccggctgttgaaccccacctagccccaagttccccaggcccagtggggtggccgggcaggccacgcggggccgactttccattgattcaggggtctgatgacacaggctgactcatggccaggctgactgcccccctgccttgctccccgaggcctgccagtccttccctcttatgacttgcagggccgttgcccccagacttcctcctttccgtggttctgaaggggaggtcacagcctgagctggcctcctatgcctcatcacgtcccaagccagacacctggatgtctgggtgacctcactttaggcagctgtaacagcggcagggtgtcccaggagccctgatctgggggtccagggaatagagctcaggtcccagcccagcccc

SEQ ID NO: 26131 - DNA, 961 bp, Macaca Mulatta
aattcttgattcttcctgggaaggagccaaaaatgtgtataaatgtcctgagtgtgaccaaaacttcagcgatcattcatacctggttttgcatcagaaagttcattcaggagagaaaaaacataaatgtggtgactgtgggaagatcttcaatcatagagccaacctgaagacacacaggagaatccatactggtgagaaaccttataagtgtgccaagtgcagtgccagctttcgccagcactcgcatctgtcccgacacgtgaatagccatgtaaaggagaagccctatacatgtagcatatgtggtagaggttttatgtggctcccaggattggcacagcatcagaaaagccacagtgctgaaaaagcttacgaatctactaaccgtgataaacattttaatgagaaaccaaatcttgctttgcctgaggaaacattcatatcaggcccccagtaccagcacactaagtgcttgaagagcttcaggcagtcctcatatcctgccctttctgagaagagccacgacgaggactttgaacgctgcagcgatgatggggacaatttcttctcattctcaaaattcaagcccttgcaatgtcctgactgtgacatgacctttccttgtttctctgagcttatttcccatcagaacattcatacagaggaaaggccctatacatgcaaaacatgcgagaaaagttttgctttggactcagaacttgcatgccaccagaagaggcacatggtagaggaaacttttaaatgtactgtgtgtgagaagagtttcaggtcaaatttgcatctcattactcataagcgaactcacataaaaaacaccacataaatttaacaacttgttattagtgattgggcttttcagtatctgtatggtgggaagcagttactgtatatgtcccaggcaatgtgctaagcaatgtacacacattcccatgtaata

SEQ ID NO: 26132 - DNA, 960 bp, Macaca Mulatta
catcaacatgagggcactgaccagcacagcatacagggtggccttccccagcaggatctcatagaggatggtggcagacaggaccccttgctggtaggacactgaggtgaagccacagtctgctctaccccagacctcggcgctgatcttttgggtgatgggcttgtccctgtcctcggtccactcgtcatcctccgagagcccatagaactggacttggcagcggaagtggttgcgggggttgtgccagaaggtggccgagaccctcaggcggctgctcaggcagtatctggagtcctcgagggcgggctgctccttgaggggctgtgggtccgtgctgaccccactgtgcacctctttcccgttcacccaccagctcagctccacgtggtcggggtagaagcctgtggccaggcacaccagcgtggccttttgggtgtgggagatctctgcttctgatggctcaaacacagcgaccttgggtgggaacacctttttcaggtcctctacaacagttaacttggtccctgaaccgaaggtgtagtcgacgattaagccctggtccgtcactgctggcacagaagtacatggctgagtcctccagctttgtggacttgatcttcagagtgaaatgtactccatcagaccttccaactgagaatcgatcttcaaatatttcagacttctctgagatcttaccattatagaaggaaaccagaaactcgactttctgccccaagatttgtctgtaccaatagaagtataagtgattagggatggggacacaccgcaagatcacttcctgtcccatctgtgtgacctgatggctgggagtctgggtgacttcaggttctgtgtgtcctgctttcaagagactaaaaattgcccagcataggagccaggtatccatggcaggatcacagcaggaatgagggctctcggggccggatccgaattcgc

SEQ ID NO: 26133 - DNA, 1428 bp, Macaca Mulatta
gggggggtggcacctctccctcctcctcctggcgttagttccggtcgcagaggagacaccgccgcagttgccgctacatcggggatttctggctctttcctcttcgccttaaattcgggtgtcttttatgaataatcaaaagcagcaaaagccaacgctgatcgaggccagcgttttaaaactagaaaaagagatgaaaaagagaggtttgaccctactcagtttcaagactgtattattcaaggcttaactgaaaccggtactgatttggaagcagtagctaagtttcttgatgcttctggagcaaaacttgattaccgtcgatatgcagaaacactctttgacattctggtggctggtggaatgctggccccaggtggtacactggcagatgacatgatgcgtacagatgtctgcgtgtttgcagcccaagaagacctatagaccatgcaagcatttgctcaggtttttaacaagtttaatcaggcgctacaaataaccttggagaaaggttttgaaagatgaagtaaaaaagctgctgctgtttcttaaaggggtttttcagaagtccggagagggaacaagcctgggctatgtttgaatgggtgtttcttcttgggctaatggaacacttaatgcgtccattcttaatagcctttataatgagaatttggttaaagaaggagtttcagcagcttttgctgtaaagctctttaaatcatggataaacgaaaaagatatcaatgcagtagctgcaagtcttcggaaagtcagcatggataacagactgatggaactctttcctgccaataagcaaagtgttgaacactttacaaagtattttactgaggcaggcttgaaagagctttcagaatatgttcggaatcagcaaaccattggagctcgtaaggagctccagaaagaacttcaagaacagatgtcccgtggtgatccatttaaggatataattttatatgtcaaggaggagatgaaaaaaaacaacatcccagaaccagttgtcattggaatagtctggtcaagtgtaatgagcactgtggaatggaacaaaaaagaggagcttgtaacagagcaagccatcaagcacttgaagcaatacagccctctacttgctgcctttactactcaaggtcagtctgagctgactctgttactgaagattcaggagtattgctatgacaacattcatttcatgaaagccttccagaaaatagtggtgctttttttataaagccgaagtcctgaagtgaaaagcccatttttgaagggggtaataaagaatgcacatgtttgcaaaaggggaagaagtgtttttcctttgaaccaattggaaaaagtttggtagaaaagggcttccaaaaatgccgaaaaaaggaatccgaaatctggaaaacttgaaaaaaggtgggc

SEQ ID NO: 26134 - DNA, 798 bp, Macaca Mulatta
gatcatgagcctccaccgctgcgtcgtcctggtggccgcctgctggaccctcacgagtcttgccttcatgactcacaccttcctcatatcccagctttccttctgctctaagatcattcctgacttcttctgtgatttgggaccgctgatgaaggtgtcttgctttgacacccaggtcaatgagcttgtgctcctgttcctagggggaacagtcattctaatcccttttatgctcgtcctggtctcttatatccaaattgtttcagccatcctcagggcgccctctgcccagggaaggcgcaaggccttctctacctgcggctctcacctcgttgttgttgctctgttcttcgggacggtgatcagggcgtatctgtgcccctcatcctcttcttccagctcagtagaggaggatacagcggctgctgtcatgtacacagtggtgactcccctgctgaacccctttatttatagcctgcggaacaaggacatgaaggctgcagtggttagacttctcaagggcagagtctccttctcacagggccagggccagtgacttctgctgagaaactgaaggtgttctccttcccctccagtgacgggcttgacagaaatttctacctcaaagtgtctcatttctgaatcccacatatcccttatcagcactcccctccccaagtgcccactgcaagtttggtattataaagggaaatcaatgttttgctttgtgcttaatctgttaagagctccttatttgcttatttaacttattaataatttttcaaaaggaggcatgac

SEQ ID NO: 26135 - DNA, 484 bp, Macaca Mulatta
  misc_feature (1)...(484): n = A,T,C or G
tctctgtcacaccagaaatcatctttgaaggggacacagtcagtctggtgtgtgaaaacgaacttttgtcctccaatgtgtcttggcgctatgaagaacagcagttggaaatccagaacagcagtaaattctcgatttacactgccgtgttcaacaacatgacttcggtgtccaagctcaccatccgcaacatcactccgggtgatgcaggtnnnnnnnnnnnnnnnnnnnnnnnnnnnnnnnnnnnnnnnnnnnnnnnnnnnnnnnnnnnnnnnnnnnnnnnnnnnnnnnnnnnnnnnnnnnnnnnnnnnnnnnnnnnnnnnnnnnnnnnnnnnnnnnnnnnnnnnnnnnnnnnnnnnnnnnnnnnnnnnnnnnnnnnnnnnnnnnnnnnnnnnnnnnnnnnnnnnnnnncaggaacccctgagacagacatagattctagctgcagcagatcactctcaaggctggggaacccagtgcccaa

SEQ ID NO: 26136 - DNA, 181 bp, Macaca Mulatta
aggtttgggattaaaggtgctgcttatctaaaaaataaagatggtttagtcatctcatctggcccagatagccgttctgcatggaaaccaggatcccttcaacgatttcaaaacaaaattacctctactacaacagatggggaatctgttacgttccatttgtttgaccatgtaaccgtaa

SEQ ID NO: 26137 - DNA, 700 bp, Macaca Mulatta
cacacccattcgattatgtactgcctgtggctgttttcccactaccaggccagagctcaaagagcagttaaccaaatagcccccaagaccgaacatattcactactaggactttaactactggctgactcctatgcttgataacaactactacaacaaaagagttgacacttactatttccaattgggagggaggactcgcttggtcttataatatcgagccaaacggtgaatccggctctctatcagaatcagacggaatttagcatccttatcctttctgttcctctcaagatgctttcgaacagcaactgctttcttaattaaatggtagagatcttcaggaagatcaggagcaagtcccttagacttaagaattcttaagattttattgcctgtcacaaaacgtacttgtgcaacaccatgtgaatctctcaggatcacacctgaaaagggaatcatgttttaactttcaacacgaaacactaactggatgatgtcgaggctcagaaatcagggcatagttcctatctgtaagctggaggtatacttttatacatcacagaaaccaacatgggaatgcacataaagctcactcagacatccaaggaaggtttacccaagactaaggaaacctttctggtggaaactaagaatgctggaaactatcatcccagtggttgctggaatacagatgacca

SEQ ID NO: 26138 - DNA, 717 bp, Macaca Mulatta
tcatctagctttcaaggtgataagttctgagcaatactgttctctaagttcttgagctgctggtgatttccgtaatggtttctgttcattttctcctgtgtcttttcagcctagtggaggccagtataagattcagatctttgagaaaggggattttaatggtcagatgtatgaaaccactgaagattgcccttccatcatggagcaatttcatatgcgagagatccactcctgtaaggtgctggagggtgtctggattttctatgagctacccaactaccgtggcaggcagtacctcctggacaagaaggagtaccggaagcccatcgattggggtgcagtttccccagctgtccagtctttccgccgcattgtggagtaatgacatgaatggggccatattcttcctgaggcccaaatgctggctggccttgtggtccaaataggcatcatcaataaaacagttggcatgcatcccactgctgactataacgcctctccttaaatgcttctagggaccagcaatataatgctcgccatggtgggcagttacactaagcaacacatctaccagatcaccgatctagatctttgtgccaaacaaaatgagtctcattaaaaggttagaaagtcatactgccatgtggtggttccttttgtttatgttttgcattaaatcaacaggcacagtaataatggctaccatttattgagtgc

SEQ ID NO: 26139 - DNA, 227 bp, Macaca Mulatta
tttaaagaagtttattatttttcttttgcctgtgatatcaaatttgcaacagaaaaatattatttatggtgatgaatgttgatgtgtctgtggtaaataaaaacacagtagatgactgtagggtaaggttggagatgactataagacatctaataattttgcttgcttatgaaggcgaaatcattttacaggttatgaacagatttagaattattcatgtgctctga

SEQ ID NO: 26140 - DNA, 1199 bp, Macaca Mulatta
  misc_feature (1)...(1199): n = A,T,C or G
ttctttttgnnnnnnnnnnnnnnnnnnnnnnnnnnnnnnttnnnnnnnnnnnnnnnnnnnnnnnnnnnnnnnnnnnnnnnnnnnnnnnncatggaagcacgggcggagacgaagggagaagggaggcaaccatgggtcgttattgctctctttattgctcgtttctgctctgcttgccctgtcctttccatgctgcactgtcccgcctgtttgctctcttggcccttttacgttgtcccactcggtcctgactttgtcgtatcctccttctcttacgccttcttttcacttgtgtctcccccgtcacatacaatcagcagcctcggcttctgtgaccacacctgctagacagccaggccagcttcaatgcccctcgaatggggattgttgacttggaagatggtgcccatctcaggatgaggggctccgtcagcccctcatgcggcacatggcacgtgtatctctgctcttctccagaaggcaccaccacagctccccatttgtggaaggttccatctcctcctggcctggtctccacaagctcagtgtcctgagtttggtcctccccatcccgctgccaggtcagtgtgatctccgcagggtagaagcccagggcccagcacctcaggatggtctcatggtcagagacagggtgctgggtcacgtgtgtctttggggggtccgcacgctgcagcatctccttcccattctccaggtatctgtggagccactccactcacgtgccctccaggtaggctctccttcgttcagtcgctttggccgcctcacacttgcgcttggagatctgagccacagtgtccgctgcggttcaggagcacaggtcctcgttcagggcgaggtaatccttgccatcgtaggcgaactgttcacacctgcagaggaggcgcccgtcgggccccaggtcgcaaccaatcatccactggagggtgtgagaaccggcctcgctctggttgtagtagctgcgcagggtccgcaggttcactctgtcagtgtgtgcgtgggccttggcgatccgtgtctcctcttcccaatactccggcccctcctgctccacccacggcgcccgaggctccatcctcggactcgcagcgtcgctatcgagccgcacgaactgcgtgtcttccacgtagcccaccgcgatgaagcggggctccccgcggccgggccgggacacggca

SEQ ID NO: 26141 - DNA, 212 bp, Macaca Mulatta
gacctgaataaggcctaagggtaattgttggaaagctgggatgaaagaagctttaaaagggaaccttgttccttgaaccagctcccgaaattctgaaaaagaagttaccttaatttccttcaccaagattaagatagggagctagtcgtgaggtaactctggaatggatgaatggatgtcttgatgggagataaggaaagtagatagttttc

SEQ ID NO: 26142 - DNA, 606 bp, Macaca Mulatta
  misc_feature (1)...(606): n = A,T,C or G
gcatattcatgtacccagacttacacctttaataacaagcaattgcacatcaaaatcagttcccgtgaggannnnnnnnnnnnnnnnnnnnnnnnnnnnnnnnnnnnnnnnnnnnnnnnnnnnnnnnnnnnnnnnnnnnnnnnnnnnnnnnnnnnnnnnnnnnnnnnnnnnnnnnnnnnnnnnnnnnnnnnnnnnnnnnnnnnnnnnnnnnnnnnnnnnnnnnnnnnnnnnnnnnnnnnnnnnnnnnnnnnnnnnnnnnnnnnnnnnnnnnnnnnnnnnnnnnnnnnnnnnnnnnnnnnnnnnnnnnnnnnnnnnnnnnnnnnnnnnnnnnnnnnnnnnnnnnnnnnnnnnnnnnnnnnnnnnnnnnnnnnnnnnnnnnnnnnnnnnnnnnnnnnnnnnnnnnnnnnnnnnnnnnnnnnnnnnnnnnnnnnagtatcagcaggcagcagcaaagctagttcccttccaggaagtctgcagcgttcacgaagtgacattgatgtgaatgctgctgctggtgccaaagcacatcatgctgctggacagtctgtgcgaaacgggcgcttaggtgcaggtgccctgaatccaggttcgtatacatcacta

SEQ ID NO: 26143 - DNA, 679 bp, Macaca Mulatta
cgggcgccgaggctttgcaggtgctcgcagcggccagaaatccggctccgcagcggcggcggcccggcttccgctgcccgtgaccaaagggacggtcctctccctctcgccggctccgaatcctgatccgggcgggggccagaggcccctcgcctcccatctgaggaccgaagatgagcttcctcttcagcagccgctcttctaaaacattcaaaccaaagaagaatatacctgaaggatctcatcgagtatgaactcttaaaacatgcagaagcgactctaggaagtgggaatctgagacaagctgttatgttgcctgagggagaggatctcaatgaatggattgctgtaaacactgtggatttctttaaccagatcaacatgttatatggaactattacagaattctgcactgaagcaagctgtccagtcatgtctgcaggtccgagatatgaatatcattgggcagatggtactaatattaaaaagccaatcaaatgttctgcaccaaaatacattgactatttgatgacttgggttcaggatcagcttgatgatgaaactctttttccttctaagattggtgtcccatttcccaaaaactttatgtctgtggcaaagactattctaaagcgtctgttcagggtttatgcccatatttatcaccagcactttgatt

SEQ ID NO: 26144 - DNA, 2815 bp, Macaca Mulatta
  misc_feature (1)...(2815): n = A,T,C or G
cacgtgttccgacccgctaggccccgcgcggctcggatccggcggcgctatttcggtcgggagtgggtgggagagaagccggggcaggggaggagccgctggagctgtcggagccgtgnnnnnnnnnnnnnnnnnnnnnnnnnnnnnnnnnnnnnnnnnnnnnnnnnnnnnnnnnnnnnnnnnnnnnnnnnnnnnnnnnnnnnnnnnnnnnnnnnnnnnnnnnnnnnnnnnnnnnnnnnnnnnnnnnnnnnnnnnnnnnnnnnnnnnnnnnnnnnnnnnnnnnnnnnnnnnnnnnnnnnnnnnnnnnnnnnnnnnnnnnnnnnnnnnnnnnnnnnnnnnnnnnnnnnnnnnnnnnnnnnnnnnnnnnnnnnnnnnnnnnnnnnnnnnnnnnnnnnnnnnnnnnnnnnnnnnnnnnnnnnnnnnnnnnnnnnnnnnnnnnnnnnnnnnnnnnnnnnnnnnnnnnnnnnnnnnnnnnnnnnnnnnnnnnnnnnnnnnnnnnnnnnnnnnnnnnnnnnnnnnnnnnnnnnnnnnnnnnnnnnnnnnnnnnnnnnnnnnnnnnnnnnnnnnnnnnnnnnnnnnnnnnnnnnnnnnnnnnnnnnnnnnnnnnnnnnnnnnnnnnnnnnnnnnnnnnnnnnnnnnnnnnnnnnnnnnnnnnnnnnnnnnnnnnnnnnnnnnnnnnnnnnnnnnnnnnnnnnnnnnnnnnnnnnnnnnnnnnnnnnnnnnnnnnnnnnnnnnnnnnnnnnnnnnnnnnnnnnnnnnnnnnnnnnnnnnnnnnnnnnnnnnnnnnnnnnnnnnnnnnnnnnnnnnnnnnnnnnnnnnnnnnnnnngccaggaagtcctgtcagaggagacggtgcatttaggagcggagcctgagtcacctagtgagcttcaggatcctgtgcaaagctcgaccccccggcagtctcctgaggaaaccacacagagcccagatcggggggcaccagcagagcagcgtctgcaccaggaagaggagctccagtccctgcaggagagcgngaggtcccagtgccccaggagccagaccttcccgcagagaggagctctggagactcagagatggttgctcttcttactgctctatcacnnnnnnnnnnnnnnnnnnnnnnnnnnnnnnnnnnnnnnnnnnnnnnnnnnnnnnnnnnnnnnnnnnnnnnnnnnnnnnnnnnnnnnnnnnnnnnnnnnnnnnnnnnnnnnnnnnnnnnnnnnnnnnnnnnnnnnnnnnnnnnnnnnnnnnnnnnnnnnnnnnnnnnnnnnnnnnnnnnnnnnnnnnnnnnnnnnnnnnnnnnnnnnnnnnnnnnnnnnnnnnnnnnnnnnnnnnnnnnnnnnnnnnnnacaggagataggagtaaagatgaggaagagtgtccggagcaggaagatctgagtttggaggatatacacaggcctattttgggagaaccagaaattcaccagactccagattgggaaatagtcttcgaggacaatccaggtggacttaatgaaagacgatttggtacaaatatttctcaagtgaatagttttgtgaaccttcgggaaactacgcccatccagcccctgttagggaggcatcatgactgttctgtgtgtggaaagagcttcacttgtaactcccatcttgttagacacctgaggactcacacgggagagaaaccctataaatgcatggagtgtggaaaaagttacacacgaagctcacatcttgccaggcaccaaaaggttcataagatgaatgcgccttataaataccccctaaaccggaagaatttggaagagacctcccctttgacccaggccgagagaactccatctgtggagaagccctatagatgtgatgattgtggaaagcacttccgctggacttcagaccttgtcaggcatcagaggacacatacaggagaaaaacccttcttttgtactatttgtggcaaaagcttcagccagaaatctgtgttaacaacacaccaaagaatccacctgggaggcaaaccctacttgtgtggagagtgtggcgaggacttcagtgagcacaggcggtacctggcgcaccgcaagacacacgctgccgaagagctctacctctnnnnnnnnnnnnnnnnnnnnnnnnnnnnnnnnnnnnnnnnnnnnnnnnnnnnnnnnnnnnnnnnnnnnnnnnnnnnnnnnnnnnnnnnnnnnnnnnnnnnnnnnnnnnnnnnnnnnnnnnnnnnnnnnnnnnnnnnnnnnnnnnnnnnnnnnnnnnnnnnnnnnnnnnnnnnnnnntgggaaaagcttcagcagaggatatcacttaattagacatcagaggacccactcagaaaagacctcctagctagggccccatgtgaggagatctgctttcagccctcacctaagggaggtgaggaataggaaaagccctcttgtcagcccgggaagaccttttcgagggagtctccctgacctgcccagatctgacctcacctcttcctgcaactaaatacaagcctgggcagaacctctccgtcgtcttctacaccttgaggggatgtttcatccaaagtacaacctgaattgaggcttctccttcactggagtgcgcctgcctctacctcatgggtataaagtaggagaattaagagacttaagaggttgtggttactgtatcgtccaaaaaataggctgttacatatcctaaagactgctcaacagcttcaggttgaaagtggccaaggacagccccgtaggtttgggaagggaccagcctgaaggatgctgtcttttagtggggtcaaatcttaaagcacacagctct

SEQ ID NO: 26145 - DNA, 331 bp, Macaca Mulatta
ggggcggggtgcgccctccctccgcggccagggcgctctggagccgggacccgagcctgcagccgagcgccgctcccagccccggacacccggctcagccaagcatccttcctgggggccgagaaagtggggccactctgccgttccgaggacctgagaggagcccttggtcccccgggccccggtgccctggggcgcacacgtccagcccagcctgagcctgcatttcctgagccgggatttggggcgagatggccgcaggcggcggtgcgcccgagccccgcgtcctcgtctgcctcggggcgctcctggccggctgggtcgccttagg

SEQ ID NO: 26146 - DNA, 637 bp, Macaca Mulatta
ggatcgacatggaaatgataaatccacacccaagaagacttgcaaaaagaggcagtcttctgagtctgacattgagagcgtcatatataccattgaagccgtcgcaaagggagactggggaatagagaaacttggagatacccctcgcaagaaggtccgcacatcctcaagtggcaagggaagcattttggatgccaagccaccaaagaaaaaagtgaaatcaagagagaagaaaatgtcaaaggagaaatcctcagataccaccaaagagtcaagacctccagatttcattagtatttctgctagcaagaacatttctggtgaggcgccagagggtataaaagcagaaccattgacgcccatggaagatgcactaccacccagcctatcaggacaggccaagcctgaggacagtgactgtcacagaaaaatagaaacttgcggttccaggaaatccgagaggtcttgcaaaggtgctctttataaaaccctggtgtctgagggcatgctcacctctctgcgagctaatgttgacagagggtaagtactccctacaaccctgaaagaatcaaaaacaagcagaatttcacctttagactattgaaaacactgccataaagaacacatggtatcaaat

SEQ ID NO: 26147 - DNA, 1517 bp, Macaca Mulatta
  misc_feature (1)...(1517): n = A,T,C or G
agtgaatctggaggagtgtctcaagtcgcccagcctaatccagtccagtgaccctgccttcagaattctagaagatggctcaatttacacaacacgtgacctcattttgtcttctgaaaggaaaagtttttccattttcctttcaggtagtgagagacatgaacaacaagagataaaagttgtactgtcagcaagagaaaacaagnnnnnnnnnnnnnnnnnnnnnnnnnnnnnnnnnnnnnnnnnnnnnnnnnnnnnnnnnnnnnnnnnnnnnnnnnnnnnnnnnnnnnnnnnnnnnnnnnnnnnnnnnnnnnnnnnnnnnnnnnnnnnnnnnnnnnnnnnnnnnnnnnnnnnnnnnnnnnnnnnnnnnnnnnnnnnnnnnnnnnnnnnnnnnnnnnnnnnnnnnnnnnnnnnnnnnnnnnnnnnnnnnnnnnnnnnnnnnnnnnnnnnnnnnnnnnnnnnnnnnnnnnnnnnnnnnnnnnnnnnnnnnnnnnnnnnnnnnnnnnnnnnnnnnnnnnnnnnnnnnnnnnnnnnnnnnnnnnnnnnnnnnnnnnnnnnnnnnnnnnnnnnnnnnnnnnnnnnnnnnnnnnnnnnnnnnnnnnnnnnnnnnnnnnnnnnnnnnnnnnnnnnnnnnnnnnnnnnnnnnnnnnnnnnnnnnnnnnnnnnnnnnnnnnnnnnnnnnnnnnnnnnnnnnnnnnnnnnnnnnnnnnnnnnnnnnnnnnnnnnnnnnnnnnnnnnnnnnnnnnnnnnnnnnnnnnnnnnnnnnnnnnnnnnnnnnnnnnnnnnnnnnnnnnnnnnnnnnnnnnnnnnnnnnnnnnnnnnnnnnnnnnnnnnnnnnnnnnnnnnnnnnnnnnnnnnnnnnnnnnnnnnnnnnnnnnnnnnnnnnnnnnnnnnnnnnnnnnnnnnnnnnnnnnnnnnnnnnnnnnnnnnnnnnnnnnnnnnnnnnnnnnnnnnnnnnnnnnnnnnnnnnnnnnnnnnnnnnnnnnnnnnnnnnnnnnnnnnnnnnnnnnnnnnnnnnnnnnnnnnnnnnnnnnnnnnnnnnnnnnnnnnnnnnnnnnnnnnnnnnnnnnnnnnnnnnnnnnnnnnnnnnnnnnnnnnnnnnnnnnnnnnnnnnnnnnnnnnnnnnnnnnnnnnnnnnnnnnnnnnnnnnnnnnnnnnnnnnnnnnnnnnnnnnnnnnnnnnnnnnnnnnnnnnnnnnnnnnnnnnnnnnnnnnnnnnnnnnnnnnnnnnnnnnnnnnnnnnnnnnnnnnnnnnnnnnnnnnnnnnnnnnnnnnnnnnnnnnnnnnnnnnnnnnnnnnnnnnnnnnnnnnnnnnnnnnnnnnnnnnnnnnnnnnnnnnnnnnnnnnnnnnnnnnnnnnnnnnnnnnnnnnnnaggtatcagaagttaggggatgaagatcactggtttgaaattaatgaacacactggcgacttgagaactttaaaagtactagatagagaatccaaatttgtaaaaaacaaccaatacaatatttcagttgttgcagtggatgcag

SEQ ID NO: 26148 - DNA, 242 bp, Macaca Mulatta
aggtacatatcaagacgatgccagccgccacataccgcctcctcacaggccaggagcagcccgtgtacctgtgaccaccatgtccctcgcctgccactgtgccttcgcctccatggccccggagccccatcctgggcctgccttggctggccaggaccccagcggttcttggtcctgtatgatttcctgatataaaaacagtaaaagcttatgcaagcggcaaagtcttggatcagggtcta

SEQ ID NO: 26149 - DNA, 289 bp, Macaca Mulatta
  misc_feature (1)...(289): n = A,T,C or G
ctataccaggaggacagcagcaactagcttttgatccccaactaggcacagctcctgaaattgctgtgatgnnnnnnnnnnnnnnnnnnnnnnnnnnnnnnnnnnnnnnnnnnnnnnnnnnnnnnnnnnnnnnnnnnnnnnnnnnnnnnnnnnnnnnnnnnnnnnnnnnnnnnnnnnnnnnnnnnnnnnnnnnnnnnnnnnnnnnnnnnnnnnnnnnnnnnnnnnnnnnnnnnnncaagactgatggtctaagggaaccatgagaagttgccctaatcattcagagatt

SEQ ID NO: 26150 - DNA, 878 bp, Macaca Mulatta
  misc_feature (1)...(878): n = A,T,C or G
cctaattttaaagattatcccgtatatttgctgaagtttaaacagtgtctttctaaagctttgcacctcatgaagacatatactgtgaacacactacagaccctcacaaatcagttactgaaaagggnnnnnnnnnnnnnnnnnnnnnnnnnnnnnnnnnnnnnnnnnnnnnnnnnnnnnnnnnnnnnnnnnnnnnnnnnnnnnnnnnnnnnnnnnnnnnnnnnnnnnnnnnnnnnnnnnnnnnnnnnnnnnnnnnnnnnnnnnnnnnnnnnnnnnnnnnnnnnnnnnnnnnnnnnnnnnnnnnnnnnnnnnnnnnnnnnnnnnnnnnnnnnnnnnnnnnnnnnnnnnnnnnnnnnnnnnnnnnnnnnnnnnnnnnnnnnnnnnnnnnnnnnnnnnnnnnnnnnnnnnnnnnnnnnnnnnnnnnnnnnnnnnnnnnnnnnnnnnnnnnnnnnnnnnnnnnnnnnnnnnnnnnnnnnnnnnnnnnnnnnnnnnnnnnnnnnnnnnnnnnnnnnnnnnnnnnnnnnnnnnnnnnnnnnnnnnnnnnnnnnnnnnnnnnnnnnnnnnnnnnnnnnnnnnnnnnnnnnnnnnnnnnnnnnnnnnnnnnnnnnnnnnnnnnnnnnnnnnnnnnnnnnnnnnnnnnnnnnnnnnnnnnnnnnnnnnnnnnnnnnnnnnnnnnnnnnnnnnnnnnnnnnnnnnnnnnnnnnnnnnnnnnnnnnnnnnnnnnnnnnnnnnnnnnnnnnnnnnnnnnnnnnnnnnnnnnnnnnnnnnnagcaaattgcacagagtttgaaagatgaacagaagaaggtaccttcagaagcttcattttcggatgttcacttagaggaaggagagtctaacagtctgacaaaatctgg

SEQ ID NO: 26151 - DNA, 923 bp, Macaca Mulatta
  misc_feature (1)...(923): n = A,T,C or G
gtgagattcctatctctaagatcttaattgactttcccactcctatattttatgatgtgtaccttgaatatgctgatgaaaatcaacatcaatatattttggctgtgcctgtgttaaacctaaatcttcaacacaataagatatttgtgaaccaagnnnnnnnnnnnnnnnnnnnnnnnnnnnnnnnnnnnnnnnnnnnnnnnnnnnnnnnnnnnnnnnnnnnnnnnnnnnnnnnnnnnnnnnnnnnnnnnnnnnnnnnnnnnnnnnnnnnnnnnnnnnnnnnnnnnnnnnnnnnnnnnnnnnnnnnnnnnnnnnnnnnnnnnnnnnnnnnnnnnnnnnnnnnnnnnnnnnnnnnnnnnnnnnnnnnnnnnnnnnnnnnnnnnnnnnnnnnnnnnnnnnnnnnnnnnnnnnnnnnnnnnnnnnnnnnnnnnnnnnnnnnnnnnnnnnnnnnnnnnnnnnnnnnnnnnnnnnnnnnnnnnnnnnnnnnnnnnnnnnnnnnnnnnnnnnnnnnnnnnnnnnnnnnnnnnnnnnnnnnnnnnnnnnnnnnnnnnnnnnnnnnnnnnnnnnnnnnnnnnnnnnnnnnnnnnnnnnnnnnnnnnnnnnnnnnnnnnnnnnnnnnnnnnnnnnnnnnnnnnnnnnnnnnnnnnnnnnnnnnnnnnnnnnnnnnnnnnnnnnnnnnnnnnnnnnnnnnnnnnnnnnnnnnnnnnnnnnnnnnnnnnnnnnnnnggcactacaatttttgcataagctcatatcgcagattacaatagatgtattctttattgattgggagcgacctaaaggaaaggttcttaaagctgttgaaggtnaggtgagggtggtgtacgaagtgccactgttcctgtaagcatatggagaacatattttgtagcaaatgaatggaatgaaattcagactgtgag

SEQ ID NO: 26152 - DNA, 836 bp, Macaca Mulatta
ggggctgtgactcgcggcttgtgcgcgcttgtggaccgcgcgggccttcgggagatcgatgcaggcctagggtagtctcctttctggactgagaagagaagaatggagaagagccccttcccattagtgcctttgcattggtttggctttggctacacagcagtggttgtttctggtgggatcgttggctatgtaaaaacaggaagggtggcgtccctggctgcagggctgctcttcggcagcctcgctggcctgggttcttaccagatgtctcaggatccaaggaacgtttgggttttcctagctgctacatctgttacttttgttggtgttttgggattgagatcctactactatggacaagtcatgccctgtaggtttaattgcaggggccagtttgctgatggcccccaaagttggaattccgtatgttgatgaacgctgaattagcacaagtcatggttccacctttggacctctcgagggatacaaatccgcatccttcccctaatttcaatggcttaagacagatagggggccgcatttttgccatttggactttctacctacgacaaagaaccgcgcccccctacccggcgggagcggcggcacaatcccgtgctcccccttataaaccctacaaaaggtctcttaagggcggttggtactccgcggccctgttgcataaccctttcaggcgcatccctttcctcggatcttaccgggcgtccctataccgccgtgccgcgtaaaaggaaaacgctacagcgcgactaaagtaggggaggggggttcccgcccgtaggcgcttgttccgaccaacccgcgcgcggcag

SEQ ID NO: 26153 - DNA, 1902 bp, Macaca Mulatta
  misc_feature (1)...(1902): n = A,T,C or G
gtgccgcctgatgaccccgtcatcctggggggccctgtgatcagcctgcgtgcgggggaccctctcagcctcacatgccacgcagacaatgccaagcctgcagcctccatcatctggttgcgaaagggagagnnnnnnnnnnnnnnnnnnnnnnnnnnnnnnnnnnnnnnnnnnnnnnnnnnnnnnnnnnnnnnnnnnnnnnnnnnnnnnnnnnnnnnnnnnnnnnnnnnnnnnnnnnnnnnnnnnnnnnnnnnnnnnnnnnnnnnnnnnnnnnnnnnnnnnnnnnnnnnnnnnnnnnnnnnnnnnnnnnnnnnnnnnnnnnnnnnnnnnnnnnnnnnnnnnnnnnnnnnnnnnnnnnnnnnnnnnnnnnnnnnnnnnnnnnnnnnnnnnnnnnnnnnnnnnnnnnnnnnnnnnnnnnnnnnnnnnnnnnnnnnnnnnnnnnnnnnnnnnnnnnnnnnnnnnnnnnnnnnnnnnnnnnnnnnnnnnnnnnnnnnnnnnnnnnnnnnnnnnnnnnnnnnnnnnnnnnnnnnnnnnnnnnnnnnnnnnnnnnnnnnnnnnnnnnnnnnnnnnnnnnnnnnnnnnnnnnnnnnnnnnnnnnnnnnnnnnnnnnnnnnnnnnnnnnnnnnnnnnnnnnnnnnnnnnnnnnnnnnnnnnnnnnnnnnnnnnnnnnnnnnnnnnnnnnnnnnnnnnnnnnnnnnnnnnnnnnnnnnnnnnnnnnnnnnnnnnnnnnnnnnnnnnnnnnnnnnnnnnnnnnnnnnnnnnnnnnnnnnnnnnnnnnnnnnnnnnnnnnnnnnnnnnnnnnnnnnnnnnnnnnnnnnnnnnnnnnnnnnnnnnnnnnnnnnnnnnnnnnnnnnnnnnnnnnnnnnnnnnnnnnnnnnnnnnnnnnnnnnnnnnnnnnnnnnnnnnnnnnnnnnnnnnnnnnnnnnnnnnnnnnnnnnnnnnnnnnnnnnnnnnnnnnnnnnnnnnnnnnnnnnnnnnnnnnnnnnnnnnnnnnnnnnnnnnnnnnnnnnnnnnnnnnnnnnnnnnnnnnnnnnnnnnnnnnnnnnnnnnnnnnnnnnnnnnnnnnnnnnnnnnnnnnnnnnnnnnnnnnnnnnnnnnnnnnnnnnnnnnnnnnnnnnnnnnnnnnnnnnnnnnnnnnnnnnnnnnnnnnnnagagtctgtgccgatggccgtcatcattggggtggccgtatgagctggtgtggccttcctcgtccttatggcaaccatcgtggccttctgctgtgcccgttcccagagaannnnnnnnnnnnnnnnnnnnnnnnnnnnnnnnnnnnnnnnnnnnnnnnnnnnnnnnnnnnnnnnnnnnnnnnnnnnnnnnnnnnnnnnnnnnnnnnnnnnnnnnnnnnnnnnnnnnnnnnnnnnnnnnnnnnnnnnnnnnnnnnnnnnnnnnnnnnnnnnnnnnnnnnnnnnnnnnnnnnnnnnnnnnnnnnnnnggaccccaccaatggctactacagcgtcaacaccttcaaagagcaccactcaaccccaaccatctccctctccagctgccagcccgacctgcgtcctgcgggcaagcagcgtgtgcccacaggcatgtccttcaccaacatctatagcaccctgagcggccagggccgcctctacgactacgggcagcggttcgtgctggggatgggcagctcgtccatcgagctttgtgagcgggagttccagagaggctccctcagcgacagcagctccttcctggacacgcagtgtgacagcagcgtcagcagcagcggcaagcaggacggctatgtgcagttcgacaaggccagcaaggcttctgcctcctcctcccaccactcccagtcctcgtcccagaactctgaccccagtcgacccctgcagcggcggatgcagactcacgtctaa

SEQ ID NO: 26154 - DNA, 1238 bp, Macaca Mulatta
  misc_feature (1)...(1238): n = A,T,C or G
attcaagagtccgtgaggtgaaaagatgttttcatcatccaaaccgtttcaaaggatgtgaacaccaccatcatggagctcctgagcagggtgtatgcatgtaagacctcttgtgccaagagcatcatcggcgtgataccttactttccttacagcaagcagtgcaagatgagaaaaagaggctctattgtctctaaattgctggcttccatgatgtgcaaagctggtctaactcatcttattactatggatttacaccagaaggaaattcagggcttcttcaatattcctgttgacaatttaagagcatctcccttcttattacagtatattcaagaagagatcccagattacaggaatgcagtaatcgtggccaagtctccagcatcggcgaagagggcacagtcttttgctgagcgcctgcgcctgggaattgcagtgattcatggagaggcgcaggatgccgagtcggacttggtggatggacggcattccccacccatggtcagaagtgtggctgccatcaggacccagcgctggagttccttattgctgattcctaaagaaaagcccccaatcacagttgtgggtgatgttggaggaaggattgccatcatcgtggatgacatcattgatgatgttgacagctttcttgctgcagcagagaccctgaaggaaagaggtgcatataagatctttgtgatggcaactcatggcttgttgtcttctgacgccccccggctgattgaagagtctgccattgatgaggtagtggtcactaatacaattccacatgaagtccagaagctccagtgccccaagattaaaaccgtggatatcagcatgatcctttcagaggcgatccgtcggatccacaatggggagtccatgtcctaccttttcagaaacataggcttagatgactgaacagctttcctttaggaaaactcccgagggccaaactgganacataagagtgactgcttgatgggatagatttcacaggaaccgtcatgtttgttcctccctctcccctgtaacctctcttcttgttgattcctatgaagatagaccaactttttatgtcggtttaggtgttcgtgagtttgggggagccannnnnnnnnnnnnnnnnnnnttttattctccctctttttgaaaaaggtaaggacctttgtttttaagtgtttaacctgtttttaaaaaaataacacctttgggaaataaagaattttgta

SEQ ID NO: 26155 - DNA, 786 bp, Macaca Mulatta
aaagctttcgctaactcttcacatcttacagtacatatgagaactcacactggtgagaagccttatcaatgtaaggaatgtggaaaagcctttattaattcctcttgctttaaaagtcacatgcagactcaccctggtgtaaaaccctataactgtcaacattgtgggaaagcctttattcgatcctcatttcttattcgacatttaagaagtcacagtgcggaaaggccttttgaatgtgaggaatgtgggaaagcctttagatactcctcgcaccttagtcaacataaaagaacacacacaggggagaagccatataaatgtcaaaagtgtgggcgagccttcgctatctcatcaggccttacagtacacatgagaactcacactggcgaacggccctttgaatgtcaggaatgtgggaaagcctttactcggtccacgtatcttattcgacatctaagaagtcacagtgtgaagaaaccatataaggaatgtgggcagacctttagtaattcctcatgccttactgaatgtgtgtgaattggggctgatatttggaaagaatgtggtaaagccactacttcctcatacttactgaacatgtactcatagtggcaatgtacacagtcataaggaatgtgggaagccttccttggtgtctcagatctcaacaattccaatagaagacatatgaatgtaaggaatgtgggaaagtcttggctccttccataggcagtacttactcatgtgtctctgcatcctaggaaacaaactgaatgtagaaaa

SEQ ID NO: 26156 - DNA, 816 bp, Macaca Mulatta
cctagtatagtggtcatactatcctaggtttactacaaagcattacaatttttatggctttatgttatatcccttacaacataaaaaattcatttatattttaattaacaaatagtttcatgtcttcttgtagctaccccaagatctctttaccaactttgccgactgtgtatccgaagttacataggaaaaccaagattgcaccttatcccacagctccagctgccaacattactgaagaatttcttgcagtatcgataaaacagtaaaataattctaaataccttgaaaaatcaaaatttctatttcttttgcttaaggaatagttcatattaaaatatgctaaagatagggtaaaagtgagtatgagatcacccagggaagcagtaaaatatcaattttctttttaagtgtactagttagtactattgttttatcattgatgctgtctttggattatagcatatttataatatctattttttgttatttcaacataccttcttgttgatttaggaaaaaaataataaagtctctatcatatgttttctttcagattggaaagaaataaaactcttagtaaagttattcatattatatttataaaggtctatattcttcaactaatgggttaacttttaattttggctattgtaattggctaacttgttattgatattgacataaaatatgagtatggcttagcaaagagcaactgatatgctttctgaaaccaagatgatgctcgttcaggaaatccactatgttgaatgtccactggtcattagaatgaccacttcataaagataaattgcc

SEQ ID NO: 26157 - DNA, 183 bp, Macaca Mulatta
actgcagtaaacgtactccttactcctgaaaaaggcaccaacagtaatcacagtatagcagaaaattgacatggtatcctgagattcttttcaaaaaggtctaaaagtctgtaaaaggctatatgatggcattaagtctaattttggccattcttaccaatttagcacaaataaatgatatgg

SEQ ID NO: 26158 - DNA, 1319 bp, Macaca Mulatta
  misc_feature (1)...(1319): n = A,T,C or G
ctgaacacgttgcctcttacggtgtaaacttgtaccagacttannnnnnnnnnnnnnnnnnnnnnnnnnnnnnnnnnnnnnnnnnnnnnnnnnnnnnnnnnnnnnnnnnnnnnnnnnnnnnnnnnnnnnnnnnnnnnnnnnnnnnnnnnnnnnnnnnnnnnnnnnnnnnnnnnnnnnnnnnnnnnnnnnnnnnnnnnnnnnnnnnnnnnnnnnnnnnnnnnnnnnnnnnnnnnnnnnnnnnnnnnnnnnnnnnnnnnnnnnnnnnnnnnnnnnnnnnnnnnnnnnnnnnnnnnnnnnnnnnnnnnnnnnnnnnnnnnnnnnnnnnnnnnnnnnnnnnnnnnnnnnnnnnnnnnnnnnnnnnnnnnnnnnnnnnnnnnnnnnnnnnnnnnnnnnnnnnnnnnnnnnnnnnnnnnnnnnnnnnnnnnnnnnnnnnnnnnnnnnnnnnnnnnnnnnnnnnnnnnnnnnnnnnnnnnnnnnnnnnnnnnnnnnnnnnnnnnnnnnnnnnnnnnnnnnnnnnnnnnnnnnnnnnnnnnnnnnnnnnnnnnnnnnnnnnnnnnnnnnnnnnnnnnnnnnnnnnnnnnnnnnnnnnnnnnnnnnnnnnnnnnnnnnnnnnnnnnnnnnnnnnnnnnnnnnnnnnnnnnnnnnnnnnnnnnnnnnnnnnnnnnnnnnnnnnnnnnnnnnnnnnnnnnnnnnnnnnnnnnnnnnnnnnnnnnnnnnnnnnnnnnnnnnnnnnnnnnnnnnnnnnnnnnnnnnnnnnnnnnnnnnnnnnnnnnnnnnnnnnnnnnnnnnnnnnnnnnnnnnnnnnnnnnnnnnnnnnnnnnnnnnnnnnnnnnnnnnnnnnnnnnnnnnnnnnnnnnnnnnnnnnnnnnnnnnnnnnnnnnnnnnnnnnnnnnnnnnnnnnnnnnnnnnnnnnnnnnnnnnnnnnnnnnnnnnnnnnnnnnnnnnnnnnnnnnnnnnnnnnnnnnnnnnnnnnnnnnnnnnnnnnnnnnnnnnnnnnnnnnnnnnnnnnnnnnnnnnnnnnnnnnnnnnnnnnnnnnnnnnnnnnnnnnnnnnnnnnnnnnnnnnnnnnnnnnnnnnnnnnnnnnnnnnnnnnnnnnncatttcccagatcatctgtcatgtccagtaacacagaagcaaccaagtacattatagcctgataatacgttgatttcttagctgacattaatatttctttcttccttgtgttcccacccttggcactgccacccacccctcaattaaggcaacaatgaagttaatagatatcctctgcctttggctcagaattgttacagcaaaaactttaaaatcaaaaa

SEQ ID NO: 26159 - DNA, 1017 bp, Macaca Mulatta
  misc_feature (1)...(1017): n = A,T,C or G
ggcagtgtggccctggggcctgtgtgcccaactgtatgccccacctggaggcatccaccaggttaccgtcaacgagagcctcctggcccccctcaacgtggagctggaccccgagatccagaaagtgcgtgcccaggagcgagagcagatcaaggctctgaacaacaagttcgcctccttcatcgacaaggtgnnnnnnnnnnnnnnnnnnnnnnnnnnnnnnnnnnnnnnnnnnnnnnnnnnnnnnnnnnnnnnnnnnnnnnnnnnnnnnnnnnnnnnnnnnnnnnnnnnnnnnnnnnnnnnnnnnnnnnnnnnnnnnnnnnnnnnnnnnnnnnnnnnnnnnnnnnnnnnnnnnnnnnnnnnnnnnnnnnnnnnnnnnnnnnnnnnnnnnnnnnnnnnnnnnnnnnnnnnnnnnnnnnnnnnnnnnnnnnnnnnnnnnnnnnnnnnnnnnnnnnnnnnnnnnnnnnnnnnnnnnnnnnnnnnnnnnnnnnnnnnnnnnnnnnnnnnnnnnnnnnnnnnnnnnnnnnnnnnnnnnnnnnnnnnnnnnnnnnnnnnnnnnnnnnnnnnnnnnnnnnnnnnnnnnnnnnnnnnnnnnnnnnnnnnnnnnnnnnnnnnnnnnnnnnnnnnnnnnnnnnnnnnnnnnnnnnnnnnnnnnnnnnnnnnnnnnnnnnnnnnnnnnnnnnnnnnnnnnnnnnnnnnnnnnnnnnnnnnnnnnnnnnnnnnnnnnnnnnnnnnnnnnnnnnnnnnnnnnnnnnnnnnnnnnnnnnnnnnnnnnnnnnnnnnnnnnnnnnnnnnnnnnnnnnnnnnnnnnnnnnnnnnnnnnnnnnnnnnnnnnnnnnnnnnnnnnnnnnaggcttccaacctggagacggccattgctgatgctgagcagcggggagacaatgccctgaaggacgcccgggccaagctggacgagctggagggcgccctgcaccaggccaaggaggagctggcaaggatgctgcgcgagtaccaggagctcatgagcctgaagct

SEQ ID NO: 26160 - DNA, 756 bp, Macaca Mulatta
ggaggcgcggaactggggttgcggcggctaagtgtgtttccggtagattcccaggggcggtcggaggtgtggactgttcctgccttcatgctctgggaagatgttctaccatatctccctagagcacgaaatcctgctgcacccgcgctacttcggccccaacttgctcaacacggtgaagcagaagctcttcaccgaagtggaggggacctgcacaggtatggctttgcaattgctgtcaccaccattgacaatattggtgctggtgtgatccagccaggccgaggctttgtcctttatccagttaagtacaaggccattgtgttccggccctttaaaggggaggtcgtggatgctgttgtaactcaggtcaacaaggttggactcttcacaaaaattggacccatgtcttgcttcatctctcgacattccatcccttcagagaaggagtttgatcccaactccaacccccctgttacaagacaatggatgaaggaattgtgattcagcaggaagaagaaatccccttaaaaattgtggggaaccctggtggacaaaaaggacttttttgcaattggctcccctgaagggacaattacttgggggcttggtaagcctgaacccaaatggctttccaaccccttgggtccttgatgataggaaagtggtaattggccaaccccataccgggggatgttcccaaaaggttcccaatctggcctgccttgtttgtggaagggaaaaggaaaagcacaa

SEQ ID NO: 26161 - DNA, 850 bp, Macaca Mulatta
cagactctgtataataagggagcttccccaggaggagggaaaattccctcggcctcataacgcaaaattgttttccgggctggttttcttccctataaggcctcccctttcatttcttttttgggccacaaaaagtttttaggcattatttttgccaggccttctttcctgggttttttccctaagctaacggtgctttttttaagagccaaataacgcccgccgttttgtggttgcaggaacacggtggagtaaccaagaccgctgaatttttgggtggctttggtccctagggtttccttaccttctttgtttaaaggggctttccttacaacatactggcggacgtcatcttctttagagagattgaaaagtttgcggattctgctagctcttttggggcccagggcggcgaggaactgtagtatcagtcagtccaggaatatccttctctcctttttttacaataaccaagttgagaacgctcagattggcatccacaatgcaaccacgaactgattttctctttctttctcccgttctccttggtctgtaacaggaatgccccttactcagtagcaggcggacacggccatgggtcaagacaccctgcttcatggggaaaccttgtttgtcgttcccaccactgattcggaccacataacccttccattcttcacccagagcgtcagcagcaacttctgtggccatacgcttctcataaaaagtacgaagtttgcgttcatcgtccacttcaatgagtttctggcagccagtggctgggaaggagatgttcagcttcatcttgaagcagctgaacgcctccgaggcgccacggaaaagagccccc

SEQ ID NO: 26162 - DNA, 1108 bp, Macaca Mulatta
  misc_feature (1)...(1108): n = A,T,C or G
gtccctgggaatattgtctccttaggccatggagggctgaaccagctgggaggggcctttgtgaacggcagacccctgccagaagtggtccgccagcgcattgtagacctggcccaccagggtgtgaggccctgtgacatctctcgccagctccgcgtcagccatggctgcgtcagcaagatcctcggcaggtnnnnnnnnnnnnnnnnnnnnnnnnnnnnnnnnnnnnnnnnnnnnnnnnnnnnnnnnnnnnnnnnnnnnnnnnnnnnnnnnnnnnnnnnnnnnnnnnnnnnnnnnnnnnnnnnnnnnnnnnnnnnnnnnnnnnnnnnnnnnnnnnnnnnnnnnnnnnnnnnnnnnnnnnnnnnnnnnnnnnnnnnnnnnnnnnnnnnnnnnnnnnnnnnnnnnnnnnnnnnnnnnnnnnnnnnnnnnnnnnnnnnnnnnnnnnnnnnnnnnnnnnnnnnnnnnnnnnnnnnnnnnnnnnnnnnnnnnnnnnnnnnnnnnnnnnnnnnnnnnnnnnnnnnnnnnnnnnnnnnnnnnnnnnnnnnnnnnnnnnnnnnnnnnnnnnnnnnnnnnnnnnnnnnnnnnnnnnnnnnnnnnnnnnnnnnnnnnnnnnnnnnnnnnnnnnnnnnnnnnnnnnnnnnnnnnnnnnnnnnnnnnnnnnnnnnnnnnnnnnnnnnnnnnnnnnnnnnnnnnnnnnnnnnnnnnnnnnnnnnnnnnnnnnnnnnnnnnnnnnnnnnnnnnnnnnnnnnnnnnnnnnnnnnnnnnnnnnnnnnnnnnnnnnnnnnnnnnnnnnnnnnnnnnnnnnnnnnnnnnnnnnnnnnnnnnnnnnnnnnnnnnnnnnnnnnnnnnnnnnnnnnnnnnnnnnnnnnnnnnnnnnnnnnnnnnnnnnnnnnnnnnnnnnnnnnnnnnnnnnnnnnnnnnnnnnnnnnnnnnnnnnnnnnnnnnnnnnnnnnnnnnnnnnnnnnnnnnnnnnnnnnnnnnnnnnnnnnnnnnnnnnnnnnnnnnnnnnnnnnnnnnaggaagtgaatactctggctatgcctatggccacaccccctactcctcctacagcgaggcctggcgcttccccaactccagcttgctgagt

SEQ ID NO: 26163 - DNA, 450 bp, Macaca Mulatta
gagcagagtgggccatggcagaagtatggggttggttggacctgtcacatgaaatggatcagcacttgaatggggagaagtggagggagaggccatgggcctttccctgcggggaaatcttttatggaagaagggctggacccactttacctgcagtttcttcccagctcgggcagatggcagaagggaccccttggactttatctcgccatccctcccccaagtgcaggggcacaagctgagcttgtaaaagcccacagatgtcgggggctggagaaggggcaggagagcatcacactcagtcccagctgcctcagcctcttggggccccatgatggggaggagagggcaggtgcggggaggctccagccttccttggtgccccgccctttgtttgcactattggacttaggagtgccgagggtggggagatggagctgcccgactcag

SEQ ID NO: 26164 - DNA, 682 bp, Macaca Mulatta
aaaggcccatactgtaaaggtcagtctactaggaattctgccacatttacacacgcccctggccaaagtaatttttttttccatgtagaacaaattatgggcagaaaataaagttggttttagaagtgctgtttgtggctggagaactgtaaaaatcttttaaagggataagggaattagtggctattaatataaccactacttcagcccctgaaacacaaaatcactgttacacggaaaactggttatcaggccagatttatattcatctctgtctagagcacttcatgtctatatgtgttgcttatgttgtctccaaagtctctcatctcttttaaaaaatcactgcaaataaagcaatactgaagacttgagagaatgcaccttaggggaaggggctgtttcaagacagaaggcaggaaatacctgccttttgagtaagatcctgcttttgagtcttacctatgactttaccagggcagattagaaatacacatcctcctgctgaccttctgccttgaatagctatcttaaaagctgaagtttgaactgacagcatctgcttgacaggtgccagtttcctctcggcagggggaagatcactctatgtatcttccattgcctcagattcctgtggccccaagaatcccaccaatcctcattcccccaaacatgctaacaa

SEQ ID NO: 26165 - DNA, 173 bp, Macaca Mulatta
agtcattagatggaaaagccatcaaagtggaacaagccaccaaaccatcatttgaaagtggtagacgtggaccgcctccacctccaagaagtagaggccctccaagaggtcttagaggtggaagaggaggaagtggaggaaccaggggacctccctcacggggaggacacatg

SEQ ID NO: 26166 - DNA, 762 bp, Macaca Mulatta
gggggtgggggaaggcaggactgacacagaatgacaacggcaacacgacaagaagtccttggcctctaccgcagcattttcaggcttgcgaggaaatggcaggcgacatcaggacagatggaagacaccatcaaagaaaaacagtacatactaaatgaagccagaacgctgttccggaaaaacaaaaatctcacagacacagacctaattaaacagtgtatagatgaatgcacagccaggattgaaattggactgcattacaagattccttatccaaggccaattcatctgcctccaatgggccttcccccactccaaggccggggacttcgaagccaagagaaactgaggaaactttccaaaccagtatatctcagatctcatgatgaagtttcctaatctagaggaaagtttatttctgcaaatgatgagccaacttgttcttgaatgtaaaccagatggcaaaacacttcttgattggggcaaaaattcaaatgtcttcttaaaacctccacaattgattctcacccatgatgagcacttcaatatccctagagtttgtcagcgtctttcttcctgagtggatggcattatccatagaggtcatggaccttacatcctcactgcagtcacctttggaaacaagactaaggcctgtacaaagggagtggaagggtgcaaagagctgttgatgggaattccattcaccacgcgtgccagctgatgcaaagaaatttgccagtcactggaaatttactgtgg

SEQ ID NO: 26167 - DNA, 157 bp, Macaca Mulatta
gggtgaacacataagggaaatggtgaagcaaatcaatgatatccgcaatcatgtaaacttctgacaccaccaggagctgactcacacctgaagtgaacaccactgaaggcttaaacccatattgtaaaacaggtagcattatctaatttataaaaag

SEQ ID NO: 26168 - DNA, 932 bp, Macaca Mulatta
tccaagtcaaagaaacctcatggcacagctgtgtccactgttccccccaacaacccacacacatcaggcccccagggtctcacatttacaagccgtgagagacatcagagccctggacactgtcactgcttccagcctgagagtagctccctccttttctatctgagctcttcttcctccacagcacaaaagtgaccacagcttcagtgacaacagctccatctccctccttactccatctgagcatgaggggcccaggcagcccctggtgctgcacatagcacgtgaatctctgctcctctccagaaggcaccaccacagctgcccacttctggaaggttccatcccctgcaggcctggttcccacgagctccacgtcgtgggtctggtcctcactctcccgctgccaggtcagtctgatctccgcagggtagaagcccagggctcagcacctcagggtggcgtgccctccaggtaggctctccttcgttcagtggctttggccgcctcacacttgtgcttggagatctgagccacagtgtccgctgcggttcaggagcacaggtcctcgttcagggcgaggtaatccttgccatcttaggcgaactgttcacaccggcctggctctggttgtagcagctgcgcagggtccgcaggttcactctgtcagtgtgtgcgtgggccttgatgttccgtgtctcctcttcccaatactccggcccctcctgctccacccacggcgcccgcggctccatcctcggacttgcagcgtcgctatcgagccgcacgaactgcgtgttgtccacgtagcccacggggatgaagcggggctccccgcggccgggccgggacacggcagcgctgaagtacctcatggagtgggagcccgcccaggtctctgtcagggccagagcccccgagagcagcaggag

SEQ ID NO: 26169 - DNA, 790 bp, Macaca Mulatta
ggcttcaaagacagaatcttttaccacacctcccttttctctgtcagacttctctcccttcttgcaggcttctctgttgctccatttgcctcatacatacttgacctctcttttcaattccccatcacttttgtgctgaagctaattacatttatgtctgtctttctctgcttttccctaattccctctcctcccgactcctacagacattcccaatgatacccaccctcatacatttaggtttttcttgcctttccctgaagccctatatttattaatgcatatattttccccatttgttttacaagtaagttactcttttcctttaatctgtaagattcatgaaatttggggccggggaaacaatttagccttaggaacgggaaaacaccaagtgaaactgtttacaataacctcatacaacctcctgtcccatttcctggttcagcctaggtgtttcactggtcctctacgaatcccagcacttataatcccagtcttttatcactcaggtgctaggaaaaaacatagactcaagacccaagattcagtggaccaggagaaaggtggggggtggtcaggtcactggtgaccccaaacctatggtctccatctttcctggaggctgccaacccagccctcatcctcccttgctcacaaagttacagggtaggcacctgtcaggatagaacagcagcagtgctacagcccagaggttactacacttcaacagaacagggatccttggctgctatagaagcagtcctgtttggagaccttggaccagcag

SEQ ID NO: 26170 - DNA, 120 bp, Macaca Mulatta
  misc_feature (1)...(120): n = A,T,C or G
ggaagccttggcactagcggagcccaggcgcggagtgcgaagggcaaggtcntgcgctctgggacagcgctcgaccatgcgagccgccgcgcggaggggacgcgccgcgcccgccgccag

SEQ ID NO: 26171 - DNA, 854 bp, Macaca Mulatta
gggtatatgtttgttaatgttactttaaaattatctttttattttataaggcccataaatactggttaaacttgttaaaagttgggcttctatcttggatggtttcactgccatcagccatgctgatattttagaaatggcatctctacctacttattttaatgcttaaaattatacataaaatgctttatttggaaaacctacatgatatagtggtgtcagccttgccatatatcaatttcacttgaaatttgacaccaattaaagtggtttaaggtggagaaagaggtactggaaagcatgcagatgaggatatcttttatgtccaacagtatcctttgcatgggaggagagttactcttgaaaggcaggcagcttaagtggacaatattttgtatatcattgagaattttctttacgacacttttaaaaattgtgtaattgttaaatgtccagttttgctctgttttgcctgaagttttaatatttgttttctaggtgaacctctgaaaaccaaaccagtacctgggggaggttagatgtgtgtttcaaggcttggagtgtatgaatggtctttgcttgtgttttgggttgggcctttccctccaaagaattttgaaacttttaataattggcctgggggtattttttttttaaacgggctttttttctccagcaaaaattgggcgaacgtaactttccctcaacagggggccgggaccattggaatttaatgcaagaatggagaaaactctctctcagaaactggaaaatgaggccccctcccctaaaaagggtgcctcccgggcacacaccctctactttcttctttgcgcgcaagctcgggagaaaca

SEQ ID NO: 26172 - DNA, 535 bp, Macaca Mulatta
ccatcccttcattaccacagtagcgaccatggctctaccggtgtttctgacaaatgccgttgtaggcatgtgctcttcatgacattatcctaaaacaaagttccccaaatacatacgcttgagggtcatttgatcgcatcggaatgcataacctaagttgctcacctcaggcccagaccatgttttcgaagagcaacttagtaatgtatacagtagtcagtacattttatgaaatattttattttgctaaattaacctcttccagatctcctcgggtgatcttaaattctagtcttgagaaactttatgagcagatctgttttcaatttatttatacacctttcatggtaggtaaccatggcagtgaggatggcagagtttagtttttttaatgggccaatcatgttctgagtattatgaggtttatatcctttcattcatgatcaaaattgttaacgatatcacattttaaaaatacactgttcaattcactttgctgtaggttatagtttacctgttataaaattcctagtgc

SEQ ID NO: 26173 - DNA, 765 bp, Macaca Mulatta
ggaatgatctgccataatgtcttggggacgtttgtcttgtatgtaaatagtactagagaaaaaacctgtattatgaattgatctagttggttttattcgacatgaaggcagtttcaagataacaacactaacaaactctcccttgactagggggacaaagaaaagcaaaattgaccataagaaacaattacccggtgagaagttgcataaacagaattaggtagtatactgaagacagcatcattaaacagttatgttgttctccttgcaagaagcatgtactgactccctttgagtaatgccaagttttttttttattataagacttggccttaattacatgtttcaaagtggtggggtaggccaaagtattgaaatgatggaactgactgatgaagctgtgacaataagcagtgtgcctgacaagcaacacagtgatgttggacatgcttaattcggaaatgctaatttcattataaattattttgctagagtacactttgaaattatttttctgtattccaggagctgagatctgaaatgttatgtgagattaagcgaaggaaggccaaaataagagacattgggggaaaagagtaaggagacggcgctgaccgaggcacaggccgggggcggaacaggatgggagcggagaggaagggacacagggcgaaggacgaacaaagaaaggagaagaaacaggaaaaacagggtgagggaaccgcctacgaaaaccagggcgagggggggcagaaccgacgacgg

SEQ ID NO: 26174 - DNA, 648 bp, Macaca Mulatta
cttctccttttggcaccatggtatcaatccctttctcttttagtgtcttattcttctttcaagttattgctaccgagggatgacatcactgagattaggagacagggcgagagcttgctgcagattctgacagtgcagattttaaatgtcaggatattaggatagctggcgctggtttatgaaagctgcacgttgttccacgttctctcggtgtgcctggccctttaagtggcacactgtatgtcagtttgtgtccttcatgtgctgatgtgattacacaaacaccatccactctcttttcatatcagagtacaggacagagaagtgatcaatgtattggtctagtgagactgagatgaaaagaaataacctacaaagtggtctgtaatgccttttggttggactgggaacaagtaaaaatttctaataaacatcttgagacttccagaatcacttttgttatcttaccagaccttgggcctgctgagggttgaggagcagacagactgcattctaacataccctgttcccaccccacgggcattcagactgcactaaatacgctgaagttgctttcgtagtagttatttgcatcgtttggatatctttttttctgctttcaataccaaaaaaatgcagatgctttaa

SEQ ID NO: 26175 - DNA, 285 bp, Macaca Mulatta
aactaactctattttcaaatacattccagtgtatttcccgtgttgttcatagtcaatcaaacggggacactataaacatggggagccacaagggacatgtctttggcttcagaattgtttttagaaatttattcttatcttaggacttacaaaatagggcaaagaatcaacagtgaacagcttcacttaaaatcaaatctttctgggaagaaaatgagatgggttgagtttgctgtatacaaacaggtgctaacactgttccaagcaaagttttcagattgtaaa

SEQ ID NO: 26176 - DNA, 1485 bp, Macaca Mulatta
  misc_feature (1)...(1485): n = A,T,C or G
natggtggcggagcggtcccgggcccgcagcctcgggagctggctgttccccgggctgtggctgttggcgctcagcggtcccggggggctgctgcgcgcccaggagcagccctcctgcagaagagcctttgatctctacttcgtcctggacaagnnnnnnnnnnnnnnnnnnnnnnnnnnnnnnnnnnnnnnnnnnnnnnnnnnnnnnnnnnnnnnnnnnnnnnnnnnnnnnnnnnnnnnnnnnnnnnnnnnnnnnnnnnnnnnnnnnnnnnnnnnnnnnnnnnnnnnnnnnnagaggcaaaatcagtaaaggcttggaggatttaaaacgtgttnnnnnnnnnnnnnnnnnnnnnnnnnnnnnnnnnnnnnnnnnnnnnnnnnnnnnnnnnnnnnnnnnnnnnnnnnnnnnnnnnnnnnnnnnnnnnnnnnnnnnnnnnnnnnnnnnnnnnnnnnnnnnnnnnnnnnnnnnnnnnnnnnnnnnnnnnnnnnnnnnnnnnnnnnnnnnnnnnnnnnnnnnnnnnnnnnnnnnnnnnnnnnnnnnnnnnnnnnagcttgagagaattgctgattccaaggagcaagttttccctgtcaaaggtggatttcaggctcttaaaggaataattaattcnnnnnnnnnnnnnnnnnnnnnnnnnnnnnnnnnnnnnnnnnnnnnnnnnnnnnnnnnnnnaggaatttcagattgtcttaagtggaagaggattcatgctgggcagtcggaatggcagtgttctctgcacctacactgtaaatgaaacatatacaannnnnnnnnnnnnnnnnnnnnnnnnnnnnnnnnnnnnnnnnnnnnnnnnnnnnnnnnnnnnnnnnnnnnnnnnnnnnnnnnnnnnnnnnnnnnnnnnnnnnnnnnnnnnnnnnnnnnnnnnnnnnnnnnnnnnnnnnnnnnnnnnnnnnnnnnnnnnnnnnnnnnnnnnnnnnnnnnnnnnnnnnnnnnnnnnnnnnnnnnnnnnnnnnnnnnnnnnnnnnnnnnnnnnnnnnnnnnnnnnnnnnnnnnnnnnnnnnnnnnnnnnnnnnnnnnnnnnnnnnnnnnnnnnnnnnnnnnnnnnnnnnnnnnnnnnnnnnnnnnnnnnnnnnnnnnnnnnnnnnnnnnnnnnnnnnnnnnnnnnnnnnnnnnnnnnnnnnnnnnnnnnaggttcgttggggtgataaaggatctactgaggaaggtgcaaggctagagaaagccaaaaatgctgtggtgaagattcctgaagaaacagaggaacccatcaggcctagaccaccgcgacccaaacccacacaccagcctccacagacaaaatggtacacgccaattaagnnnnnnnnnnnnnnnnnnnnnnnnnnnnnnnnnnnnnnnnnnnnnnnnnnnnnnnnnnnnnnnnnnnnnnnnnnnnnngggccggtgcataaacttctcccgagttccatctcattaaaacggaagcaggaagaccaaga

SEQ ID NO: 26177 - DNA, 1996 bp, Macaca Mulatta
  misc_feature (1)...(1996): n = A,T,C or G
agagttagactggctgagcaacccaagcttttgtgttggatccataacgtccctgagccaacagactgaagcagccccagcccatgtttctgaagggtcaccgctgacaaggnnnnnnnnnnnnnnnnnnnnnnnnnnnnnnnnnnnnnnnnnnnnnnnnnnnnnnnnnnnnnnnnnnnnnnnnnnnnnnnnnnnnnnnnnnnnnnnnnnnnnnnnnnnnnnnnnnnnnnnnnnnnnnnnnnnnnnnnnnnnnnnnnnnnnnnnnnnnnnnnnnnnnnnnnnnnnnnnnnnnnnnnnnnnnnnnnnnnnnnnnnnnnnnnnnnnnnnnnnnnnnnnnnnnnnnnnnnnnnnnnnnnnnnnnnnnnnnnnnnnnnnnnnnnnnnnnnnnnnnnnnnnnnnnnnnnnnnnnnnnnnnnnnnnnnnnnnnnnnnnnnnnnnnnnnnnnnnnnnnnnnnnnnnnnnnnnnnnnnnnnnnnnnnnnnnnnnnnnnnnnagatacaagaggaaaggagactcctgccttggcattaaccctaagaagcagtgcatatcttgggaagggacttccacagagaagaagcattcacgcaagcaggttgaacgctattttactaagaagagtgtgggattaatgaacattgacggagctgccatcagcagtaaaactgaacctccctcatctgagcccatctcctttataccagtgaaggacttggaagatgcggctcctgttacaacctggttgaatcctctggggatttatgatcagtcaaccacacagtgggctacaaggacagggtcctccagagcaggaatcaaagcagccagacacacagccagacagcgagagtgcggctctcaaggccaaggtggaggagtttaacaggcgggtgcgggagaatcctcgggatacgcagctgtggatggccttcgttgcttttcaggnnnnnnnnnnnnnnnnnnnnnnnnnnnnnnnnnnnnnnnnnnnnnnnnnnnnnnnnnnnnnnnnnnnnnnnnnnnnnnnnnnnnnnnnnnnnnnnnnnnnnnnnnnnnnnnnnnnnnnnnnnnnnnnnnnnnnnnnnnnnnnnnnnnnnnnnnnnnnnnnnnnnnnnnnnnnnnnnnnnnnnnnnnnnnnnnnnnnnnnnaggacgaagtcatgaaaagtcctggcctgtatgccatcgaggaaggagagcaggaaaagcgaaagaggtccctgaagctcattctggagaagaagctggccattctggagcgggccattgagagcaaccagagcagtgtggatctgaaactggccaagctgaagctctgcacagagttttgggagccctccactctggtcaaagagtggcagaaactgatatttttgcatcccaataatacagccctttggcagaaataccttttattttgccagagccagtttagtaccttttcgatatcaaaaattcacagtctttatggaaaatgcttgagcactttgtctgctgttaaggacggcagcatcttatctcaccctgcgttgcctggcacagaagaggccatgtttgngcactcttccttcagcagtgccactttctgcggcaggccggccactctgagaaggccgtctcattgttccaggccatggtggacttcaccttcttcaaacctgacagcgtgaaagatctgcctaccaaaggacaggtnacaggtggaattctttgagcccttttgggacagtggagagccccgggctggggagaaaggagcccgaggctggaaggcatggatgcaccagcaggaacgaggtggctgggtggtcatcaacccagnagatgaggatgacgatgaaccagaagaggatgaccaggaaataaaagataagactctgccccggtggcagatctggcttgctgctgagcgttcccgagaccagaggcactggcggccctggcgccctgataagaccaagaagcaaactgaggaagactgtgaggatcccgagagacag

SEQ ID NO: 26178 - DNA, 123 bp, Macaca Mulatta
ccaccacaaccaatgggtccaggacctatggggggaccctacccacctcctcagggtacccctaccaaggatacccacagtacggctggcagggtggacctcaggagcctcctaaaaccacag

SEQ ID NO: 26179 - DNA, 660 bp, Macaca Mulatta
  misc_feature (1)...(660): n = A,T,C or G
ctgcttttttttaactccttatatcacctgtccagggaggcattaaaaatttggcaatgtatgccagcaaaatgtgagctctgtattttttggcattgttatgtttgggttgaataagattaagaaaatgatattgggaattttctttttcctgaacctttgaatcaccctagtaagtcaaagtattaaaaaaagtactagatcattaagactcatgtgctcttgctgactgaaagattttttgtttttcttgtaataaaggacttaaactgaaggtannnnnnnnnnnnnnnnnnnnnnnnnnnnnnnnnnnnnnnnnnnnnnnnnnnnnnnnnnnnnnnnnnnnnnnnnnnnnnnnnnnnnnnnnnnnnnnnnnnnnnnnnnnnnnnnnnnnnnnnnnnnnnnnnnnnnnnnnnnnnnnnnnnnnnnnnnnnnnnnnnnnnnnnnnnnnnnnnnnnnnnnnnnnnnnnnnnnnnnnnnnnnnnnnnnnnnnnnnnnnnnnnnnnnnnnnnnnnnnnnnnnnnnnnnnnnnnnnnnnnnnnnnnnnnnnnnnnnnnnnnnnnnnnnnnnnnnnnnnnnnnnnnnnnnnnnnnnnnnnnnnnnnnnnnnnnnnnnnnnnnnnnnnnnnnnnnnnnnnnnnnnnnnnnnnnnnnnnnnnnn

SEQ ID NO: 26180 - DNA, 852 bp, Macaca Mulatta
  misc_feature (1)...(852): n = A,T,C or G
atgaaggtcgagtttgcaccgctcaacgtccccctggcgcggaggcnnnnnnnnnnnnnnnnnnnnnnnnnnnnnnnnnnnnnnnnnnnnnnnnnnnnnnnnnnnnnnnnnnnnnnnnnnnnnnnnnnnnnnnnnnnnnnnnnnnnnnnnnnnnnnnnnnnnnnnnnnnnnnnnnnnnnnnnnnnnnnnnnnnnnnnnnnnnnnnnnnnnnnnnnnnnnnnnnnnnnnnnnnnnnnnnnnnnnnnnnnnnnnnnnnnnnnnnnnnnnnnnnnnnntcaaaactcaagatttggatccaagtcacaactatatatttgggtttcacccccatggaatattggcggctggagcctttgggaatttttctacaaattattccgacttcaaggagctgtttcctggctttacttcatatcttcacgtgctgccactttggttctggtgccctgtcttccgagaatatatgatgagnnnngggctagtttcagtttccaagaaaagtgtgtcctatgtggtaagcaaggaaggaggtggaaacatctctgtcattgtccttgggggtgcaaaagaatcactggatgcccatcctggaaagtccactctgttcatccgccagcggaaaggatttgttaaaattgctttgacccatggngcctctctggtcccagtgttttcttttggtgaaaatgaactgtttaaacaagttgacaaccccgaagggctcatggattagaactgttcaagataaactacagaagatcatggggtttgctttgcccctgtttcatgccaggggagtttttcagtataattttggcctaatgccctataggaaagccatccacactgttg

SEQ ID NO: 26181 - DNA, 983 bp, Macaca Mulatta
  misc_feature (1)...(983): n = A,T,C or G
agatgtgccactttaagaagccccagtattgcagacaaccatctccggagcgatgtcctccattaagaagccnaagaagcctaccactgagaaggcgacccttttccaagagccatctgtatttcaagagaagcgcaccactgagcatgagatgtccatcttaaaggaatcattgaccttgcagaagaccaactttaaagaggattcccttgttaaggagccattagtctttaagaagaagcctagcactgaggaggcaatcatgatgccattaatattaaaggagcagtgcatgactgaggggaagaggtcctgcctgaagccattaatattgcaggcgatcacctctggagagaagtcgctcattacaaagccattgtccattaaagaaaagccatctactgagaaggagtcctttgccgaggaaccatctgcattgcaagagaagcacatcactcaggaggaggtttccatcttaaaggagccctcatccttgttaaagtctctaaccgaagagtcactttttgatgagactttggcttttacaaagaagtgtaccattgaggaggcaccctctaccaagaagcctttaattttaaagaggaagcacaccactcaggggacaatgtcccacttgaagaaaccactagtattacagaccacctctggagagaagtcacttattaaggagccactgtcctttaaagaagaaaaagtgtctttaaagaaaaagtgtaccatacaagcgatgatgtccatctgtccagaactgttggactttcaggatatgattggtgaagataagaattctttctttatggagccagtgtcatttaggaagaaccctacagctgaggagacagtacttaccaagacatcattgtctgtacggaaaaagaaaatactcaggggatgtcctactaaagaagcactggtcctgcagagatcatttcgaggaggagtactctatagaagctgttgcc

SEQ ID NO: 26182 - DNA, 3855 bp, Macaca Mulatta
  misc_feature (1)...(3855): n = A,T,C or G
aaaatacaggtctcagcatttggataatttctcaaaccaaattggaaaactttataagaaagttatgtacacacagtacgaagatgagtccttcaccaaacgtacagtgaatcccaatatgaaagaagatgggattttgggtcctattatcagagcccaggtcagagacacactcaannnnnnnnnnnnnnnnnnnnnnnnnnnnnnnnnnnnnnnnnnnnnnnnnnnnnnnnnnnnnnnnnnnnnnnnnnnnnnnnnnnnnnnnnnnnnnnnnnnnnnnnnnnnnnnnnnnnnnnnnnnnnnnnnnnnnnnnnnnnnnnnnnnnnnnnnnnnnnnnnnnnnnnnnnnnnnnnnnnnnnnnnnnnnnnnnnnnnnnnnnnnnnnnnnnnnnnnnnnnnnnnnnnnnnnnnnnnnnnnnnnnnnnnnnnnnnnnnnnnnnnnnnnnnnnnnnnnnnnnnnnnnnnnnnnnnnnnnnnnnnnnnnnnnnnnnnnnnnnnnnnnnnnnnnnnnnnnnnnnnnnnnnnnnnnnnnnnnnnnnnnnnnnnnnnnnnnnnnnnnnnnnnnnnnnnnnnnnnnnnnnnnnnnnnnnnnnnnnnnnnnnnnnnnnnnnnnnnnnnnnnnnnnnnnnnnnnnnnnnnnnnnnnnnnnnnnnnnnnnnnnnnnnnnnnnnnnnnnnnnnnnnnnnnnnnnnnnnnnnnnnnnnnnnnnnnnnnnnnnnnnnnnnnnnnnnnnnnnnnnnnnnnnnnnnnnnnnnnnnnnnnnnnnnnnnnnnnnnnnnnnnnnnnnnnnnnnnnnnnnnnnnnnnnnnnnnnnnnnnnnnnnnnnnnnnnnnnnnnnnnnnnnnnnnnnnnnnnnnnnnnnnnnnnnnnnnnnnnnnnnnnnnnnnnnnnnnnnnnnnnnnnnnnnnnnnnnnnnnnnnnnnnnnnnnnnnnnnnnnnnnnnnnnnnnnnnnnnnnnnnnnnnnnnnnnnnnnnnnnnnnnnnnnnnnnnnnnnnnnnnnnnnnnnnnnnnnnnnnnnnnnnnnnnnnnnnnnnnnnnnnnnnnnnnnnnnnnnnnnnnnnnnnnnnnnnnnnnnnnnnnnnnnnnnnnnnnnnnnnnnnnnnnnnnnnnnnnnnnnnnnnnnnnnnnnnnnnnnnnnnnnnnnnnnnnnnnnnnnnnnnnnnnnnnnnnnnnnnnnnnnnnnnnnnnnnnnnnnnnnnnnnnnnnnnnnnnnnnnnnnnnnnnnnnnnnnnnnnnnnnnnnnnnnnnnnnnnnnnnnnnnnnnnnnnnnnnnnnnnnnnnnnnnnnnnnnnnnnnnnnnnnnnnnnnnnnnnnnnnnnnnnnnnnnnnnnnnngttctcaattcttccacagcagagcattccagcccttattctgaagactctatagaggatcctttccagagagatgtcacagggatacatctactttcacttggtgctagagaattcaaaaatcaagaacatgctaaacgtaagggacccaaggtagaaagagaccaagcagcaaagcacaggttctcccggatgaaattactagcacataaagttgggagacacctaagccgagacactggttctcgctccagagtgaggccctgggaggaccttcctagnagccgagacactggttctcgctccagagtgaggccctgggaggaccttcctagtgatttgttactcttaaaacaaaataactcatctaagattttggttgggagatggcatttggcttctgagaaaggtagctatgaaataatccaagatactgaggaggacacagctgttaacaatcgactgatcagcccccagaatgcctcacgtgcttggggagaaagcacccctcttgccaacaagcctggaaagcagagtggcnnnnnnnnnnnnnnnnnnnnnnnnnnnnnnnnnnnnnnnnnnnnnnnnnnnnnnnnnnnnnnnnnnnnnnnnnnnnnnnnnnnnnnnnnnnnnnnnnnnnnnnnnnnnnnnnnnnnnnnnnnnnnnnnnnnnnnnnnnnnnnnnnnnnnnnnnnnnnnnnnnnnnnnnnnnnnnnnnnnnnnnnnnnnnnnnnnnnnnnnnnnnnnnnnnnnnnnnnnnnnnnnnnnnnnnnnnnnnnnnnnnnnnnnnnnnnnnnnnnnnnnnnnnnnnnnnnnnnnnnnnnnnnnnnnnnnnnnnnnnnnnnnnnnnnnnnnnnnnnnnnnnnnnnnnnnnnnnnnnnnnnnnnnnnnnnnnnnnnnnnnnnnnnnnnnnnnnnnnnnnnnnnnnnnnnnnnnnnnnnnnnnnnnnnnnnnnnnnnnnnnnnnnnnnnnnnnnnnnnnnnnnnnnnnnnnnnnnnnnnnnnnnnnnnnnnnnnnnnnnnnnnnnnnnnnnnnnnnnnnnnnnnnnnnnnnnnnnnnnnnnnnnnnnnnnnnnnnnnnnnnnnnnnnnnnnnnnnnnnnnnnnnnnnnnnnnnnnnnnnnnnnnnnnnnnnnnnnnnnnnnnnnnnnnnnnnnnnnnnnnnnnnnnnnnnnnnnnnnnnnnnnnnnnnnnnnnnnnnnnnnnnnnnnnnnnnnnnnnnnnnnnnnnnnnnnnnnnnnnnnnnnnnnnnnnnnnnnnnnnnnnnnnnnnnnnnnnnnnnnnnnnnnnnnnnnnnnnnnnnnnnnnnnnnnnnnnnnnnnnnnnnnnnnnnnnnnnnnnnnnnnnnnnnnnnnnnnnnnnnnnnnnnnnnnnnnnnnnnnnnnnnnnnnnnnnnnnnnnnnnnnnnnnnnnnnnnnnnnnnnnnnnnnnnnnnnnnnnnnnnnnnnnnnnnnnnnnnnnnnnnnnnnnnnnnnnnnnnnnnnnnnnnnnnnnnnnnnnnnnnnnnnnnnnnnnnnnnnnnnnnnnnnnnnnnnnnnnnnnnnnnnnnnnnnnnnnnnnnnnnnnnnnnnnnnnnnnnnnnnnnnnnnnnnnnnnnnnnnnnnnnnnnnnnnnnnnnnnnnnnnnnnnnnnnnnnnnnnnnnnnnnnnnnnnnnnnnnnnnnnnnnnnnnnnnnnnnnnnnnnnnnnnnnnnnnnnnnnnnnnnnnnnnnnnnnnnnnnnnnnnnnnnnnnnnnnnnnnnnnnnnnnnnnnnnnnnnnnnnnnnnnnnnnnnnnnnnnnnnnnnnnnnnnnnnnnnnnnnnnnnnnnnnnnnnnnnnnnnnnnnnnnnnnnnnnnnnnnnnnnnnnnnnnnnnnnnnnnnnnnnnnnnnnnnnnnnnnnnnnnnnnnnnnnnnnnnnnnnnnnnnnnnnnnnnnnnnnnnnnnnnnnnnnnnnnnnnnnnnnnnnnnnnnnnnnnnnnnnnnnnnnnnnnnnnnnnnnnnnnnnnnnnnnnnnnnnnnnnnnnnnnnnnnnnnnnnnnnnnnnnnnnnnnnnnnnnnnnnnnnnnnnnnnnnnnnnnnnnnnnnnnnnnnnnnnnnnnnnnnnnnnnnnnnnnnnnnnnnnnnnnnnnnnnnnnnnnnnnnnnnnnnnnnnnnnnnnnnnnnnnnnnnnnnnnnnnnnnnnnnnnnnnnnnnnnnnnnnnnnnnnnnnnnnnnnnnnnnnnnnnnnnnnnnnnnnnnnnnnnnnnnnnnnnnnnnnnnnnnnnnnnnnnnnnnnnnnnnnnnnnnnnnnnnnnnnnnnnnnnnnnnnnnnnnnnnnnnnnnnnnnnnnnnnnnnnnnnnnnnnnnnnnnnnnnnnnnnnnnnnnnnnnnnnnnnnnnnnnnnnnnnnnnnnnnnnnnnncagaagacaccgtatataagaaagtagtttttcgaaagtacctcgacagcacttttaccaaacgtgatcctcgaggggagtatgaagagcatctcggaattcttggtcctattatcagagctgaagtggatgatgttatccaag

SEQ ID NO: 26183 - DNA, 919 bp, Macaca Mulatta
  misc_feature (1)...(919): n = A,T,C or G
ttcaccagagcagcctcactgtgtcctgatttacctactgtggctttccacataaggttttgtttagagggcttccactactcaagaaaaagttagcaaaccactccttttgttgcaaaggagctgatgtccagggtggtaaaggcacttgccccaggtcacccagcagtgctgctctgaagacttattgtgcacatccccaagggttagagcttcgatctctgcacagccgggccaacctctgaccccttgtccatgtcagtaaaagatgaaggtcacagccaggatttctaagggtcaggaggccttcaccactgctggggnnnnnnnnnnnnnnnnnnnnnnnnnnnnnnnnnnnnnntgtgtctccccagggattttccctgcagtgaggcttgtccacaagattgagctcagaagaggaagaacaaacaaaccacagagctggggagggctgtggctcggggccagctcccagggaaattcccagacctggaccaatgttctctctggaaccagccgagctgcttcgtggaggtaatttcaaaaaagtaaaagctatcatcagcatcatcttaggcttgtatgaaataaccactccgtttctattcttaaaccttacnnnnnnnnnnnnnnnnnnnnnttttgagacggagttttgctcttattgcccaggctggagtatagtggtgcaatcttggctcactgctacctccacctcccgggttcaagcaattctcctgcctcagactcctgaggagctgggattacaggcacccgccaccacgcccagctaattttttgaatttttagttgagacagggtttcaccatgttggccaggctggtcttgaactcctgacctcaggtgagccgcctcgcctcagcctcccaaagtgctggaattacaggtgtgagcc

SEQ ID NO: 26184 - DNA, 796 bp, Macaca Mulatta
  misc_feature (1)...(796): n = A,T,C or G
gggtctggatggccaatgagcctgtctccttttctgtggcccatctgaaggccttcattggaagcgttgtttacagtaatccttaccaagataacatactgtcctccagaataccaagtattaggtgacactagcttaagctgttgtcttcagagcagttaccaagcagctcagtgcacaggttttctctggttcttacaggaaccacctactcttttggtaatctggtccaggagtggggtaaatccttttagtcagtgcattggaacttgatacttgtgcatttggttctgtgaatactgtcctttttggcggggtttcttcctctccccagcctgaactgctcaactcttaacccaaattagtgtcagccaaaaggaggtttcaagacagtcctgtcagtacttgtggtgaccttcagattagacagtcttcatttccagccagtggagtcctggctccagagccatctctgagactcgtaccactggatattttaatatcagatcattacccaccaaacttccaatcgtatgcctcccacctgccaagggaaacagacaccagaacttggggttgagggcactacccaaactgaccatggcccagttacataggagaaactacgggaaaggaaaggattgtttttccaccctttatnnnnnnnnnnnnnnnnnnnnnnggtggccttacccttaaataagtttcaaagaaaccctttttatattgggtggaaccaaggaagnnnnnnnnnnnnnnnnnnnnnattatagggcgcgtggcgccattataccta

SEQ ID NO: 26185 - DNA, 1935 bp, Macaca Mulatta
  misc_feature (1)...(1935): n = A,T,C or G
agtgctgagcagatcactgcactgtgcaggagttttaacgacactcaggccaacggcatggaaggaccgcgggagagtcaggatcctcctccgaggcctctggcccgccacctctctgatgcagaccgcctccgcaaagtcatccaggagcttgtggacacagagaagtcctacgtgaagnnnnnnnnnnnnnnnnnnnnnnnnnnnnnnnnnnnnnnnnnnnnnnnnnnnnnnnnnnnnnnnnnnnnnnnnnnnnnnnnnnnnnnnnnnnnnnnnnnnnnnnnnnnnnnnnnnnnnnnnnnnnnnnnnnnnnnnnnnnnnnnnnnnnnnnnnnnnnnnnnnnnnnnnnnnnnnnnnnnnnnnnnnnnnnnnnnnnnnnnnnnnnnnnnnnnnnnnnnnnnnnnnnnnnnnnnnnnnnnnnnnnnnnnnnnnnnnnnnnnnnnnnnnnnnnnnnnnnnnnnnnnnnnnnnnnnnnnnnnnnnnnnnnnnnnnnnnnnnnnnnnnnnnnnnnnnnnnnnnnnnnnnnnnnnnnnnnnnnnnnnnnnnnnnnnnnnnnnnnnnnnnnnnnnnnnnnnnnnnnnnnnnnnnnnnnnnnnnnnnnnnnnnnnnnnnnnnnnnnnnnnnnnnnnnnnnnnnnnnnnnnnnnnnnnnnnnnnnnnnnnnnnnnnnnnnnnnnnnnnnnnnnnnnnnnnnnnnnnnnnnnnnnnnnnnnnnnnnnnnnnnnnnnnnnnnnnnnnnnnnnnnnnnnnnnnnnnnnnnnnnnnnnnnnnnnnnnnnnnnaggtaacagaactttcgatgggagagcttctgatgcactctacggtttcctggctgaatccatttctgtctctaggaaaagctagaaaggaccttgagctcacagtatttgnnnnnnnnnnnnnnnnnnnnnnnnnnnnnnnnnnnnnnnnnnnnnnnnnnnnnnnnnngccctcgaattcccggcctgcacacaactctggagacttggacccatttaaattccgctggnnnnnnnnnnnnnnnnnnnnnnnnnnnnnnnnnnnnnnnnnnnnnnnnnnnnnnnnnnnnnnnnnnnnnnnnnnnnnnnnnnnnnnnnnnnnnnnnnnnnnnnnnnnnnnnnnnnnnnnnnnnnnnnnnnnnnnnnnnnnnnnnnnnnnnnnnnnnnnnnnnnnnnnnnnnnnnnnnnnnnnnnnnnnnnnnnnnnnnnnnnnnnnnnnnnnnnnnnnnnnnnnnnnnnnnnnnnnnnnnnnnnnnnnnnnnnnnnnnnnnnnnnnnnnnnnnnnnnnnnnnnnnnnnnnnnnnnnnnnnnnnnnnnnnnnnnnnnnnnnnnnnnnnnnnnnnnnnnnnnnnnnnnnnnnnnnnnnnnnnnnnnnnnnnnnnnnnnnnnnnnnnnnnnnnnnnnnnnnnnnnnnnnnnnnnnnnnnnnnnnnnnnnnnnnnnnnnnnnnnnnnnnnnnnnnnnnnnnnnnnnnnnnnnnnnnnnnnnnnnnnnnnnnnnnnnnnnnnnnnnnnnnnnnnnnnnnnnnnnnnnnnnnnnnnnnnnnnnnnnnnnnnnnnnnnnnnnnnnnnnnnnnnnnnnnnnnnnnnnnnnnnnnnnnnnnnnnnnnnnnnnnnnnnnnnnnnnnnnnnnnnnnnnnnnnnnnnnnnnnnnnnnnnnnnnnnnnnnnnnnnnnnnnnnnnnnnnnnnnnnnnnnnnnnnnnnnnnnnnnnnnnnnnnnnnnnnnnnnnnnnnnnnnnnnnnagccatctgcaccaagagggacagaggaactttgctcaaggcacagctccgtcaccagtcccttgacagtcaatctgaaaatgccaccatcgatctaaattctgttctagagcgagaattcagtgtccagagtttaacatctgttgtcaatgaggagtgtttttatgaaacagagagccatggaaaatcatag

SEQ ID NO: 26186 - DNA, 122 bp, Macaca Mulatta
gggtatatctgggaggccggagaatgtgtctggttattacacaggtgcacagctggaggtgggatccacacagctcagaacagctggatcttgctccgtctctctcagaggaagattccttg

SEQ ID NO: 26187 - DNA, 1521 bp, Macaca Mulatta
  misc_feature (1)...(1521): n = A,T,C or G
ctcagcctgaactctttgcttccggaatccgggattgttgctgacatagaattagaaaacgtccttgatcctgacagcttctacgagctcaaaagccaacccttaccccttcgctcaannnnnnnnnnnnnnnnnnnnnnnnnnnnnnnnnnnnnnnnnnnnnnnnnnnnnnnnnnnnnnnnnnnnnnnnnnnnnnnnnnnnnnnnnnnnnnnnnnnnnnnnnnnnnnnnnnnnnnnnnnnnnnnnnnnnnnnnnnnnnnnnnnnnnnnnnnnnnnnnnnnnnnnnnnnnnnnnnnnnnnnnnnnnnnnnnnnnnnnnnnnnnnnnnnnnnnnnnnnnnnnnnnnnnnnnnnnnnnnnnnnnnnnnnnnnnnnnnnnnnnnnnnnnnnnnnnnnnnnnnnnnnnnnnnnnnnnnnnnnnnnnnnnnnnnnnnnnnnnnnnnnnnnnnnnnnnnnnnnnnnnnnnnnnnnnnnnnnnnnnnnnnnnnnnnnnnnnnnnnnnnnnnnnnnnnnnnnnnnnnnnnnnnnnnnnnnnnnnnnnnnnnnnnnnnnnnnnnnnnnnnnnnnnnnnnnnnnnnnnnnnnnnnnnnnnnnnnnnnnnnnnnnnnnnnnnnnnnnnnnnnnnnnnnnnnnnnnnnnnnnnnnnnnnnnnnnnnnnnnnnnnnnnnnnnnnnnnnnnnnnnnnnnnnnnnnnnnnnnnnnnnnnnnnnnnnnnnnnnnnnnnnnnnnnnnnnnnnnnnnnnnnnnnnnnnnnnnnnnnnnnnnnnnnnnnnnctgcctgtgtcagggaatctgcttgatgtgtacagtagtcaaggcgtagccacgccagcaatcactgtcagcaactcctgcccagctgagctgcccaacatcaaacgggagatctctgngagaccgaggcaaaggcccttttgaaggaacggcagaagaaagacaatcacaacctaannnnnnnnnnnnnnnnnnnnnnnnnnnnnnnnnnnnnnnnnnnnnnnnnnnnnnnnnnnnnnnnnnnnnnnnnnnnnnnnnnnnnnnnnnnnnnnnnnnnnnnnnnnnnnnnnnnnnnnnnnnnnnnnnnnnnnnnnnnnnnnnnnnnnnnnnnnnnnnnnnnnnnnnnnnnnnnnnnnnnnnnnnnnnnnnnnnnnnnnnnnnnnnnnnnnnnnnnnnnncaggagctagaactgcaggcccagatccatggcctgccggtacctcccaccccagggctgctctccctggccacgacttcggcttctgacagcctcaagccagagcagctggacattgaggaggagggcaggccaggcgcagcaacgttccatgtaggggggggacctgcccagaatgctccccatcagcagccccctgcaccgccctcagatgcccttctggacctgcactttccccagtgaccacctgggggacctgggagaccccttccacctagggctggaggacattctgatggaggaggaggagggggtggtgggaggactgtcggggggtgccctgtccccact

SEQ ID NO: 26188 - DNA, 3214 bp, Macaca Mulatta
  misc_feature (1)...(3214): n = A,T,C or G
cgaggatggggagcaatgcaaannnnnnnnnnnnnnnnnnnnnnnnnnnnnnnnnnnnnnnnnnnnnnnnnnnnnnnnnnnnnnnnnnnnnnnnnnnnnnnnnnnnnnnnnnnnnnnnnnnnnnnnnnnnnnnnnnnnnnnnnnnnnnnnnnnnnnnnnnnnnnnnnnnnnnnnnnnnnnnnnnnnnnnnnnnnnnnnnnnnnnnnnnnnnnnnnnnnnnnnnnnnnnnnnnnnnnnnnnnnnnnnnnnnnnnnnnnnnnnnnnnnnnnnnnnnnnnnnnnnnnnnnnnnnnnnnnnnnnnnnnnnnnnnnnnnnnnnnnnnnnnnnnnnnnnnnnnnnnnnnnnnnnnnnnnnnnnnnnnnnnnnnnnnnnnnnnnnnnnnnnnnnnnnnnnnnnnnnnnnnnnnnnnnnnnnnnnnnnnnnnnnnnnnnnnnnnnnnnnnnnnnnnnnnnnnnnnnnnnnnnnnnnnnnnnnnnnnnnnnnnnnnnnnnnnnnnnnnnnnnnnnnnnnnnnnnnnnnnnnnnnnnnnnnnnnnnnnnnnnnnnnnnnnnnnnnnnnnnnnnnnnnnnnnnnnnnnnnnnnnnnnnnnnnnnnnnnnnnnnnnnnnnnnnnnnnnnnnnnnnnnnnnnnnnnnnnnnnnnnnnnnnnnnnnnnnnnnnnnnnnnnnnnnnnnnnnnnnnnnnnnnnnnnnnnnnnnnnnnnnnnnnnnnnnnnnnnnnnnnnnnnnttccctcaagaaacgcgggatggtctgggcttgcctgttggctccaaaaaccttggccaaatggatacctcgaggcagggagggtggggaagtcatgcagggcctggaaaccatgtccagctacgtggaaacctggccaactcaaacatgatgtggggggcaccggcccaggctgagcccactgatggctaccaatatacctactcccaggccagcgagatccggacccagaagcttaccagcggtgtcttacacaagctggactctttcacccaggtgtttgccaaccaaaacctgcgaattcaggtcaacaatatggcccaggtgctgcacactcagtcagcagtgatggatggagcccctgacagtgccctccgccagctgctgtctcagaagcccatggagcccccagcaccggctatcccttcccgctaccagcaggtgtcccagcagcctcaccctggtttcactggtgggctgtccaaaccagcccttcaggtcgggcagcaccctacccaagggcacctgtattatgactaccagcagccactggctcaggtgccagtgcagggaggacagccactgcaggccccacagatgctgtcacagcacatgcaacagatgcagcagcaccagtattacccaccgcagcaacagcagcaagccgggcaacagcgtatctccatgcaagaaatacagacgcagccgcaacaaattcgcccatcacaaccacagccgccgccacnnnnnnnnnnnnnnnnnnnnnnnnnnnnnnnnnnnnnnnnnnnnnnnnnnnnnnnnnnnnnnnnnnnnnnnnnnnnnnnnnnnnnnnnnnnnnnnnnnnnnnnnnnnnnnnnnnnnnnnnnnnnnnnnnnnnnnnnnnnnnnnnnnnnnnnnnnnnnnnnnnnnnnnnnnnnnnnnnnnnnnnnnnnnnnnnnnnnnnnnnnnnnnnnnnnnnnnnnnnnnnnnnnnnnnnnnnnnnnnnnnnnnnnnnnnnnnnnnnnnnnnnnnnnnnnnnnnnnnnnnnnnnnnnnnnnnnnnnnnnnnnnnnnnnnnnnnnnnnnnnnnnnnnnnnnnnnnnnnnnnnnnnnnnnnnnnnnnnnnnnnnnnnnnnnnnnnnnnnnnnnnnnnnnnnnnnnnnnnnnnnnnnnnnnnnnnnnnnnnnnnnnnnnnnnnnnnnnnnnnnnnnnnnnnnnnnnnnnnnnnnnnnnnnnnnnnnnnnnnnnnnnnnnnnnnnnnnnnnnnnnnnnnnnnnnnnnnnnnnnnnnnnnnnnnnnnnnnnnnnnnnnnnnnnnnnnnnnnnnnnnnnnnnnnagtggccaacccaaaggagtgtttggggagcagtttgatgccaagaacaagctgacatgctccatctgcctgaaggagttcaagaacctgcctgccctaaacggccacatgcggtcccacgggggaatgagggcctcccccnnnnnnnnnnnnnnnnnnnnnnnnnnnnnnnnnnnnnnnnnnnnnnnnnnnnnnnnnnnnnnnnnnnnnnnnnnnnnnnnnnnnnacagctccctcccgaggcagaaagcctcacgcctatggtcatgcccgtgtctgtccctgtcaagcttctcccgcccaagcccagctctcaggggttcaccaacagcaccgttgccgccccctccgccagagacaagccagccagctcgatgtcggacgacgagatgcctgtgctcnnnnnnnnnnnnnnnnnnnnnnnnnnnnnnnnnnnnnnnnnnnnnnnnnnnnnnnnnnnnnnnnnnnnnnnnnnnnnnnnnnnnnnnnnnnnnnnnnnnnnnnnnnnnnnnnnnnnnnnnnnnnnnnnnnnnnnnnnnnnnnnnnnnnnnnnnnnnnnnnnnnnnnnnnnnnnnnnnnnnnnnnnnnnnnnnnnnnnnnnnnnnnnnnnnnnnnnnnnnnnnnnnnnnnnnnnnnnnnnnnnnnnnnnnnnnnnnnnnnnnnnnnnnnnnnnnnnnnnnnnnnnnnnnnnnnnnnnnnnnnnnnnnnnnnnnnnnnnnnnnnnnnnnnnnnnnnnnnnnnnnnnnnnnnnnnnnnnnnnnnnnnnnnnnnnnnnnnnnnnnnnnnnnnnnnnnnnnnnnnnnnnnnnnnnnnnnnnnnnnnnnnnnnnnnnnnnnnnnnnnnnnnnnnnnnnnnnnnnnnnnnnnnnnnnnnnnnnnnnnnnnnnnnnnnnnnnnnnnnnnnnnnnnnnnnnnnnnnnnnnnnnnnnnnnnnnnnnnnnnnnnnnnnnnnnnnnnnnnnnnnnnnnnnnnnnnnnnnnnnnnnnnnnnnnnnnnnnnnnnnnnnnnnnnnnnnnnnnnnnnnnnnnnnnnnnnnnnnnnnnnnnnnnnnnnnnnnnnnnnnnnnnnnnnnnnnnnnnnnnnnnnnnnnnnnnnnggttgctctggaaatgctgctgctgcggaagccggtcaggttaaaatgtcatcctttagcaaattaccactatgccgg

SEQ ID NO: 26189 - DNA, 736 bp, Macaca Mulatta
tcctcaggtgacctgaggatggggctaccccgaaacacaacagcttgcctgggagaagatcccagaggtcttgtgtggtatgtccagggttaaagggaggagttggcgggagtaggggtgtttccaggttcctgacatgctgccataggaagatgcagtattcttcagcaaaatgccaccaagttgagagagtctgtgggttcctagcagtgtcttttggagtaccagtttacaagaggaaagttgaaagcagtttcatattacctcctttcttttcctactctttcaggggggcacgtggtatggggtggacatcaacaacgaggacattgctgacaactttgaggccttcgtgtgggagccagctatggtgcggatcaatgcgttgacagcagcctctgaggctgcgtgcctgatcgtgtctgtagatgaaaccatcaagaacccccgctcaactgtggatgctcccccagcagcaggccggggccgtggtcgtggccgcccgcactgagaggcaccccacctgtcacatgactggctggctgctgggtgcacctactctccttggcttggttacttcattttacaaggaaggggtagtaattggcccactctcttctcattggaggctatttaaataaaatgtaagacttcgggataactttggtaaattattttggcacagtactcataaatgtctggctgtagctccgaattttagctttacatgcacttt

SEQ ID NO: 26190 - DNA, 3192 bp, Macaca Mulatta
  misc_feature (1)...(3192): n = A,T,C or G
ctgctcagaggactctgtacaggaacgtgatgttggagaactataggaacctggtctccctgggnnnnnnnnnnnnnnnnnnnnnnnnnnnnnnnnnnnnnnnnnnnnnnnnnnnnnnnnnnnnnnnnnnnnnnnnnnnnnnnnnnnnnnnnnnnnnnnnnnnnnnnnnnnnnnnnnnnnnnnnnnnnnngagaggagctctaaattgggaagtaatgcaggaaacaagccttgtaaaagtcaacttggattcacttctcagttacatctgaatgatctgcagctatttcaagctgaaaggaaaatttctgggtctaagcatattgaaaaactcatcaatgacaactcctcagtttcactgcttgaaaaaatttcttccagtgtcaaatcccaccttttaaataaacatagaaataattttgatgatgctccattacttccacaaaaacagaaagcacacattagggaaaaagcttataaatgtaatgagcttggccaagtctttannnnnnnnnnnnnnnnnnnnnnnnnnnnnnnnnnnnnnnnnnnnnnnnnnnnnnnnnnnnnnnnnnnnnnnnnnnnnnnnnnnnnnnnnnnnnnnnnnnnnnnnnnnnnnnnnnnnnnnnnnnnnnnnnnnnnnnnnnnnnnnnnnnnnnnnnnnnnnnnnnnnnnnnnnnnnnnnnnnnnnnnnnnnnnnnnnnnnnnnnnnnnnnnnnnnnnnnnnnnnnnnnnnnnnnnnnnnnnnnnnnnnnnnnnnnnnnnnnnnnnnnnnnnnnnnnnnnnnnnnnnnnnnnnnnnnnnnnnnnnnnnnnnnnnnnnnnnnnnnnnnnnnnnnnnnnnnnnnnnnnnnnnnnnnnnnnnnnnnnnnnnnnnnnnnnnnnnnnnnnnnnnnnnnnnnnnnnnnnnnnnnnnnnnngtctttagtcgccattcatatctagcagaacatcaaacagttcatactggtgagaaaccttacaaatgtaaagaatgtggcaaagcattttcagtgcgttccagcctcataacccatcagctaattcacactggaaggaaaccttacaaatgtaaagaatgtgacaaggtgtttgggcgcaagtgtttactgacctctcatcagagaattcatactagagagagaccttacggatgcaatcagtgtggcaagatctttagtcagaaatcagaccttatacgacatcgaaaaattcatactgatgagaaaccttacaaatgtaataaatgtggcacagcgtttagagagttttcagaccttactgcccattttctaatccatagtggagagaaaccttacgaatgtaaagaatgtggcaaagtcttcaggtacaagtcttctctaaccagtcatcatagaattcatactggagagaagccttacaaatgtaacaaatgtggcaaggtcttcagtcggagttcaaacctcgtatgccatcagaaaattcatacaggagagaagccttacaaatgtaatgaatgtggcaaggtctttaatcaagcgtcataccttacaagacatcaaataattcatactggagagaggccttacagatgtaataaatgtggcaaagcatttcgagggtgttcaggccttactgcccatcttgcaatccatactgagaagaaatctcatgagtgtaaagaatgtggcaagatcttcactcacaagtgttccctcaccaatcaccatannnnnnnnnnnnnnnnnnnnnnnnnnnnnnnnnnnnnnnnnnnnnnnnnnnnnnnnnnnnnnnnnnnnnnnnnnnnnnnnnnnnnnnnnnnnnnnnnnnnnnnnnnnnnnnnnnnnnnnnnnnnnnnnnnnnnnnnnnnnnnnnnnnnnnnnnnnnnnnnnnnnnnnnnnnnnnnnnnnnnnnnnnnnnnnnnnnnnnnnnnnnnnnnnnnnnnnnnnnnnnnnnnnnnnnnnnnnnnnnnnnnnnnnnnnnnnnnnnnnnnnnnnnnnnnnnnnnnnnnnnnnnnnnnnnnnnnnnnnnnnnnnnnnnnnnnnnnnnnnnnnnnnnnnnntacacaagaaggaactcaatctctagtcctctgatattaatctatgatattgcattctgcagaataatgctaagtcaacatatgttgattctcatgacatgatgtatatcaaaggtgcaacggtatgtaaatgaccagttttattcaggctacaaaaaattcaattatttggggtccatagaaaaggctactttatgactttaaaatctcttcacgtgccttccatacaggccattcactgtggttcctgggaaagaatcagtaggatgacaggactgaattcattagctgaggattatttctatccagtttcctgatgaagaaggacattgccttttcagattaaatattgtctgatttagagagcatggagaagtgggcagagtaacataaaactctgatgaccatcatcatactgttgcagtcaacacactttctcccgacctaagtgcacagtgcttcagttgccaccaactgaccatgaaatagagtatgccgtgatcttaaggcataggttattaatgggaagagagtaataggttgctagtgtctgattatatagtagaaataatgcaaggaaaaaggtagacgctttctccattgaatagcagtagctgctgtttagcaaagactgatgagaannnnnnnnnnnnnnnnnnnagatagtgtctcactctgttgccaaggctggagtgtagtggtgtgttcttgggtcactgcaccctccgcctcctgggttcaagcaatccttctgccttagcctcctaaggagctgagactacaggtttgtgccaccacacccagttcatttttgtattttttgtagagacagggtttaccatgttggccaagcaggtctccaactcctgacctcaagtgatacgttcacctcagcctcccaaagtgctgggattacaggcatgagccattgcgcccagcttcatttttgaaatggaagaaagaacagatatcacagttgagcgtttaatcaaaatgaccagatcagcatattcttttttttatatgacacagagtctcacccttgtcacccaggctggagtgtggtggcacaatctcggctcactacaacctctgcctccctgtttcaagcaattcttctgtctcagcctcccaagtagctgggattacagg

SEQ ID NO: 26191 - DNA, 704 bp, Macaca Mulatta
  misc_feature (1)...(704): n = A,T,C or G
tgtttctgaacatcgttgaactagacattttgaaaatgattaaaatgtttccttaatgttctcacaaaacaagtttcttttgtagttttaaccaaaaaagtgccctttttgtcactggattctcctagcattcatgattttttttttcatacaatgaattaaaattgctaaaatcatggactggctttctggttggatttcaggtgagatgtgtttaaggccagagcttttctcatattttttttccccaatatttgatttttaatcaatatacacataggtgctgcatttatatctgctggtttaaattctgtcatatttcacttctagccttttagtatggcaaatcgtattttacttttacttaagcatttgtaatttggagtatctggtactagctaagaaataattctataattgagttttgtactcaccatatatggatcattcctcatgtataatgtgccccaaatgcagcttcattttccaggtatcttgacgcagaataaagtttttcatcatttacnnnnnnnnnnnnnnnnnnnnnnnnnnnnnnnnnnnnnnnnnnnnnnnnnnnnnnnnnnnnnnnnnnnnnnnnnnnnnnnnnnngnnnnnnnnnnnnnnntgggaaaccctggcgttacccaacttatcgccttggaggaatacccttttggcgactgggggtatacagagaggccgaa

SEQ ID NO: 26192 - DNA, 894 bp, Macaca Mulatta
tgtcaacctggcccagtccattgttatgatgaccattggcgagttgattgggtttgtaactccgcttctgattgtcctgtattgtacctggaagacggttttatcactgcaagataaatatcccatggcccaagatcttggagagaaacagaaagccttgaagatgattctaacctgtgcgggggtattcctaatttgctttgcaccttatcatttcagttttcctttagatttcctggtgaagtccaatgaaattaaaagctgcctagccagaagggtgattctaatatttcattctgtggcattgtgtcttgctagtctgaattcgtgtcttgacccagtcatatactacttttccactaatgagttccgaagacggctttcaagacaagatttgcatgacagcatccaactccatgcaaaatcctttgtgagtaaccatacagcttccactgtgacaactgaattatgctaaaagaaaaaccaagctgaatatgacctgaaatgcaagtacctcagaacatatctgcaatacccaagccacggggaagaactcacaaaaaaacacagcttttcagttctgctctattttactgctgtggggaattcacttcttcaaagcaggacctatgtggagcattatgatccaccattattgatgttgacatatccatgtagtaatttttcatcaagtctgtaaatcttaaaatatcaaatttctgtgacatcctacaaacatatgctctcaactctagtcagtacttttacctgtgaccctcaggcacaaaaagagtattagcttggagccaccataagcattcagttttgttacagcagatactgagtctttatattcagaggagatgtaggtgtctttttatattagtaatcaca

SEQ ID NO: 26193 - DNA, 1349 bp, Macaca Mulatta
ggcagctaataggctaataaaattaaatcagcatatgcgccattgcctagtgctgaattctgaatgccacatggttttagagtcaatgccaactaaatactaggcattctcaacccaaagtccagggttcccagagagaggcagggtttggtccaccccatacatctcagacattccagggacatcaatagccaattacagtgtctgaacaacatgacatgtccagggttatcacatcgagttgctagaattcagatctaaagcaaagcaaagtctagaatgtgtggtagattataacaatggcccccgatgaactatgcctttcagtacccaagaacttgtatagacttttcccacactgagtctgagcttggtcatgtgatccattttagccaatgagacatgagcaaacacgatgcaggcaaaggctggataaatacttgtgcattggagctttccagcttggacccggcagaatggctcccgcaaagaagggtggcgagaagaaaaagggccgttctgccatcaacgaggtggtgacccgagaatacaccatcaacattcacaagcgcatccatggagtgggcttcaagaagcgtgcccctcgggcactcaaagagattcggaaatttgccatgaaggagatgggaactccagatgtgcgcattgataccaggctcaacaaagctgtctgggccaaaggaataaggaatgtcccataccgaatccgtgtgcggctgtccagaaaacgtaatgaggatgaagattcaccaaataagctctatactttggttacctatgtacctgttaccactttcaaaaatctacagacagttaatgtggatgagaactaatcgctgatcatcaaatacatcaaataaagttataaaattggcaacgcaaccccaaccccccgcccccaactacgcaaaaccacgcatgactaacccaaacttccctctaaccccactaaaacccgggataaaattttttgtgggggcgcctctgcgctccctcaaaaaaacctttttacaactactttctttgggcgcgggggccccccccttgggtcaagaaaaaatggggcaaaaacccgtgttttctaagaaaaatactcgcgggcgccccaactagcgggtttgtgcgacctccccccgaacaaaaaaacactccccgccgcggcgccaaacctaccgcttttttctaacaccaatcctctgacatgggggagttcggtgagaggggctctttccgggggatttcccttaccccaacgaggcggcgtcaccgggcacggcgcctcctaaacgcctcatattatcctgcgcttcccccggcgcgcgtcattt

SEQ ID NO: 26194 - DNA, 452 bp, Macaca Mulatta
aggcacctctaaggtactgatggctctgcagaggacccattcattgcttctgcttttgctgctgaccctgctggggctggggctggtccagccctcctatggccagaatggcatgtaccagcgattcctgaggcaacatgtgcaccctgaggagacaggtggcaatgatcgctactgcaacatgatgatgcaaagacggaagatgactttgtatcattgcaagcgcttcaacaccttcatccatgaagatatctggaacattcgtagtatctgcagcaccaccaatatccaatgcaagaacggcaagatgaactgccatgagggtgtagtgaaggtcacagactgcagggatacaggaagttccaaggcacccaactgcagatatcgggccatggcgagcactagacgtgttgtcattgcctgcgagggtaacccacaggtgcctgtgcact

SEQ ID NO: 26195 - DNA, 79 bp, Macaca Mulatta
ggaaacattacccatctctgtaccatgaacgacagtgcaggtcctcaccagacctcctctctgatgtgtcaaaacaagt

SEQ ID NO: 26196 - DNA, 1638 bp, Macaca Mulatta
  misc_feature (1)...(1638): n = A,T,C or G
ccaggaagggagacaagctggagccagaagccccannnnnnnnnnnnnnnnnnnnnnnnnnnnnnnnnnnnnnnnnnnnnnnnnnnnnnnnnnnnnnnnnnnnnnnnnnnnnnnnnnnnnnnnnnnnnnnnnnnnnnnnnnnnnnnnnnnnnnnnnnnnnnnnnnnnnnnnnnnnnnnnnnnnnnnnnnnnnnnnnnnnnnnnnnnnnnnnnnnnnnnnnnnnnnnnnnnnnnnnnnnnnnnnnnnnnnnnnnnnnnnnnnnnnnnnnnnnnnnnnnnnnnnnnnnnnnnnnnnnnnnnnnnnnnnnnnnnnnnnnnnnnnnnnnnnnnnnnnnnnnnnnnnnnnnnnnnnnnnnnnnnnnnnnnnnnnnnnnnnnnnnnnnnnnnnnnnnnnnnnnnnnnnnnnnnnnnnnnnnnnnnnnnnnnnnnnnnnnnnnnnnnnnnnnnnnnnnnnnnnnnnnnnnnnnnnnnnnnnnnnnnnnnnnnnnnnnnnnnnnnnnnnnnnnnnnnnnnnnnnnnnnnnnnnnnnnnnnnnnnnnnnnnnnnnnnnnnnnnnnnnnnnnnnnnnnnnnnnnnnnnnnnnnnnnnnnnnnnnnnnnnnnnnnnnnnnnnnnnnnnnnnnnnnnnnnnnnnnnnnnnnnnnnnnnnnnnnnnnnnnnnnnnnnnnnnnnnnnnnnnnnnnnnnnnnnnnnnnnnnnnnnnnnnnnnnnnnnnnnnnnnnnnnnnnnnnnnnnnnnnnnnnnnnnnnnnnnnnnnnnnnnnnnnnnnnnnnnnnnnnnnnnnnnnnnnnnnnnnnnnnnnnnnnnnnnnnnnnnnnnnnnnnnnnnnnnnnnnnnnnnnnnnnnnnnnnnnnnnnnnnnnnnnnnnnnnnnnnnnnnnnnnnnnnnnnnnnnnnnnnnnnnnnnnnnnnnnnnnnnnnnnnnnnnnnnnnnnnnnnnnnnnnnnnnnnnnnnnnnnnnnnnnnnnnnnnnnnnnnnnnnnnnnnnnnnnnnnnnnnnnnnnnnnnnnnnnnnnnnnnnnnnnnnnnnnnnnnnnnnnnnnnnnnnnnnnnnnnnnnnnnnnnnnnnnnnnnnnnnnnnnnnnnnnnnnnnnnnnnnnnnnnnnnnnnnnnnnnnnnnnnnnnnnnnnnnnnnnnnnnnnnnnnnnnnnnnnnnnnnnnnnnnnnnnnnnnnnnnnnnnnnnnnnnnnnnnnnnnnnnnnnnnnnnnnnnnnnnnnnnnnnnnnnnnnnnnnnnnnnnnnnnnnnnnnnnnnnnnnnnnnnnnnnnnnnnnnnnnnnnnnnnnnnnnnnnnnnnnnnnnnnnnnnnnnnnnnnnnnnnnnnnnnnnnnnnnnnnnnnnnnnnnnnnnnnnnnnnnnnnnnnnnnnnnnnnnnnnnnnnnnnnnnnnnnnnnnnnnnnnnnnnnnnnnnnnnnnnnnnnnnnnnnnnnnnnnnnnnnnnnnnnnnnnnnnnnnnnnnnnnnnnnnnnnnnnnnnnnnnnnnnnnnnnnnnnnnnnnnnnnnnnnnnnnnnnnnnnnnnnnnnnnnnnnnnnnnagctcgtgcccagaggattggctccaggacatggagcgcctgtcagaggagctgttgctgccactgctgagtcagcccaccctgggcggcctgtgggattcccttag

SEQ ID NO: 26197 - DNA, 269 bp, Macaca Mulatta
aggtcatacagcatatttgacaataatcgccaggatcccacagggctgacagctgctcttcaggcaactgacctggctggagttcttcatatgctctactgtgtcctcttccatggcaccatcttggaccctagcactgccagtcccaaggagaattacacccaaaataccacccaagtagccattcagagtttacgtttcttcaacagctttgcagctcttcatctgcctgcttttcaggtaccaagtattggtttatatcaatgtta

SEQ ID NO: 26198 - DNA, 246 bp, Macaca Mulatta
aacagctgccctcctcagggctggatacctgctctccgagtctgtgtctccaggctgtgtgctcagacttgaccatgtttgggcatggaggcttgccccagatggggacccaagtctgcttccctggagacgggcggggaggccaaacttcctgctggagctctgtggcctcttttggggtgggggctgggggccaggcagaaagaaaccatctgctgctgaagacccacagggcgccggggagac

SEQ ID NO: 26199 - DNA, 589 bp, Macaca Mulatta
aggagctgacacaatgagtgacacgagttctgtaagcttggaggtgagccctggcagccgggagacttcagttgctacactgtcacctggggcgagcagccgtggctgggatgatggtgacacccgcagcgagcacagctacagcgagtcaggcgccagcggctcctcttttgaggagctggacctggagggtgaggggcccttaggggagtcacggctggaacctgagactgagcccctggggactaccaagtggccctgggagcccagtgctcctgagaagggcaaggagtaacccgtgacctgcaccctcctgcagtgcagttgctgaggaactgagcagactctccagcagactctccagccttcttcctccttcctttgggggaggaggggttcctgagggacctgacttcccctgctccaggcctcttgctacgccttctcctcactgccctttaggctcccagggccaaaggagccagggactattttctgcatcagcacccagggctgccgcccctgttgtgtctttttttcagactcacatagagagcttccaggacccacaataaagccaatgatttac

SEQ ID NO: 26200 - DNA, 361 bp, Macaca Mulatta
  misc_feature (1)...(361): n = A,T,C or G
tctcccacatccgactgttgtcctggcttctgctgggttccctcactcacaatgcagtgtgcccaaatgcctcctctccctgcctgcccattcctctggatgcaggctcccacattgcagaccatcttattgttatcctgattggatttccagagcaatcaaagnnnnnnnnnnnnnnnnnnnnnnnnnnnnnnnnnnnnnnnnnnnnnnnnnnnnnnnnnnnnnnnnnnnnnnnnnnnnnnnnnnnnnnnnnnnnnnnnnaaaatcagaatgaattcagcttcacagcgatactgacagcactagaattttggagtagggtgacacccagcatccttcagctaatggcccataacaaagt

SEQ ID NO: 26201 - DNA, 347 bp, Macaca Mulatta
ggcgaggtccagccccgcctggggcctccggacgttgctccctgaaccctcggaggtggcggtggatcttactccttccagccagtgaggatccagcaatcttctccgtgcctccccccgcgcctgttggttggaagtgacaaccttgaagatcggccggttggaagtgaagaccttgaagatcggcgggcgcagcggggccgagggggcgggtctggcactaggtcccgcccctgcacgccaggaaccccagaggaagtcgcagttcagcccagctgagtcctgtctgcagaatccacaccaaccagcatcatgtccatgacactggggtactgggacatccgcgg

SEQ ID NO: 26202 - DNA, 591 bp, Macaca Mulatta
cttccgcacacctccctcgctctcccacaccactggcaccaggccccggacacctgctcggctgcaggagaatggctactcatcacacgctgtggatgagactggtcctgctggggctgctgggcggcctacaggcagcacccgaggcccaggtctccgtgcagcccaacttccagccggacaagttcctggggcgctggttcagcgcgggcctcgcctccaactcgagctggctccaggagaagaaggcagcgctgtccatgtgcaagtcggtggtggcccctgcggcggatggtggcttcaacctgacctccaccttcctcaggaaaaaccagtgtgagacccgaaccatgctgctgcagcccggggagtccctcggctcctacagctaccggagtccccactggggcagcacctactctgtgtcagtggtggagactgactacgaccactacgccctgctgtacagccagggcagcaagggccccggcgaggacttccgcatggccaccctctacagccgaacccagacccccagggctgagttaaaggagaaatttaccgccttctgcaaggcccagggcttcacag

SEQ ID NO: 26203 - DNA, 900 bp, Macaca Mulatta
gctgtgttggctgctcttgaatctgccctaactccacacgcacctggacttggcgtgtctctcttgcaattctaactaacagtcccttctcttcaagccctgtgggcctgcacgtcggaccctgggttttgcgttagagcccaccttctgagcagcagcctcagtgggaggtggaggcaggtagcgattctgggtgccaggtgggagtggagagggtctgctctcctccaagtgtgcactttcctcattattctcaggggcacagatgctcaggctggcgcagaggagaggatagggagggagccatggtgcccaggaggcctggcgaccagcccctgctgagcgatggagctaacatcctgtgtttatggccaacggggttgccactaggctggtgcagctgcgtcagtgagctggcgtgctgcagaccacctgagagctggccctagggtctcaggcaggctggggaatgggcatccacagtgggaaacctgtgttttggcagtagactcctgcatgttttcccacgggcctgtcgcatccctgggattttattctaactagaaataaatgctaaccgtcaataatcagtgcatgtaaataacttgatcgtgccaaggaagattgaggacccctcacagcagctggggagagccatgttgctctgaggtgtgtgcgcacagatggggcgggggcaggtggcacctcgggtctcgtcagtattccttttcccttggacagcctggtgccctctgcttcccaggtgagtgaggagacttgccttgaagtgggctgaaagaccctccaggactccagatgcccacattctctagcacaactgtgcagaatgccctgggcagctcactggcctcgtggccttccctgtcgccatccttcaca

SEQ ID NO: 26204 - DNA, 759 bp, Macaca Mulatta
gcagctccaaccaggacagcctttctgagaacatgcaaccaatcctgctcctgctggccttcctcctgctgcccaggacagatgcaggggagatcatcgggggacatgaggccaagccccactcccgcccctacatggcttatcttatgatctgggatcagatgtctctgaagagctgcggtggcttcctgatacgagaggacttcgtgctgacggctgctcactgttggggaagctccataaatgtcaccttgggggcccacaatatcaaggaacaggagcggacccagcagattatccctgtgaaaagagccatcccccacccagcctataatcctgagaacttttccaacgacatcatgctactacagctggagagaaaggccaagcggaccacagctgtgaagcccctcaggctacctaggaacaaggcccaggtgaagccagggcaggcgtgcgatgtggccggctggggacagacgacccccgatggaaaatactcacacacactgcaggaggtgaagttgacagtggaggaagatcaaacgtgcaaatcccgcttaggccattattacgacagtactgttgagttgtgcgtgggggacccagagattcaaaaggcttcctttaagggggactctggaggaccccttgtgtgtaacaaggtggcccagggcattgtctcctatggacaaagaaatggcaagcctccacaagtctgcaccaaagtctcaagctttgtacgctgggataagaaac

SEQ ID NO: 26205 - DNA, 73 bp, Macaca Mulatta
  misc_feature (1)...(73): n = A,T,C or G
ncaggcctggctggccgagatccatgagtatgcccagcacgacgtggcgctcatgctgctggggaacaaggtg

SEQ ID NO: 26206 - DNA, 681 bp, Macaca Mulatta
  misc_feature (1)...(681): n = A,T,C or G
gggaaaaactaatttagggttgcagccaataaaggtgattggtgtataatttaagtgttaaatcaatttctttcattcaattagctctttacccaagcagaagtgaatcatttggagcttagggtgtgtgtgttttgtatcccctttctggtaaacccattccctaccaattttacgtcataagagattccccccccccaaatctagaacaatgtataatacattcacattaagtgaagggcataggaagggtgtcatggagtccaaataaagatgaatattcctgctcnnnnnnnnnnnnnnnnnnnnnnnnnnnnnnnnnnnnnnnnnnnnnnnnaggccgcataggccttcgggacgcttcggccaccaataatttttcaagaccattccttgggcccgcgggcccggtaggaaatgaaacttgggcaatcctgttcccaagaaaagcttggatatgaaaaagtgctggaattcccccccgaaaaaaaaccccccggggagcaaaccaacgttttgatccaaaaccccaaaggagggtttcggaaggcaattaaaggggattctcccaacccggagaattccaaattaaaggcccccaatactcannnnnnnnnnnnnnnnnnnccaaggggcatgttaaatttccaatttaaaccgggtttggaaaaactacacaaa

SEQ ID NO: 26207 - DNA, 589 bp, Macaca Mulatta
  misc_feature (1)...(589): n = A,T,C or G
gggtctcctctcacctccttgactgcaggatgaaactgcttgtgctggctgtgctgctcacagtggctgccgccgagagcggcatcagctctcgggccgtgtggcagttccgcaaattgatcaagtgtgtgatcccggggagcgacccctacttggaatacaacaactacggctgctactgtggcttggggggctcaggcacccccgtggatgaattggacaagtgctgccagacacatgacaactgctacgaccaggccaagaagctgagcagctgtaaatttctgctggacaacccgtacacccacacctactcatactcgtgctctaactctgagatcacctgcagcagcaaaaacaaagagtgtgaggccttcatttgcaactgcgaccgcaatgctgccatctgcttttcaaaagctccatataacaaggaacacaagaacctggacagcaagaagtattgtcagagttgaatatcacctctcaaaagcaccacctctacctgcctcaactcacactgtgcccttcaataaagcaccttgttgaaagatnnnnnnnnnnnnnnnnnnnnnnnnnnnnnnntgtc

SEQ ID NO: 26208 - DNA, 990 bp, Macaca Mulatta
cgaggccgccggtccttcctccagcgccctgtggaccccgcagaaggcgctcgccttcctagcccacaaacgcgtaatcgatttttctcgctgtggcaacggggacgtcccgaaagatcctctgctccgacaggcaacttcggccttccctgccctgacctggaacctctgggagggctgcagagttagttgccgcctctgcgctctgacggaggcacgaggcctgcggagtaggtccctctgttccgacaggtgcgacacttagcgctccatgcctgcggactccgggaggcatggcctcccccagggccgccacctctgctggttgctctgtgctttcaccttaaagctctgtcaagcagaggctcccgtgcaggaggagaagctgtcagcgagcacctcaaatttgccatgctggctggtggaagagtttgtggtaacaacagagtgctctccatgctctaatttccaggctaaaactacccctgagtgtggtcccacagggtatgtagagaaaatcacatgcagctcatctaagagaattgagttcaaaagctgccgctcagctttgatggaacaacacttgttctggaagttcgaaggggctgttgtgtttgtggccctgatcttcgcttgtcttgtcatcattcgtcagcgacaactggacagaaaggctctggaaaaggtccggaagcaaattgagtccatatagctacattccacccttttatcctgggtcttagagaccccaatctcagacagtgaaagtgtaatgggctgatgtgcaccttgggctctggagcccgtggtggaatcccctttccccgcctctctttcgacaatattgagcgataaaaaagtaaaggtgcttctccgtaatgaacaggacacctggagaggaagagggagtaagccaaacaagttcccctacagtttcgctcactataaatgggaaagaaccattaccaatcacatccaccaaataaaaaa

SEQ ID NO: 26209 - DNA, 655 bp, Macaca Mulatta
aaatgacttggccaaatacattgttaaaacaatgagtaaagaaagagatgtgttcttgagtaaaggaacacccagatccagggagcaaagacccagaagaagataccccaaatttggacttttggatcaggaccttagtaacattggtcctgcttacgacaaccaaaaacagagcagtgctgtgtctactagtgggaatctaaatgggggaattgcagcaggaagcagcggaaaaggacgaggagccaagcgcaaacagcaggatggagggaccacagggaccaccaagaaggcccggagtgaccctttattttctgctcagcgccttccccctcatggctaccccttggaacacccgtttaacaaagatggctatcggtatattctagctgagcctgatccccacgcccctgaccccgagaagctggaacttgactgctgggcaggaaaacctattcctggagacctctacagagcctgcttgtatgaacgggttttgttagccctacatgatcgagctccccagttaaagatctcagatgatcggctaactgtggttggagagacaggttactctatggtgagggcctctcatggagttcggaaaggtgcctggtactttgaaatcaccgtggatgagatgccacaagatacc

SEQ ID NO: 26210 - DNA, 4984 bp, Macaca Mulatta
  misc_feature (1)...(4984): n = A,T,C or G
ggcagtaacgtgatgaggtctattcatggcgtgggagagctgatgacccaggtggtgctccggggaggaggctttttgcctatgactcccatggctgctgcccctgaaggcaatgtgaagcaggcagagcctgagaaggaggacatcatggtcatggacaccaagctgaagatcattgagatactccagnnnnnnnngaatgtgaggttggattataggatctcctgcctcctgtgtatatttaagcgagagtttgatgaannnnnnnncagacttcagaaacatcctccggaaacatcagccaagaagggccaagtaatgtannnnnnnnnnnnnnnnnnnnnnnnnnnnnnnnnnnnnnnnnnnnnnnnnnnnnnnnnnnnnnnnnnnnnnnnnnnnnnnnnnnnnnnnnnnnnnnnnnnnnnnnnnnnnnnnnnnnnnnnnnnnnnnnnnnnnnnnnnnnnnnnnnnnnnnnnnnnnnnnnnnnnnnnnnnnnnnnnnnnnnnnnnnnnnnnnnnnnnnnnnnnnnnnnnnnnnnnnnnnnnnnnnnnnnnnnnnnnnnnnnnnnnnnnnnnnnnnnnnnnnnnnnnnnnnnnnnnnnnnnnnnnnnnnnnnnnnnnnnnnnnnnnnnnnnnnnnnnnnnnnnnnnnnnnnnnnnnnnnnnnnnnnnnnnnnnnnnnnnnnnnnnnnnnnnnnnnnnnnnnnnnnnnnnnnnnnnnnnnnnnnnnnnnnnnnnnnnnnnnnnnnnnnnnnnnnnnnnnnnnnnnnnnnnnnnnnnnnnnnnnnnnnnnnnnnnnnnnnnnnnnnnnnnnnnnnnnnnnnnnnnnnnnnnnnnnnnnnnnnnnnnnnnnnnnnnnnnnnnnnnnnnnnnnnnnnnnnnnnnnnnnnnnnnnnnnnnnnnnnnnnnnnnnnnnnnnnnnnnnnnnnnnnnnnnnnnnnnnnnnnnnnnnnnnnnnnnnnnnnnnnnnnnnnnnnnnnnnnnnnnnnnnnnnnnnnnnnnnnnnnnnnnnnnnnnnnnnnnnnnnnnnnnnnnnnnnnnnnnnnnnnnnnnnnnnnnnnnnnnnnnnnnnnnnnnnnnnnnnnnnnnnnnnnnnnnnnnnnnnnnnnnnnnnnnnnnnnnnnnnnnnnnnnnnnnnnnnnnnnnnnnnnnnnnnnnnnnnnnnnnnnnnnnnnnnnnnnnnnnnnnnnnnnnnnnnnnnnnnnnnnnnnnnnnnnnnnnnnnnnnnnnnnnnnnnnnnnnnnnnnnnnnnnnnnnnnnnnnnnnnnnnnnnnnnnnnnnnnnnnnnnnnnnnnnnnnnnnnnnnnnnnnnnnnnnnnnnnnnnnnnnnnnnnnnnnnnnnnnnnnnnnnnnnnnnnnnnnnnnnnnnnnnnnnnnnnnnnnnnnnnnnnnnnnnnnnnnnnnnnnnnnnnnnnnnnnnnnnnnnnnnnnnnnnnnnnnnnnnnnnnnnnnnnnnnnnnnnnnnnnnnnnnnnnnnnnnnnnnnnnnnnnnnnnnnnnnnnnnnnnnnnnnnnnnnnnnnnnnnnnnnnnnnnnnnnnnnnnnnnnnnnnnnnnnnnnnnnnnnnnnnnnnnnnnnnnnnnnnnnnnnnnnnnnnnnnnnnnnnnnnnnnnnnnnnnnnnnnnnnnnnnnnnnnnnnnnnnngcctgtaacaacactagtgacaggaaacatgcagactccattttggagaagtacgtcaccgaaatcgtcatgagtatttttactactttcttcagctctcccttctcagaccagagtactactttgcagnnnnnnnnnnnnnnnnnnnnnnnnnnnnnnnnnnnnnnnnnnnnnnnnnnnnnnnnnnnnnnnnnnnnnnnnnnnnnnnnnnnnnnnnnnnnnnnnnnnnnnnnnnnnnnnnnnnnnnnnnnnnnnnnnnnnnnnnnnnnnnnnnnnnnnnnnnnnnnnnnnnnnnnnnnnnnnnnnnnnnnnnnnnnnnnnnnnnnnnnnnnnnnnnnnnnnnnnnnnnnnnnnnnnnnnnnnnnnnnnnnnnnnnnnnnnnnnnnnnnnnnnnnnnnnnnnnnnnnnnnnnnnnnnnnnnnnnnnnnnnnnnnnnnnnnnnnnnnnnnnnnnnnnnnnnnnnnnnnnnnnnnnnnnnnnnnnnnnnnnnnnnnnnnnnnnnnnnnnnnnnnnnnnnnnnnnnnnnnnnnnnnnnnnnnnnnnnnnnnnnnnnnnnnnnnnnnnnnnnnnnnnnnnnnnnnnnnttaataaagcatacaaaacagctgctagaagaaaatgaggagaagctctgcattaaggtcctccagaccctgagggaaatgatgaccaaagatagaggctatggagaaaaggnnnnnnnnnnnnnnnnnnnnnnnnnnnnnnnnnnnnnnnnnnnnnnnnnnnnnnnnnnnnnnnnnnnnnnnnnnnnnnnnnnnnnnnnnnnnnnnnnnnnnnnnnnnnnnnnnnnnnnnnnnnnnnnnnnnnnnnnnnnnnnnnnnnnnnnnnnnnnnnnnnnnnnnnnnnnnnnnnnnnnnnnnnnnnnnnnnnnnnnnnnnnnnnnnnnnnnnnnnnnnnnnnnnnnnnnnnnnnnnnnnnnnnnnnnnnnnnnnnnnnnnnnnnnnnnnnnnnnnnnnnnnnnnnnnnnnnnnnnnnnnnnnnnnnnnnnnnnnnnnnnnnnnnnnnnnnnnnnnnnnnnnnnnnnnnnnnnnnnnnnnnnnnnnnnnnnnnnnnnnnnnnnnnnnnnnnnnnnnnnnnnnnnnnnnnnnnnnnnnnnnnnnnnnnnnnnnnnnnnnnnnnnnnnnnnnnnnnnnnnnnnnnnnnnnnnnnnnnnnnnnnnnnnnnnnnnnnnnnnnnnnnnnnnnnnnnnnnnnnnnnnnnnnnnnnnnnnnnnnnnnnnnnnnnnnnnnnnnnnnnnnnnnnnnnnnnnnnnnnnnnnnnnnnnnnnnnnnnnnnnnnnnnnnnnnnnnnnnnnnnnnnnnnnnnnnnnnnnnnnnnnnnnnnnnnnnnnnnnnnnnnnnnnnnnnnnnnnnnnnnnnnnnnnnnnnnnnnnnnnnnnnnnnnnnnnnnnnnnnnnnnnnnnnnnnnnnnnnnnnnnnnnnnnnnnnnnnnnnnnnnnnnnnnnnnnnnnnnnnnnnnnnnnnnnnnnnnnnnnnnnnnnnnnnnnnnnnnnnnnnnnnnnnnnnnnnnnnnnnnnnnnnnnnnnnnnnnnnnnnnnnnnnnnnnnnnnnnnnnnnnnnnnnnnnnnnnnnnnnnnnnnnnnnnnnnnnnnnnnnnnnnnnnnnnnnnnnnnnnnnnnnnnnnnnnnnnnnnnnnnnnnnnnnnnnnnnatgaatccatggcattgacatcactctcagccctgatcctcaatgatatcaatcctttgggaaacaataggatggaccttgtgttagaactgaaggcaannaatgcctcgaagttactcctggccatcatggaaagcaggcacgacagtgaaaacgcagagaggatactttatagcatgaggcccaaggaactggtnnnnnnnnnnnnnnnnnnnnnnnnnnnnnnnnnnnnnnnnnnnnnnnnnnnnnnnnnnnnnnnnnnnnnnnnnnnnnnnnnnnnnnnnnnnnnnnnnnnnnnnnnnnnnnnnnnnnnnnnnnnnnnnnnnnnnnnnnnnnnnnnnnnnnnnnnnnnnnnnnnnnnnnnnnnnnnnnnnnnnnnnnnnnnnnnnnnnnnnnnnnnnnnnnnnnnnnnnnnnnnnnnnnnnnnnnnnnnnnnnnnnnnnnnnnnnnnnnnnnnnnnnnnnnnnnnnnnnnnnnnnnnnnnnnnnnnnnnnnnnnnnnnnnnnnnnnnnnnnnnnnnnnnnnnnnnnnnnnnnnnnnnnnnnnnnnnnnnnnnnnnnnnnnnnnnnnnnnnnnnnnnnnnnnnnnnnnnnnnnnnnnnnnnnnnnnnnnnnnnnnnnnnnnnnnnnnnnnnnnnnnnnnnnnnnnnnnnnnnnnnnnnnnnnnnnnnnnnnnnnnnnnnnnnnnnnnnnnnnnnnnnnnnnnnnnnnnnnnnnnnnnnnnnnnnnnnnnnnnnnnnnnnnnnnnnnnnnnnnnnnnnnnnnnnnnnnnnnnnnnnnnnnnnnnnnnnnnnnnnnnnnnnnnnnnnnnnnnnnnnnnnnnnnnnnnnnnnnnnnnnnnnnnnnnnnnnnnnnnnnnnnnnnnnnnnnnnnnnnnnnnnnnnnnnnnnnnnnnnnnnnnnnnnnnnnnnnnnnnnnnnnnnnnnnnnnnnnnnnnnnnnnnnnnnnnnnnnnnnnnnnnnnnnnnnnnnnnnnnnnnnnnnnnnnnnnnnnnnnnnnnnnnnnnnnnnnnnnnnnnnnnnnnnnnnnnnnnnnnnnnnnnnnnnnnnnnnnnnnnnnnnnnnnnnnnnnnnnnnnnnnnnnnnnnnnnnnnnnnnnnnnnnnnnnnnnnnnnnnnnnnnnnnnnnnnnnnnnnnnnnnnnnnnnnnnnnnnnnnnnnnnnnnnnnnnnnnnnnnnnnnnnnnnnnnnnnnnnnnnnnnnnnnnnnnnnnnnnnnnnnnnnnnnnnnnnnnnnnnnnnnnnnnnnnnnnnnnnnnnnnnnnnnnnnnnnnnnnnnnnnnnnnnnnnnnnnnnnnnnnnnnnnnnnnnnnnnnnnnnnnnnnnnnnnnnnnnnnnnnnnnnnnnnnnnnnnnnnnnnnnnnnnnnnnnnnnnnnnnnnnnnnnnnnnnnnnnnnnnnnnnnnnnnnnnnnnnnnnnnnnnnnnnnnnnnnnnnnnnnnnnnnnnnnnnnnnnnnnnnnnnnnnnnnnnnnnnnnnnnnnnnnnnnnnnnnnnnnnnnnnnnnnnnnggaacccctgtttgctgctagagtgatttatgatctcttgttcttcttcatggttatcatcattgttcttaacctgatttttggggttatcattgacacttttgctgacctgaggagtgagaaacagaagaaggaagagatcttgaagaccacgtgctttatctgtgg

SEQ ID NO: 26211 - DNA, 611 bp, Macaca Mulatta
  misc_feature (1)...(611): n = A,T,C or G
ccctcgggctcctctgccttctgcttgggcttcagggctgtctggctgcagnnnnnnnnnnnnnnnnnnnnnnnnnnnnnnnnnnnnnnnnnnnnnnnnnnnnnnnnnnnnnnnnnnnnnnnnnnnnnnnnnnnnnnnnnnnnnnnnnnnnnnnnnnnnnnnnnnnnnnnnnnnnnnnnnnnnnnnnnnnnnnnnnnnnnnnnnnnnnnnnnnnnnnnnnnnnnnnnnnnnnnnnnnnnnnnnnnnnnnnnnnnnnnnnnnnnnnnnnnnnnnnnnnnnnnnnnnnnnnnnnnnnnnnnnnnnnnnnnnnnnnnnnnnnnnnnnnnnnnnnnnnnnnnnnnnnnnnnnnnnacaaggacgaccagctgatctgcgtgaacgagaacggcggctgtgagcagtactgcagtgaccacgcgggtgccaagcgctcctgttggtgccacgaggggtactcgctgctggcagacggggtgtcctgcatgcccacannnncacagttgaatatccatgtggaaaaatacctattctggaaaaaagaaatgccagcaaaccccaaggccgaattgtcgggggcagggtgtgccccaaaggggagtgtccatggcagg

SEQ ID NO: 26212 - DNA, 4146 bp, Macaca Mulatta
  misc_feature (1)...(4146): n = A,T,C or G
agtctcagctttcagcaagaagccacggtcagtggaagtggccgcaggcagccctgccgtgtttgaggtggagacagagcgggcaggagtgaaggtgcgctggcagcgcggaggcagtgacatcggagccagcagcaagtatggcctggccacagagggcacacggcatacactgacagtgcgggaggtgggccctgcnnnnnnnnnnnnnnnnnnnnnnnnnnnnnnnnnnnnnnnnnnnnnnnnnnnnnnnnnnnnnnnnnnnnncagagaaggcagagcccgtcctggcccctgcccctgcccctgccgaggccactggaacccctggagaaaccctggccccagccgctgagctgggagaaagtgccccaagtcccgaagnnnnnnnnnnnnnnnnnnnnnnnnnnnnnnnnnnnnnnnnnnnnnnnnnnnnnnnnnnnnnnnnnnnnnnnnnnnnnnnnnnnnnnnnnnnnnnnnnnnnnnnnnnnnnnnnnnnnnnnnnnnnnnnnnnnnnnnnnnnnnnnnnnnnnnnnnnnnnnnnnnnnnnnnnnnnnnnnnnnnnnnnnnnnnnnnnnnnnnnnnnnnnnnnnnnnnnnnnnnnnnnnnnnnnnnnnnnnnnnnnnnnnnnnnnnnnnnnnnnnnnnnnnnnnnnnnnnnnnnnnnnnnnnnnnnnnnnnnnnnnnnnnnnnnnnnnnnnnnnnnnnnnnnnnnnnnnnnnnnnnnnnnnnnnnnnnnnnnnnnnnnnnnnnnnnnnnnnnnnnnnnnnnnnnnnnnnnnnnnnnnnnnnnnnnnnnnnnnnnnnnnnnnnnnnnnnnnnnnnnnnnnnnnnnnnnnnnnnnnnnnnnnnnnnnnnnnnnnnnnnnnnnnnnnnnnnnnnnnnnnnnnnnnnnnnnnnnnnnnnnnnnnnnnnnnnnnnnnnnnnnnnnnnnnnnnnnnnnnnnnnnnnnnnnnnnnnnnnnnnnnnnnnnnnnnnnnnnnnnnnnnnnnnnnnnnnnnnnnnnnnnnnnnnnnnnnnnnnnnnnnnnnnnnnnnnnnnnnnnnnnnnnnnnnnnnnnnnnnnnagcctttcagaagaagctggagccggcctaccaggtgagcaaaggccacaagatccggctgaccgtggaactggccgaccctgacgctgaagtcaaatggctcaagaatggccaggagatccagatgagtggcaggtncaggtacatctttgagtccattggtgccaagcgtaccctgaccatcagccagtgctcactggcagacgacgcagcctaccagtgtgtggtgggtggcgagaagtgcagcacggagctctttgtcaaagnagagccccccgtgctcatcacgcgccccttggaggaccagctggtgatggtgggacagcgggtggagtttgagtgtgaagtatcggaggagggggcgcaagtcaaatggnnnnnnnnnnnnnnnnnnnnnnnnnnnnnnnnnnnnnnnnnnnnnnnnnnnnnnnnnnnnnnnnnnnnnnnnnnnnnnnnnnnnnnnnnnnnnnnnnnnnnnnnnnnnnnnnnnnnnnnnnnnnnnnnnnnnnnnnnnnnnnnnnnnnnnnnnnnnnnnnnnnnnnnnnnnnnnnnnnnnnnnnnnnnnnnnnnnnnnnnnnnnnnnnnnnnnnnnnnnnnnnnnnnnnnnnnnnnnnnnnnnnnnnnnnnnnnnnnnnnnnnnnnnnnnnnnnnnnnnnnnnnnnnnnnnnnnnnnnnnnnnnnnnnnnnnnnnnnnnnnnnnnnnnnnnnnnnnnnnnnnnnnnnnnnnnnnnnnnnnnnnnnnnnnnnnnnnnnnnnnnnnnnnnnnnnnnnnnnnnnnnnnnnnnnnnnnnnnnnnnnnnnnnnnnnnnnnnnnnnnnnnnnnnnnnnnnnnnnnnnnnnnnnnnnnnnnnnnnnnnnnnnnnnnnnnnnnnnnnnnnnnnnnnnnnnnnnnnnnnnnnnnnnnnnnnnnnnnnnnnnnnnnnnnnnnnnnnnnnnnnnnnnnnnnnnnnnnnnnnnnnnnnnnnnnnnnnnnnnnnnnnnnnnnnnnnnnnnnnnnnnnnnnnnnnnnnnnnnnnnnnnnnnnnnnnnnnnnnnnnnnnnnnnnnnnnnnnnnnnnnnnnnnnnnnnnnnnnnnnnnnnnnnnnnnnnnnnnnnnnnnnnnnnnnnnnnnnnnnnnnnnnnnnnnnnnnnnnnnnnnnnnnnnnnnnnnnnnnnnnnnnnnnnnnnnnnnnnnnnnnnnnnnnnnnnnnnnnnnnnnnnnnnnnnnnnnnnnnnnnnnnnnnnnnnnnnnnnnnnnnnnnnnnnnnnnnnnnnnnnnnnnnnnnnnnnnnnnnnnnnnnnnnnnnnnnnnnnnnnnnnnnnnnnnnnnnnnnnnnnnnnnnnnntcctgggctacatcctggagcgcaagaagaagaagagctagcggtggatgcggctgaacttcgacctgattcaggagctgagccacgaagcgcggcgcatgatcgagggcgtggtgtacgagatgcgcgtctacgccgtcaacgccattggcatgtccaggcccagccctgcctcccagcccttcatgcccatcggtccccccagcgaacccacccacctggcaatagaggacatttctgacgccacggtctccctcaagtggcggcccccagagcgcgtgggagcaggaggcctggatggctacagcgtggagtactgcccagagggcggctcagagtgggtggctgccctgtgggggctgacagagcacacgtcgatacgggtgaaggacctgcccacgggggcccggctgctcttccgagtgcgtgcacacaatatggcagggcccagagcccctcttaccaccacggagccggtgacggtgcaggagatcctgcaacggccacggctccagctgcccaggcacctgcgtcagaccattcagaagaaggtcagggagcctgtgaacctcctcatccctttccagggcaagccctggcctcaggtgacctggaccaaagaggggcagcccctggcaggcgaggaggtgagcgtccgcaacagccccacagacaccatcctgttcatccgggccgcttgccacgcgcattcaggcacttaccaagtgaccgtgcgcatagagaacatggaggacaaggccaccctggtgctgcaggttgagagaagccaagtcctcccnnnnnnncctccccaggatctccgggtcactgaggcctggggtcttaatgtggctctggagtggaagccaccccaggatgatggcaacacggagctctgggggtacacagtgcagaaggctgacaagaagaccatggnnnnnnnnnnnnnnnnnnnnnnnnnnnnnnnnnnnnnnnnnnnnnnnnnnnnnnnnnnnnnnnnnnnnngctactactttcgtgtcttcagccagaatatggttggttccagtgacacagcggccaccaccaaggagcccgtctttatccccagaccaggcatcacctatgagccacccaactataaggccctggacttctctgaggccccaagcttcacccagcccctggtgaaccgctcggtcatcgcaggctacaccactatgctctgctgtgctgtccggggtagccccaagcccaagatttcctggttcaagaatggcctggacctgggagaggatgcccgcttccgcatgttcagcaagcagagagtgttgactctggagattagaaagccctgcccctttgacggaggcatctatgtctgcagggccaccaacttacagggcgaggcacagtgtgagtgccgcctggaggtgcgagtgcctcagtgaccaggctggctcctggggatggccaggtacaagatgccagcctcagaccaggagcctggagggaagttggggaaactgctccctgctgttggatgtgtgtgtgacaagtgtgtctcctgggctgcggtgggggatcagcaggacagctatgttgggcaggcctgagtgggtgttgcacagactggtccacagggctcctgaaggaagctcctggatctttggggtaaaaggagggtgacctcaagaaaggatgtctggggacaggcctttctggcctgctgtgtcttcccaatgtgtactgggcaataaaagattaatgcagtcaca

SEQ ID NO: 26213 - DNA, 610 bp, Macaca Mulatta
tgaagatatgcaagctgaagttgaccagcaaagagttgaagatgaagcttggtgccagaaagaggagctgcttcgtaaagctgaagaaacaagaagagaaatgctcttacaagaggaggagaaaatcatacaacaaagacagaggctagctgctgtgaaaagagagctgcaagtaaaggaaatgcacttacaagatgctgcaagaaggcgtttggtgaagcttcagcaagatcaacaggaaatggagctaagaagactggatgatgaaattgggagaaaggtatatatgagagatcgagaaattgctgccacagccagagacctagaaatgagacagctggaactcgaatcgcaaaagagactttatgagaagaatcttactgaaaatcaagcagctgttgcaaaagaaatgcgagcagatgcacatgcctatagacgaaaagtggatcttgaagaacacatgtttcataagctgatagaagcaggtgaaacacagagtcagaaaactcagaaggtgattaaagaaaatttggcaaaggctgaacaagcatgcctaaatactgactggcagattcagtctttacataaacaaaaatgtgatgatctacaa

SEQ ID NO: 26214 - DNA, 83 bp, Macaca Mulatta
tggaattcggtgcgatctctaagtcgatgtcgaagcaggagtttaagtcccatttgcccccgtagccaaattggtttaagcac

SEQ ID NO: 26215 - DNA, 535 bp, Macaca Mulatta
aggtcctgcgttcaatttcctggatgctcctgctgttcgtgtcactggtgctgacgtccctatgccttatgcaaagattctagaagacaactctatacctcaggtcaaagacatcatatttgcaataaagaaaacattaaatatttagtttggacttgagtatcaagtcgttgaaatttatttgaaatacttgctggcactgcacttgtactgcaagacctgactactcataaaggaaaacgatttctaaagcaacagcaggtgtttttgtacagagaagtttaaatgtgtttgtgtggggaaacctctccactctcctgccctagatgccatgcttccttaagtctgttacagttgccacgttctttgaataacaaattatataggattttaccctgtctcaccacaaggacaaagtatggatgtggcagagtcctgatgaaagatatatccaaacaagataacttatatgtataaaattaaagcatatagtatacatttactgttagtttgttttgataaggaataaaggaat

SEQ ID NO: 26216 - DNA, 4138 bp, Macaca Mulatta
  misc_feature (1)...(4138): n = A,T,C or G
aggttacagagcagtgataactacctgccagtgtctcttaggagtgaggtacctggagttgagggaccccaacctgtggcaatgacagcggacgagttggttttctttgtgaacggcagaaaggnnnnnnnnnnnnnnnnnnnnnnnnnnnnnnnnnnnnnnnnnnnnnnnnnnnnnnnnnnnnnnnnnnnnnnnnnnnnnnnnnnnnnnnnnnnnnnnnnnnnnnnnnnnnnnnnnnnnnnnnnnnnnnnnnnnnnnnnnnnnnnnnnnnnnnnnnnnnnnnnnnnnnnnnnnnnnnnnnnnnnnnnnnnnnnnnnnnnnnnnnnnnnnnnnnnnnnnnnnnnnnnnnnnnnnnnnnnnnnnnnnnnnnnnnnnnnnnnnnnnnnnnnnnnnnnnnnnnnnnnnnnnnnnnnnnnnnnnnnnnnnnnnnnnnnnnnnnnnnnnnnnnnnnnnnnnnnnnnnnnnnnnnnnnnnnnnnnnnnnnnnnnnnnnnnnnnnnnnnnnnnnnnnnnnnnnnnnnnnnnnnnnnnnnnnnnnnnnnnnnnnnnnnnnnnnnnnnnnnnnnnnnnnnnnnnnnnnnnnnnnnnnnnnnnnnnnnnnnnnnnnnnnnnnnnnnnnnnnnnnnnnnnnnnnnnnnnnnnnnnnnnnnnnnnnnnnnnnnnnnnnnnnnnnnnnnnnnnnnnnnnnnnnnnnnnnnnnnnnnnnnnnnnnnnnnnnnnnnnnnnnnnnnnnnnnnnnnnnnnnnnnnnnnnnnnnnnnnnnnnnnnnnnnnnnnnnnnnnnnnnnnnnnnnnnnnnnnnnnnnnnnnnnnnnnnnnnnnnnnnnnnnnnnnnnnnnnnnnnnnnnnnnnnnnnnnnnnnnnnnnnnnnnnnnnnnnnnnnnnnnnnnnnnnnnnnnnnnnnnnnnnnnnnnnnnnnnnnnnnnnnnnnnnnnnnnnnnnnnnnnnnnnnnnnnnnnnnnnnnnnnnnnnnnnnnnnnnnnnnnnnnnnnnnnnnnnnnnnnnnnnnnnnnnnnnnnnnnnnnnnnnnnnnnnnnnnnnnnnnnnnnnnnnnnnnnnnnnnnnnnnnnnnnnnnnnnnnnnnnnnnnnnnnnnnnnnnnnnnnnnnnnnnnnnnnnnnnnnnnnnnnnnnnnnnnnnnnnnnnnnnnnnnnnnnnnnnnnnnnnnnnnnnnnnnnnnnnnnnnnnnnnnnnnnnnnnnnnnnnnnnnnnnnnnnnnnnnnnnnnnnnnnnnnnnnnnnnnnnnnnnnnnnnnnnnnnnnnnnnnnnnnnnnnnnnnnnnnnnnnnnnnnnnnnnnnnnnnnnnnnnnnnnnnnnnnnnnnnnnnnnnnnnnnnnnnnnnnnnnnnnnnnnnnnnnnnnnnnnnnnnnnnnnnnnnnnnnnnnnnnnnnnnnnnnnnnnnnnnnnnnnnnnnnnnnnnnnnnnnnnnnnnnnnnnnnnnnnnnnnnnnnnnnnnnnnnnnnnnnnnnnnnnnnnnnnnnnnnnnnnnnnnnnnnnnnnnnnnnnnnnnnnnnnnnnnnnnnnnnnnnnnnnnnnnnnnnnnnnnnnnnnnnnnnnnnnnnnnnnnnnnnnnnnnnnnnnnnnnnnnnnnnnnnnnnnnnnnnnnnnnnnnnnnnnnnnnnnnnnnnnnnnnnnnnnnnnnnnnnnnnnnnnnnnnnnnnnnnnnnnnnnnnnnnnnnnnnnnnnnnnnnnnnnnnnnnnnnnnnnnnnnnnnnnnnnnnnnnnnnnnnnnnnnnnnnnnnnnnnnnnnnnnnnnnnnnnnnnnnnnnnnnnnnnnnnnnnnnnnnnnnnnnnnnnnnnnnnnnnnnnnnnnnnnnnnnnnnnnnnnnnnnnnnnnnnnnnnnnnnnnnnnnnnnnnnnnnnnnnnnnnnnnnnnnnnnnnnnnnnnnnnnnnnnnnnnnnnnnnnnnnnnnnnnnnnnnnnnnnnnnnnnnnnnnnnnnnnnnnnnnnnnnnnnnnnnnnnnnnnnnnnnnnnnnnnnnnnnnnnnnnnnnnnnnnnnnnnnnnnnnnnnnnnnnnnnnnnnnnnnnnnnnnnnnnnnnnnnnnnnnnnnnnnnnnnnnnnnnnnnnnnnnnnnnnnnnnnnnnnnnnnnnnnnnnnnnnnnnnnnnnnnnnnnnnnnnnnnnnnnnnnnnnnnnnnnnnnnnnnnnnnnnnnnnnnnnnnnnnnnnnnnnnnnnnnnnnnnnnnnnnnnnnnnnnnnnnnnnnnnnnnnnnnnnnnnnnnnnnnnnnnnnnnnnnnnnnnnnnnnnnnnnnnnnnnnnnnnnnnnnnnnnnnnnnnnnnnnnnnnnnnnnnnnnnnnnnnnnnnnnnnnnnnnnnnnnnnnnnnnnnnnnnnnnnnnnnnnnnnnnnnnnnnnnnnnnnnnnnnnnnnnnnnnnnnnnnnnnnnnnnnnnnnnnnnnnnnnnnnnnnnnnnnnnnnnnnnnnnnnnnnnnnnnnnnnnnnnnnnnnnnnnnnnnnnnnnnnnnnnnnnnnnnnnnnnnnnnnnnnnnnnnnnnnnnnnnnnnnnnnnnnnnnnnnnnnnnnnnnnnnnnnnnnnnnnnnnnnnnnnnnnnnnnnnnnnnnnnnnnnnnnnnnnnnnnnnnnnnnnnnnnnnnnnnnnnnnnnnnnnnnnnnnnnnnnnnnnnnnnnnnnnnnnnnnnnnnnnnnnnnnnnnnnnnnnnnnnnnnnnnnnnnnnnnnnnnnnnnnnnnnnnnnnnnnnnnnnnnnnnnnnnnnnnnnnnnnnnnnnnnnnnnnnnnnnnnnnnnnnnnnnnnnnnnnnnnnnnnnnnnnnnnnnnnnnnnnnnnnnnnnnnnnnnnnnnnnnnnnnnnnnnnnnnnnnnnnnnnnnnnnnnnnnnnnnnnnnnnnnnnnnnnnnnnnnnnnnnnnnnnnnnnnnnnnnnnnnnnnnnnnnnnnnnnnnnnnnnnnnnnnnnnnnnnnnnnnnnnnnnnnnnnnnnnnnnnnnnnnnnnnnnnnnnnnnnnnnnnnnnnnnnnnnnnnnnnnnnnnnnnnnnnnnnnnnnnnnnnnnnnnnnnnnnnnnnnnnnnnnnnnnnnnnnnnnnnnnnnnnnnnnnnnnnnnnnnnnnnnnnnnnnnnnnnnnnnnnnnnnnnnnnnnnnnnnnnnnnnnnnnnnnnnnnnnnnnnnnnnnnnnnnnnnnnnnnnnnnnnnnnnnnnnnnnnnnnnnnnnnnnnnnnnnnnnnnnnnnnnnnnnnnnnnnnnnnnnnnnnnnnnnnnnnnnnnnnnnnnnnnnnnnnnnnnnnnnnnnnnnnnnnnnnnnnnnnnnnnnnnnnnnnnnnnnnnnnnnnnnnnnnnnnnnnnnnnnnnnnnnnnnnnnnnnnnnnnnnnnnnnnnnnnnnnnnnnnnnnnnnnnnnnnnnnnnnnnnnnnnnnnnnnnnnnnnnnnnnnnnnnnnnnnnnnnnnnnnnnnnnnnnnnnnnnnnnnnnnnnnnnnnnnnnnnnnnnnnnnnnnnnnnnnnnnnnnnnnnnnnnnnnnnnnnnnnnnnnnnnnnnnnnnnnnnnnnnnnnnnnnnnnnnnnnnnnnnnnnnnnnnnnnnnnnnnnnnnnnnnnnnnnnnnnnnnnnnnnnnnnnnnnnnnnnnnnnnnnnnnnnnnnnnnnnnnnnnnnnnnnnnnnnnnnnnnnnnnnnnnnnnnnnnnnnnnnnnnnnnnnnnnnnnnnnnnnnnnnnnnnnnnnnnnnnnnnnnnnnnnnnnnnnnnnnnnnnnnnnnnnnnnnnnnnnnnnnnnnnnnnnnnnnnnnnnnnnnnnnnnnnnnnnnnnnnnnnnnnnnnnnnnnnnnnnnnnnnnnnnnnnnnnnnnnnnnnnnnnnnnnnnnnnnnnnnnnnnnnnnnnnnnnnnnnnnnnnnnnnnnnnnnnnnnnnnnnnnnnnnnnnnnnnnnnnnnnnnnnnnnnnnnnnnnnnnnnnnnnnnnnnnnnnnnnnnnnnnnnnnnnnnnnnnnnnnnnnnnnnnnnnnnnnnnnnnnnnnnnnnnnnnnnnnnnnnnnnnnnnnnnnnnnnnnnnnnnnnnnnnnnnnnnnnnnnnnnnnnnnnnnnnnnnngtgtgtcactggtgtaccagaaaactgcaaaccctggtctgtgagggtctgaagagagagtcctcagcagagtcttcctgtgctgcatttgggcttccatggagcagg

SEQ ID NO: 26217 - DNA, 568 bp, Macaca Mulatta
ggaaactgaacactgagatctgactgtgtcacctgccccgtagagaatgtgtgtagatacttcctgccctaactctgcccaccctcctgtaccgtcgacaagaatgtcccttaggtcgcgctcttgcacacacggttttggcagctgacttggttctgaagccatgtagccacccaactttgtcattttcaacaacatcagaaataattcctcagaatcccaaataagcttgagtcctatcttctgtatattactaagggcttttatttattctcagttaatcagggcctgaacaattaaaagaaagaagattctatagcactggaaagcagatcacccccaggagttaacagatgtacagcagattaatttaagggatagtagcgcacacacgatccttctatctgaaatcagtccctagttgggaaacctctttcaaacacaaaatgaaatgaaatgtgtacagcttgcagtgttctgactgtacccttccctcttccatgtctcagaatctctgtgtattttaagaatgtgtgaggagagggtggcaattcatgtttcaatgagc

SEQ ID NO: 26218 - DNA, 451 bp, Macaca Mulatta
tcagcgctggccaggtgtgcccagggtgggtgtcaaccctcctcagggccaggtgtgcccatggatgggtgtcagccctccttggtgcctgcagttctgctgcccctagatgcccccaggaaagctctgtgcaccaccggctcctattccagccacacttgggctcctccttaattctacctacagcgccctctatgggcctcagcaagagctgccgccgactgaccagccagcgatctcctcccactgcctgcatcttcaggtgtcttggttaagggactgagagaggagctctcaggggtccctcctgtaaaccactgtagtcaccaaggagaaatctaatctgttaatggaggcctagaccctcgtgaagaccacccatgtattcaaaaatataaatagccactttcttagggaggtctgcaggtgtgcagatggggagcaaacctgc

SEQ ID NO: 26219 - DNA, 606 bp, Macaca Mulatta
ataatagctttcaaaaatctcagtccatggctgtgcagttttcctgttgggaaggagagcgcagtctgccccagagcagaaagaaagcaatgtaatatatgatatatattcatgcttaatattaatgcaaaaccacaaaaacaaaagatttgtttcttaacctatcagcctagtaactgcttaaatttttaaagtcacagaagtaatggacaaattttcccagagtggaaacagtcacaaataagcttgctctggtgtatgtcccacatcatacccctccaaatgccatacccgtcttcaaactgacccaggcagacacatgccaaaaagccattttgcctctgcttcaagagggctgtgtggtatgggaaggggtagtggaaacggggacaggtggagagacgagaagggagtgactaaagagacagacatttcagaggccaaggattgagaatgtaggtaaccccagctcaaccctcacatctcaaggccacaactgtacctctctgagccctcttgcttctgtgcttcaacaatgtcccactcaccctccaccaccacccagaaatggccaacgtggttttctcattatattgccaatatgca

SEQ ID NO: 26220 - DNA, 463 bp, Macaca Mulatta
aggggagcagatacctgcagagaagagcaaccaggtcccgatgagtggcgagctgccctacaaagagctgtgcttgtgtcttatcaagacaccttggcaaagagatggctggttctgggtggtcctggacaaggccgcacccaagggccctccaagccttaatggcacccttaagcctccatgcccaggccaaaagatgctttttctccgtaagttctcctctttgtgtctttgtaaagattctctgttctggggagaaacttttggttcaacttcaattagaagctttatctcagtggggaaagtatttgtccatccacgcaaagggtcctggacatccgaaccccagccagcccctgtgcacacccctgtatcctcagatcttggtgtcagggcccagccagccaccttcaggaccctggtcagctccgcaagccagcagcctcccaggtcaggaagggaa

SEQ ID NO: 26221 - DNA, 118 bp, Macaca Mulatta
gatcttctacgcattcagccagcaccaaacaacggaacccgtggtagtttaaaccatcttctgaaggtgcctttttatgagccatcccatgcagaggaggtgtcaaagttttctgttt

SEQ ID NO: 26222 - DNA, 2412 bp, Macaca Mulatta
  misc_feature (1)...(2412): n = A,T,C or G
actttcattcttaattaggtcaagaccgtgtgagccaggaaaggtctgtgtttatgcaaagctagtaatactgttgcctactatctcttctgtggtgccatctacatttttgggactcgggaattatgnnnagaggtggaggtggagccggaggtcagaggtcctgaaatagtcaccatgggggaaaatgatccgcctgccgctgaagcccccttctcattccgatcgctttttggccttgatgatttgaaaataagtcctgttgcaccagnnnnnnnnnnnnnnnnnnnnnnnnnnnnnnnnnnnnnnnnnnnnnnnnnnnnnnnnnnnnnnnnnnnnnnnnnnnnnnnnnnnnnnnnnnnnnnnnnnnnnnnnnnnnnnntccacttcgactgctctgggaagtacaggtgtcgctcatcctttaagtgtgttgagctgacagctcgatgtgacggagtctcagattgcagagacggggaggacgagtaccgctgtnnnnnnnnnnnnnnnnnnnnnnnnnnnnnnnnnnnnnnnnnnnnnnnnnnnnnnnnnnnnnnnnnnnnnnnnnnnnnnnnnnnnnnnnnnnnnnnnnnnnnnnnnnnnnnnnnnnnnnnnnnnnnnnnnnnnnnnnnnnnnnnnnnnnnnnnnnnnnnnnnnnnnnnnnnnnnnnnnnnnnnnnnnnnnnnnnnnnnnnnnnnnnnnnnnnnnnnnnnnnnnnnnnnnnnnnnnnnnnnnnnnnnnnnnnnnnnnnnnnnnnnnnnnnnnnnnnnnnnnnnnnnnnnnnnnnnnnnnnnnnnnnnnnnnnnnnnnnnnnnnnnnnnnnnnnnnnnnnnnnnnnnnnnnnnnnnnnnnnnnnnnnnnnnnnnnnnnnnnnnnnnnnnnnnnnnnnnnnnnnnnnnnnnnnnnnnnnnnnnnnnnnnnnnnnnnnnnnnnnnnnnnnnnnnnnnnnnnnnnnnnnnnnnnnnnnnnnnnnnnnnnnnnnnnnnnnnnnnnnnnnnnnnnnnnnnnnnnnnnnnnnnnnnnnnnnnnnnnnnnnnnnnnnnnnnnnnnnnnnnnnnnnnnnnnnnnnnnnnnnnnnnnnnnnnnnnnnnnnnnnnnnnnnnnnnnnnnnnnnnnnnnnnnnnnnnnnnnnnnnnnnnnnnnnnnnnnnnnnnnnnnnnnnnnnnnnnnnnnnnnnnnnnnnnnnnnnnnnnnnnnnnnnnnnnnnnnnnnnnnnnnnnnnnnnnnnnnnnnnnnnnnnnnnnnnnnnnnnnnnnnnnnnnnnnnnnnnnnnnnnnnnnnnnnnnnnnnnnnnnnnnnnnnnnnnnnnnnnnnnnnnnnnnnnnnnnnnnnnnnnnnnnnnnnnnnnnnnnnnnnnnnnnnnnnnnnnnnnnnnnnnnnnnnnnnnnnnnnnnnnnnnnnnnnnnnnnnnnnnnnnnnnnnnnnnnnnnnnnnnnnnnnnnnnnnnnnnnnnnnnnnnnnnnnnnnnnnnnnnnnnnnnnnnnnnnnnnnnnnnnnnnnnnnnnnnnnnnnnnnnnnnnnnnnnnnnnnnnnnnnnnnnnnnnnnnnnnnnnnnnnnnnnnnnnnnnnnnnnnnnnnnnnnnnnnnnnnnnnnnnnnnnnnnnnnnnnnnnnnnnnnnnnnnnnnnnnnnnnnnnnnnnnnnnnnnnnnnnnnnnnnnnnnnnnnnnnnnnnnnnnnnnnnnnnnnnnnnnnnnnnnnnnnnnnnnnnnnnnnnnnnnnnnnnnnnnnnnnnnnnnnnnnnnnnnnnnnnnnnnnnnnnnnnnnnnnnnnnnnnnnnnnnnnnnnnnnnnnnnnnnnnnnnnnnnnnnnnnnnnnnnnnnnnnnnnnnnnnnnnnnnnnnnnnnnnnnnnnnnnnnnnnnnnnnnnnnnnnnnnnnnnnnnnnnnnnnnnnnnnnnnnnnnnnnnnnnnnnnnnnnnnnnnnnnnnnnnnnnnnnnnnnnnnnnnnnnnnnnnnnnnnnnnnnnnnnnnnnnnnnnnnnnnnnnnnnnnggattacaggcatgggccaccacgcccagcctcatgctcctttctgatcggcactaagaacaaatcaagcagcaactcacaagtgtggtctttcccactggtccacttggttttctctccaggggtcttgcaaaattcctgatgagataagcagttatgtgacctcatgtgcaaagccaccaacagccactcagtaaagatgtaccggcccagaactgcgtaattgcggtcattgcacgtttttatccctagggaccagaaccaaacccaccctttctacttccaagacttgttttcacacgcggggaagttaatctatgaatgactcgtttaaggcatattttcatgatttctttgtagcatttggtgcttgatgtattcttgccctttgattccaaataatacgttttcttccctca

SEQ ID NO: 26223 - DNA, 3157 bp, Macaca Mulatta
  misc_feature (1)...(3157): n = A,T,C or G
ccgaagcagcccctttctcaggctttctgtcaccagtctgtctgtgttaggggagaggggagtgtgctctgtcctgaaggcccagagatggaaggacaagtggtaggccgggtgttcaggctcttcnnnnnnnnnnnnnnnnnnnnnnnnncaggaccgccacaggacaattcgggggaagctttaaaggaaccagaaaggaccgaggagcactctttgcccaactttgcnnnnnnnnnnnnnnnnnnnnnnnnnnnnnnnnnnnnnnnnnnnnnnnnnnnnnnnnnnnnnnnnnnnnnnnnnnnnnnnnnnnnnnnnnnnnnnnnnngcgggagaacctgcttcggggtcagcaggaggaggaggaacggctactcaaagctatccccttgttctgcttcccagacgggaatgagtgggcatcactcaccgagtatcccaggnagggagaccttctccttcgttctgaccaatgtggatgggagcagaaagattggatactgcaggcgcctcttggtctgtgcagctcagaactgccccttcctttctgcagtctgctcagctccatggctgggcttgctcaagccttagctgtaaaagtacaggcttgttggcagcaccagttgtagagaaagcacagcccaggaccttctgccatgctagtgctccctctgcagccccacaagcacgaggacctgatgccccttctccccctgctggtcaggctctggtctgtgctctccccggcttnnnnnnnnnnnnnncaactgactcctctccctgctgctctactcaggcctgcttaccttggaccctggagcctcccagagcagaggctgggatttggacaattagtttcaaatctcaagtctcaggaggattccccaagtcaccttcacagtgctctcctccttagccatttcttcatctctaaggcacacttgcttcccatatttgctgaccctagattgtgttggcactgaaggcggcagcacttgcccaccaaatcaatcagtaccctcaaggatttcttcttttnnnnnnggtggccactctgacctccctgctgcacccaccattccccataaattccccctccccagccctcagccttgtgctccttcataccagttgggagaaacccttggggaggctgcagcactgaagaagcctctctgtccctccccagcctgctggccctggccctcgccttcccaaagtgtactgcatcatcagttgcatcggctgcttcggcttgttctccaaggtagggatggaacaggattcctcagggcctgtttgtcctgcccatcttccaggctctctctggctgccaaccctgcctgtgcaacctaagtccttagtggagctcttctcccatagccagaaccagctttaaagtacacttgggaaaactgaggcaaaggggcatgcacttgacttaagggaaaagtggaaattgaatctaggggactggactccttgcagagacagctactgttcccgctctagccaggtaagaaagtagttgaagtaggacaaggggaagaaacttctgccccgagtttcaatttcctcatctgtcaaatggatataataatctcaccttcctatctcactgggtggtgtgaggtataaatgaggtgatatatgggaagacttgttataaaaggcagagcactaaacaaatatgaaggagttataagacccattctgactccttcaagggtagaagaacagttgaggtccccaggacttctgctggagctaatttgagtgccagtgcatctgagtcaggatttgagcagaatccatgggggccatgccatccattggtgaccagaaagtacttcattatgctctgaccccagcaggacctttggaggaggaagggaggaaactctgtcagtctttgcttgggtaaagaattcctttgtgcagtgttcctagggatggaggcagtctctgaccccgggaatctatagtgggagttggaggacacagagtggtaccaagaggcttaggcttctagcctcctgctgcaaccagcatgagtggacatggtaccatcatgggtggtgagtttactccgggatgacttcccagggaggtgcttttatgttggtgttaggagaggggaagaatgtggactggtagagagataataaaaaggaagctggaaaaaagcaggtcttacatgggaaataaactgcagattatttagcatgagcccagcctctgccagggagggagagaccagttcgtggagggccctagaagatacatgaggaccagctggaccagtatgggaacattatgatgctcaggggcatgtagagtctctgccacctgcccgatagtgtccctttgagctgtgcctcccgtggttcttttctctgcagatcctggatgaagtggagaagagacatcagatctccatggctgtcatctacccgttcatgcagggcctccgagaggcagccttccctgctcctgggaagactgtcactctcaagagcttcatccccgactcaggcactgaggnngttaaagtacagagaaactgagccagatggggactaggacttggttagaatgaacaaagttgaaatcaagcccaaattttctgatccttctaacttgatacccacaagcacctagttactgctcaagccaccaagacttttatttataataaacaaaccatgtaagttgaggcttctggtgctataaagggcttttccctcagcccccagactgccagttgcccccacccccactccactctcctttgtttgtcctgtctctaccttacagcctccatctgtccatttcttatcatccatccccacccccgagtctccacccatgcatgggggaatgctgttgttttaaggcaccaagcacactgaggcagcaggtagaacactgttctaagaattccagtcctgacccctggaactctgaatagtctctgtgcccgtttaaacttggcttccccacaggaaaataaggggagaggctagaaactttcactttctagaaaaattagtactgaatgcttgctgtgtgccaaactataccattttctgggaatacagtagtgaccaaaatgaatgtggtccctgaccttttggagctataagtccactgggga

SEQ ID NO: 26224 - DNA, 507 bp, Macaca Mulatta
tttcctgtgatcttcagcaaagcctccgagtacttgcagctggtctttggcatcgaggtgatggaagtggtccccatcagccacttgtacatccttgtcacctgcctgggcctctcctacaatggcctgctgggcgaaaatcaaatcatgcccacaacagacctcctgataatcatcctggccacagtagcaatagagggagacggtgcccctgaggagaaagtctgggaggagctgagtgtgttggagctgtctggcaggagggaggacagtgtcttagcaaatcccagtaagctgctcacccaagtattggtgcaggaaaattacctagagtaccggcgggtgcccttcagtgatcatgcatgctacgagttcctgtggggtccaagggccctcgttgaaaccaactatgtgaaagtcctgtaccatatgctaaagatcactggagagcctcgaatttcctacccacccctgcatgaatgggcttggagagagggggaagagtga

SEQ ID NO: 26225 - DNA, 672 bp, Macaca Mulatta
aagtcctgttcctcccagccccccacctcccagctttcaaagctaataatatgacttgccttaaatattaaattaaaagacctttaaagagaggtaaactgcttctggcaaaatgtgatagtgatagttctggcctaaaaaacaggagcatgccaaacacaaatttctgttcactatatataaaaattctcttagttatgaccagaaatactcagccaatgactgaataatagaaacttatgttttgagtggaattgtgctaatattttatgcatccctttgctttgatatggcttttttcaaatccaggttcccatcctgaaattgctgaccgagctttcatttattttcataccatttttcctctgtctagcacgtactgaaaaagcttctggctataacagaactgcttcaacaaaaacaaaaccagtatacaaaaaccaatgatgtcaggtagcagccttcgccccagtgttctgcatggattcatcatgcccaacatggtaattcacttcagtataatatctcctttgctcttgccaaaaaatagcacacttttccacattccaatgatgtgtgagctatgcaaacaaaatccaagattctgctagtgcataactatgccagcaaccttgtaagctatctgtgcaggatatttgcactatttccaca

SEQ ID NO: 26226 - DNA, 1104 bp, Macaca Mulatta
  misc_feature (1)...(1104): n = A,T,C or G
gtctgagctcagcgatggcatcgccattctcgtgggcagcaacgatcgagtccagggagtgatcagccagctggaagacacctgcaaaaccatcgaggnnnnnnnnnnnnnnnnnnnnnnnnnnnnnnnnnnnnnnnnnnntacctgtacggcatttcgtatgagaggaagaatgaaatgacccaagtcattacccgaactcaaggggagaaactggaacacgtccgtgctctgatcaagaagtattctgatcatttggagaacgtctcaaagttggttgagtcaggaattcagttcatggatgagccagaaatggcagtgtttctgcagnnnnnnnnnnnnnnnnnnnnnnnnnnnnnnnnnnnnnnnnnnnnnnnnnnnnnnnnnnnnnnnnnnnnnnnnnnnnnnnnnnnnnnnnnnnnnnnnnnnnnnnnnnnnnnnnnnnnnnnnnnnnnnnnnnnnnnnnnnnnnnnnnnnnnnnnnnnnnnnnnnnnnnnnnnnnnnnnnnnnnnnnnnnnnnnnnnnnnnnnnnnnnnnnnnnnnnnnnnnnnnnnnnnnnnnnnnnnnnnnnnnnnnnnnnnnnnnnnnnnnnnnnnnnnnnnnnnnnnnnnnnnnnnnnnnnnnnnnnnnnnnnnnnnnnnnnnnnnnnnnnnnnnnnnnnnnnnnnnnnnnnnnnnnnnnnnnnnnnnnnnnnnnnnnnnnnnnnnnnnnnnnnnnnnnnnnnnnnnnnnnnnnnnnnnnnnnnnnnnnnnnnnnnnnnnnnnnnnnnnnnnnnnnnnnnnnnnnnnnnnnnnnnnnnnnnnnnnnnnnnnnnnnnnnnnnnnnnnnnnnnnnnnnnnnnnnnnnnnnnnnnnnnnnnnnnnnnnnnnnnnnnnnnnnnnnnnnnnnnnnnnnnnnnnnnnnnnnnnnnnnnnnnnnnnnnnnnnnnnnnnnnnnnnnnnnnnnnnnnnnnnnnnnnnnnnnnnnnnnnnnnnnnnnnnnnnnnnnnnnnnnnnnnnnnnnnnnnnnnnnnnnaggagttagtaatctgcctagcgcttttggcttttcttatacttcactacatctggagtcagattcagtgcttgatttttactttaatgg

SEQ ID NO: 26227 - DNA, 212 bp, Macaca Mulatta
  misc_feature (1)...(212): n = A,T,C or G
agctgtctctgccctactccagaccgccccaaagactctgtgggatgaacctgagtcagccgaatcccagccccttcccttgggcctgccgtggcgcgggacatcagtgacaggcggaagcagcggaccatcnnnnnnnnggaggcccggggcgcttgcgaagatgaagtttggcagcctctccttccggcagccttatgctggccttgtct

SEQ ID NO: 26228 - DNA, 911 bp, Macaca Mulatta
ttcctggctaacagcagcgaggcgctggagagagccgtgcgctgctgcacccaggcgtccgtagtgaccgacgacggcttcgcggagggaggcccggacgagcgcagcctgtacataatgcgcgtggtgcagatcgccgttatgtgcgtgctctcactcaccgtggtcttcggcatcttcttcctcggctgcaatctgctgatcaagtccgagggcatgatcaacttcctcgtgaaggaccggagaccgtctaaggaggtggaggcagtggtcgtggggccctactgacccgcccctccgcccccgcggcaaccgctcccacgcctgcccactttgccagcccggctgtgcccctcactgtcagagactgggcgaagcaaacctgtcggagtcaattatttctctcgacttcggcctttcggaaagaagcgaccggtttctccctcgccctctgaaagtcctcatgcctggcagtcggaggagagcgcccggacttctggactcagcagaaagtggcaagaagaaggcgattagggcgcagaactttggaagctgctacttacttggaatgcggggagaacgacggggcgaaggcccttctccacccgcaggtgggccaagctctgggggcaagtggagagggagggcaggggagagacccagcggcactgatcgccttgtgaccggaaaagtgacctgttaaaagccacgcagcagacatcatggggtctcacaaatccgtgtccgggtgtgctcccactcttctcctgctccccaccagccctggaggggagaggcgataaatacctttgattgtaacgtgctgttttaagaggttttgtgtttgtttgcttgaatacaaatatttgataagtctttttctgcccccagtggcctgtttgcctgcctga

SEQ ID NO: 26229 - DNA, 1035 bp, Macaca Mulatta
  misc_feature (1)...(1035): n = A,T,C or G
atttcatctgggcttcttaaatctaagtctttaaaatgactaagttttcttccttttctctgtttttcctaatagctggggctnnnnnnnnnnnnnnnnnnnnnnnnnnnnnnnnnnnnnnnnnnnnnnnnnnnnnnnnnnnnnnnnnnnnnnnnnnnnnnnnnnnnnnnnnnnnnnnnnnnnnnnnnnnnnnnnnnnnnnnnnnnnnnnnnnnnnnnnnnnnnnnnnnnnnnnnnnnnnnnnnnnnnnnnnnnnnnnnnnnnnnnnnnnnnnnnnnnnnnnnnnnnnnnnnnnnnnnnnnnnnnnnnnnnnnnnnnnnnnnnnnnnnnnnnnnnnnnnnnnnnnnnnnnnnnnnnnnnnnnnnnnnnnnnnnnnnnnnnnnnnnnnnnnnnnnnngcttcaaacagccgcaaaactcaataaacatgtcaagctgctccacgtaagatccaaaacctatcttagatctggaaccaaatgcgaggttactggctggggagccaccaacccagatttcttaagaccttctgataccctgcgagaagtcactgttactgtcctaagtcgaaaactttgcaacagccaaagttactacaatcacgacccttttatcaccaaagacatggtctgtgcaggagatgccaaaggnnnnnnnnnnnnnnnnnagggtgattcagggggccccttgatttgtaaaggtgtcttccatgccatagtctctggaggtcatgaatgtggtgtcgccaaaaagcctggaatctacaccctgctaaacaagaaataccagacttggatcaaaagcaaccttgccccacctcatacaaattaagttacaaatgattttcttggatgcacttgcttcttttttcctaatatgctcacaggttagagttggatgtaagtaaagcagaacacaagatggggtccatttttgtacttgtaagtcattttattaaggaatcaagttctttttctcttgtatcactgatgtatttctaccatgctggttttattctaaataaaatttagaagact

SEQ ID NO: 26230 - DNA, 567 bp, Macaca Mulatta
ctcctgacaggctggcctagggaaggtgaaaatgaagtctctgtgagaatacctttcccagctatcaatgagcacaacatttcaatagagaagaaatagaatcttccccatgtacatgctgttgatttcaggtctttgttataattcatataggcttgtgaatatagcacttattttaatccagtagagacttccataaagatcctaaacagatgcattgttgcttttctgtgctctctctgcggattaaaacataataattacactgaaggattgtctccatacctatccattcaaaatagaactctcatatgtgtttccttgtgcacttaatctacaccttgaagtagaactggattatcagttggaaagtgtttccacagtttagcattctcagattaaacgtgcatgtggtaaatgtgtttgctgcctctttgctcttgttgcatctgtatattataaatgactgagttctggtttatttgagaaacttttttttctgcacctatttctcattggtgaatgctgtcttgcattagcaatgatgctctgcttcaaaagaaaaaa

SEQ ID NO: 26231 - DNA, 91 bp, Macaca Mulatta
tgttgtatgcctttaaatctgtgatgatcctcatgtggcccagtatcaagttgtgcttgtttacagcactactctctgccagccacacaaa

SEQ ID NO: 26232 - DNA, 1022 bp, Macaca Mulatta
ggggcccccctgcccgccttctcccgccgccgccgccttccgcaggccgtttccaccgaggaaaaggaatcgtatcgtatgtccgctatccagaacctccactctttcgacccctttgctgatgcaagtaagggtgatgacctgcttcctgctggcactgaggattatatccatataagaattcaacagagaaacggcaggaagacccttactactgtccaagggatcgctgatgattacgataaaaagaaactagtgaaggcgtttaagaagaagtttgcctgcaatggtactgtaattgagcatccagaatatggagaagtaattcagctacagggtgaccaacgcaagaacatatgccagttcctcgtagagattggactggctaaggacgatcagctgaaggttcatgggttttaagtgcttgtggctcactgaagcttaagtgaggatttccttgcaatgagtagaatttcccttctgtcccttgtcacaagtttaaaaacctcacagcttgtataatgtaaccatttggggtccgcttttaacttggactagtgtaactccttcatgcaataaactgaaaagagccatgctgtctagtcttgaagtccctcatttaaacagaggtcaagcagtaggcgcctggcagtgtcaagcctgaaaccaagcaataccggcatgtttcagccaagcccagagccctaagatcacaaacaactatggccggaacctcctcgggtctccctctgcagagttccttggccttacggaatgttaccaccctgaaccgtcctcggtgaaaccgaaaagagaggaatggggtgaggcaacacccccaagctgtactactggggaagggagcctttgggtggggaaaatccccctgggtgttctcccaacctggaccaaggtggggaacaaagacctcaaaaaagggccccacctttaatcccttaagccggagggtggaatagggacaattcctgggctttggacaaccaaaaacacatcttttttta

SEQ ID NO: 26233 - DNA, 762 bp, Macaca Mulatta
tctggaggctccgcgcgcagccctcgcggtagatgttgcctgtttgcagggaccgcgcagatgtctgtactgtgtctggaccgcgccagctgtccaagcctgctgagctggggcaagatcaccttatccaggattgtggagtcgttggtcgctgacaagttgtagcaggagcagggcacgcggtgcgcctccgacccgttacctctcagggtgaggacctggaaccagtcctgcggggagtgccagccgcaacagcgcagctggaactgcacatagtcccagctctcctcggccgcggtctcctcggggttggtgtggtacctttggatggttttctctacgatgtcctgcaagcttcgctccagctgggcccgctgagtggagatgaggattcccagcgttatctgtgtggcaaacaggagcagcagcatcccaaaatacaggcccaggaggcagcggagctccttgagggcccccacacaacccaggagggcgaggcccatggtgaagactccagagatggccaggactttggaccagatctgcaggggcacgaaggccaagcccacaaaggacacgaagctggtcttgtcgatgaggatccagatgccgaagcagaagatcaggctgcccaggacgaagaagaagaggttgaaaacgaagaggaagtatctgctgaggctgaggcagctctcctgggccgacatcttcacctagaggggtgagcggtccactcaccacacagaagaggtgctgacagta

SEQ ID NO: 26234 - DNA, 1177 bp, Macaca Mulatta
  misc_feature (1)...(1177): n = A,T,C or G
ggagagtcgggggccggtaagacggttaacaccaagcgggtcattcagtactttgccatcgtcgctgccctnnnnnnnnnnnnnnnnnnnnnnnnnnnnnnnnnnnnnnnnnnnnnnnnnnnnnnnnnnnnnnnnnnnnnnnggcaagtttatccgcattcactttggtccctctgggaagctggcatctgcggatattgacagctnnnnnnnnnnnnnnnnnnnnnnnnnnnnnnnnnnnnnnnnnnnnnnnnnnnnnnnnnnnnnnnnnnnnnnnnnnnnnnnnnnnnnnnnnnnnnnnnnngacatgctgcttctgtctatgaacccctatgacnnnnnnnnnnnnnnnnnnnnntcatcacagtggacaacatgaatgatggggaggagctcatcgccannnncatgccatggacatcctgggcttcagtgtgggtgggaagaatgcctgctataagatcgtgggtgccnnnnnnnnnnnnnnnnnnnnnnnnnnnnnnnnnnnnnnnnnnnnnnnnnnnnnnnnnnnnnnnnnnnnnnnnnnnnnnnnnnnnnnnnnnnnnnnnnnnnnnnnnnnnnnnnnnnnnnnnnnnnnnnnnnnnnnnnnnnnnnnnnnnnnnnnnnnnnnnnnnnnnnnnnnnnnnnnnnnnnnnnnnnnnnnnnnnnnnnnnnnnnnnnnnnnnnnnnnnnnnnnnnnnnnnnnnnnnnnnnnnnnnnnnnnnnnnnnnnnnnnnnnnnnnnnnnnnnnnnnnnnnnnnnnnnnnnnnnnnnnnnnnnnnnnnnnnnnnnnnnnnnnnnnnnnnnnnnnnagttcaacagcttcgaacagctgtgtatcaacttcaccaatgagaaactgcagcagttcttcaaccagcacatgtttgtgctggagcaggaggagtacaagcgggagggcatcgactgggtcttcatcgacttcggcctcgacctgcagccttgcatcgacctcatcgagaannnnntgagnagccactgggcatcctgtccatcctggaggaggaatgcatgttccccaaggcctcagatgccagcttccgggccaagctctacgacaaccacgcggggaagtcacccaatttccagcagcctcggcctgacaagaagcgcaagtaccaggcccacttcgaggtggtccactacgcgggcgtgg

SEQ ID NO: 26235 - DNA, 574 bp, Macaca Mulatta
  misc_feature (1)...(574): n = A,T,C or G
ctggggcagatggagccccagcccaagcacggggctgggagggcgtgaggagctctcctgcggcctgctcctcacccattccgacaggagcacggcacatctgaacgctgtagaaacaggccagccgctcaggcacttggtctccacctcagggtcataagcggggagagagagtgcccttcccagggcatccaggcaggtgcagggaggtgcagagcttgtggaaagcatgtgagtgagggcgacaggaaaggctccgggggtggggtgaagtggagctaggtcttgccaactccatcttcaataaagtcattttcggatcnnnnnnnnnnnnnnnnnnnnnnnnnnncgtgccgaattcggcacgaggaaacagcccatcctctgcaagtccatctatgttgttcttaagcattctatctttgctcaaattgttgaaggatggtgatttgtttcatggtttcggtatttgagtctaatgcacgttctaacatgatagaggcaatgcattattgtgtagccacggttttctggaaacgttgatatttcaggaattgtatctcagatcttaaat

SEQ ID NO: 26236 - DNA, 1079 bp, Macaca Mulatta
  misc_feature (1)...(1079): n = A,T,C or G
aggttaaataccgagaaaatttcgataaagaaaagggcaagacaccaaaatacaatccaaaagacagccagctctacaaagtcatgaaagatgctaataatcttgcaagtgaggnnnnnnnnnnnnnnnnnnnnnnnnnnnnnnnnnnnnnnnnnnnnnnnnnnnnnnnnnnnnnnnnnnnnnnnnnnnnnnnnnnnnnnnnnnnnnnnnnnnnnnnnnnnnnnnnnnnnnnnnnnnnnnnnnnnnnnnnnnnnnnnnnnnnnnnnnnnnnnnnnnnnnnnnnnnnnnnnnnnnnnnnnnnnnnnnnnnnnnnnnnnnnnnnnnnnnnnnnnnnnnnnnnnnnnnnnnnnnnnnnnnnnnnnnnnnnnnnnnnnnnnnnnnnnnnnnnnnnnnnnnnnnnnnnnnnnnnnnnnnnnnnnnnnnnnnnnnnnnnnnnnnnnnnnnnnnnnnnnnnnnnnnnnnnnnnnnnnnnnnnnnnnnnnnnnnnnnnnnnnnnnnnnnnnnnnnnnnnnnnnnnnnnnnnnnnnnnnnnnnnnnnnnnnnnnnnnnnnnnnnnnnnnnnnnnnnnnnnnnnnnnnnnnnnnnnnnnnnnnnnnnnnnnnnnnnnnnnnnnnnnnnnnnnnnnnnnnnnnnnnnnnnnnnnnnnnnnnnnnnnnnnnnnnnnnnnnnnnnnnnnnnnnnnnnnnnnnnnnnnnnnnnnnnnnnnnnnnnnnnnnnnnnnnnnnnnnnnnnnnnnnnnnnnnnnnnnnnnnnnnnnnnnnnnnnnnnnnnnnnnnnnnnnnnnnnnnnnnnnnnnnnnnnnnnnnnnnnnnnnnnnnnnnnnnnnnnnnnnnnnnnnnnnnnnnnnnnnnnnnnnnnnnnnnnnnnnnnnnnnnnnnnnnnnnnnnnnnnnnnnnnnnnnnnnnnnnnnnnnnnnnnnnnnnnnnnnnnnnnnnnnnnnnnnnnnnnnnnnnnnnnnnnnnnnnnnnnnnnnctccaataccagtgtgaccttaaaaacagtaaaggaaaaattacagttgttcaagacacgccagaaatactgcgtgtaaaagaaaatcaaaagaatttcagctcgg

SEQ ID NO: 26237 - DNA, 482 bp, Macaca Mulatta
tgattcttccaagcgcctgttctttccacctaacaggtgcgccctgctcaggctcactgagaacccgcatccctgaggtgtcccgggccatcccaactgcacccctgaggctgcctctggaagagcatctggctgctagagcagctgccctgcatccccctggtgacttagaccctttggaggctgcctgggggcgcccagagattgcctgtgttggttcacagaggatgtcacaatagccaccaataggcagtcccctagccccagagataccaagcccagccttgtctagcccccaggctcctggaatgggatcacacccttgcctcatccccagtgcttcctgccatccaccccttgaaacagattttctttccctgctccccactcatttctgcctggctgtgttcaccaaggagagattctcaccacaccttccccatctccctatccacgtttctagaaactcctaaggtcttaac

SEQ ID NO: 26238 - DNA, 145 bp, Macaca Mulatta
ggtcacccctggctcgacttgtgctgtctttggcctaggaggtgtgggtctttctgctgtaatgggttgtaaagctgcaggagcttccagaatcataggtattgacatcaacagtgagaagtttgcaaaggctaaagccctggga

SEQ ID NO: 26239 - DNA, 1086 bp, Macaca Mulatta
  misc_feature (1)...(1086): n = A,T,C or G
tcggcacgaggtaagatctctcctgattaccggacaccatctatgttctagccctcacctacgacagtgcgagactctggtggtattttggctgttacttttgtttgcccacacttttcaccatcacctgctctctagtgactgcgaggaaaatccgcaaagcagagaaagcctgtacccgagggaataagcggcagattcaactagagagccagatgaactgtacggtagtggcactgaccattttatatggattttgcattattcctgagaatatctgcaacattgttactgcctacatggctacaggggtttcgcagcagacaatggacctcctaaatatcatcagccagttccttttgttctttaagtcctgtgtcaccccagtcctccttttctgtctctgcaaacccttcagtcgggccttcatggagtgctgctgctgttgctgtgaggaatgcattcagaagtcttcaacggtgaccagtgatgacaatgacaacgagtacaccacagaactcgaactctcgcctttcagtaccatacgccgtgaaatgtccacttttgcttctgtcggaactcattgctgaaggacggtacttggttgggtcagatttatttgtttgattttcatatcccgtgaaagtttttaattcatatttttccttatagggaaaaatgcnnnnnnnnnnnnnnnnnnnnnnnnnnattaactactgtagaactgattttgcaaattaatatttgtgctttgaaaaaagtttctatttagttatttaagaaagaatgagaaggccaatagttttagatcattttatctggtatggtgctaatattttatttgaaaaaagttactgcaacttaacttaaaattgctaacgttttttcttcttttaaaaatacaattattgtatattgattatagccatgtgattttgtaggttattttatatttgagttgtgattgaaagtatgttgtatatggtattgtgagatgatttgtacttggaagcattcaccaaagtagcaccaaataaattacactttattctttaatgtcattgtcaatctacttttaaccaatat

SEQ ID NO: 26240 - DNA, 150 bp, Macaca Mulatta
aaaggcaggcagaacagccagaggagcagagaggcaaagaaacattgtgaaatctccatctcttacccttcaacatgaaagtctctgcagcgcttctgtgcctgctgcttataacagcagctttcaatccccagggacttgctcagccag

SEQ ID NO: 26241 - DNA, 837 bp, Macaca Mulatta
  misc_feature (1)...(837): n = A,T,C or G
ggcaaccaagcccaatcgaagggtccggaaacctgaacccctggatgagagtgacaatgacttctgaccctcttgccaagggaccctggcagattaaaaccctcagacttgtaggtaaatgggaacttagaaggttaggaaggtaacacctgttttgttcactaagctggctggactcatgattactgaagcaatacttatttctgcttcagcctcctatgtttgcattccatgaagcttaaataagaattgaaacaaatccctaagattttttttttcaccttatttatctcctaaaacttgaggaatgcatgtgttcttagtgattcacgtccacgggacaaaatctcaaggagaaataagagctgacgccacacaagtcttggctgcttttttactatacattttctccgagagtccagcagagttgaggctagaacttggcactggggactcatgttcggaatcatagggggacatctggctgttaatcacttgcacagttgagaacatttcctgtgcttcggcttttaattctagcccttatttcattttgtcatctttctttcttctgcatgttcacaatacccgacattaaatgtattttaaattactacaatttttcctgaaagaagcttaagctaaagttaaatggaaaactggggttttcctttgaaaatcagggcgataagagacagggcttccagaatgaggaatcccntccaattttccttttccaaaggctgaacatttccttcttgggggaagtcaaaagttccaacctggggggaattaacaagcccacccctttcaatgtgttttccaaccggctttggc

SEQ ID NO: 26242 - DNA, 99 bp, Macaca Mulatta
agcttcccattgaccggggtggaggtgaaggaaaggccatgtacattgacaccgagggtacctttaggccagaacgactgctggcagtggctgagaggt

SEQ ID NO: 26243 - DNA, 740 bp, Macaca Mulatta
  misc_feature (1)...(740): n = A,T,C or G
ggtatagtggctcaactctgcaatcccagcccgttgggagaccaaggtgggagtatcgcttgagctcaggagttcaaannnnnnnnnnnnnnnnnnncaaaacctggtctctgcataaaatttaaacgttactcagacgtggtggcacacgtctgtagtactagctactcaagaggctgaggcaggaagatcacttgagcccaggagttcaaagttacagtgagccatgatcacacactgcacttccagcctggcaacaaagaccctatctnnnnnnnnnnnnnnnnnnnngtatataaaaataagactaatttcacaaaccaaaaacaattacagaagagagggagatttaatgttgtccatagaaagacattaaatgtcagactgacaatttagttatggttacaaaccatgccatttggactatggaatttgaattacagaaaaacacaattttgagcgaagacagctttctatacatgtcacgtttcacatcataaacgatcnnnnnnnnnnnnnnnnnnnnnnnnnnnnnnnnnnnnnnnnnnnnnnnnnnnnnnnnnnnnnnnnnnnnnnnnnnnnnnnnnnnnnnnnnnnnnnnnnnnnnnnnnnnnnnnnnnnnnnnnnnnnnnnnnnnnnnnnnnnnnnnnnnnnnnnnnnnnnnnnnnnnnnnnnnnnnnnnnnnnnnnnnnnnnnnnnnnnnnnnnnnnnnnnnnnnnnnnnnnnnnnnnnnnnnnnnn

SEQ ID NO: 26244 - DNA, 1560 bp, Macaca Mulatta
  misc_feature (1)...(1560): n = A,T,C or G
aggacccgcgctctaccctggcggaggtgcaccggcagcggcgcgacctgctgagcagcgcctgtagccgccacacacgccggcagcgcctgctgcagccagaggacctgcggcacgtgctggtggacgacgcgcatggcctgctctactgctacgtgcccaaggtggcgtgcaccaactggaagcgcgtgctgctggcgctgagcggacaaacccgcggcgacccgcgcgccatccccgcgcacgaggcgcacgcgcccggccgcctgccctcgctggcagacttcagccccgctgagatcaaccggcgcctacgtgcctacttggccttcctgttcgtgcgagagcccttcgagcgcttggcgtccgcctatcgcaacaagctcgcgcgcccctacagcgctgccttccagaggcgctacnnnnnnnnnnnnnnnnnnnnnnnnnnnnnnnnnnnnnnnnnnnnncccgggcccgcggccacgacgtgcgcttcgcagagttcctggcttatctgctggacccgcgcacgcggcgcgacgagcccttcaacgagcactgggagcgtgcgcacgcgctctgccacccttgccgcctccgctacgacatcgtgggcaagttcgagacgctggcggaggacgcggccttcgtgctgggcctggcgggcgcacccggcctgagcttccccggaccaccgcggccccggggagccgccgcctcccgcgaactgggagtgcgcctcttccgggacatcagccccttctaccaacggcgcctcttcgacctctacaaaatggacttcctgctcttcaactactccaccccttcttacctgcggctgcactatcggtcctggagggcctgtggccccacagggcatgtgcctttccgacacgaaccccggggaatgcacgtgctgctggcccctggacccctcttcaagatacactgcgtgcactcacctnnnnnnnnnnnnnnnnnnnnnnnnnnnnnnnnnnnnnnnnnnnnnnnnnnnnnnnnnnnnnnnnnnnnnnnnnnnnnnnnnnnnnnnnnnnnnnnnnnnnnnnnnnnnnnnnnnnnnnnnnnnnnnnnnnnnnnnnnnnnnnnnnnnnnnnnnnnnnnnnnnnnnnnnnnnnnnnnnnnnnnnnnnnnnnnaaaggccattttggggggtcagccctgcccctgaacctgttcatggtgcatcagaacagaatgctgacaccagtgtccgtgtggcccgagcctgtgccctccccacctggcccactctggcaaggacaggtgtggccaaggacgaaagccctcccttggctggcctcacgatggggccatcccgggagccagctgggagctgccttccactgccatcgggcctcctctgctctcccatgcggctggccctgcccaggcaccgccttcggtctcagtctggcaagacgctgggtcttcaggctccatgccaacagagcccctggtgcaatgcagtcacaggttttatgggactttggtgagctgggcagtcatggttttgaaataaatgtattttgttactttctg

SEQ ID NO: 26245 - DNA, 342 bp, Macaca Mulatta
atgaaggggcccccaccaaccttctgcagcctcctgctcctgtcattgctcctgagcccagaccctacagcagcattcctactgccacccagcactgcctgctgtactcagctctaccgaaagccactctcagacaagctactgaggaaggtcatccgggtggaactgcaggaggctgatggggactgtcatctccaggctttcgtgcttcacctggctcaacgcagcatctgcatccacccccagaaccccagcctgtcacagtggtttgagcaccaagagagaaagctccatgggactctgcccaacctgaattttgggatgctaaggaaaatgggctga

SEQ ID NO: 26246 - DNA, 91 bp, Macaca Mulatta
gattccgttctatcgaggggagaggattacctttgatgtagcgccttccagacttgacttcacagtggagcacgacagcctgaaaatcgag

SEQ ID NO: 26247 - DNA, 695 bp, Macaca Mulatta
cggcacgagggcttcgcttaatatgcaagtttaatgccaccctcctctgtctgcaatggaccaacaaatgatgtatgctgagttaaccttacccaaggactcaggcccagaaagttcttcaccttcatctcttcctcgggatgtctgtcagggttcaccttggcatcaatttgccctgaaacttagctgtgctgggattattctccttgttttggttgttactgggttgagtctttcagtggcatccttactacagaaaccatcaataggaaaatgcagtgtggacattcaacagaacaggactaaaacaacagaaagaccagatctcttaaactgcccaatatattggaagcaagtccaagagaaatgcttgctattttctcacactgtcaacccttggaataacagtctagctgattgttccaccaaagaatccagtttgctgcttattcaagataaggatgaattgacacgcacacagaacttgatacatgacaaagcaatttcattttggattggattaaatttttcgttatcagagaagaactggaagtggataaatggctcttttctaagttctaatgagtgagtattagatgagctaattttaatattcaatttatatcaggtttacactgcaaaatggtaacactgaagattgacgtttgtagttttaattcggcttaaaaactctc

SEQ ID NO: 26248 - DNA, 812 bp, Macaca Mulatta
  misc_feature (1)...(812): n = A,T,C or G
ggtacactcatttnnnnnnnnnnnnnnnnnnnnnnnnnnnnnngagacggagtctcgctgnnnnnnnnnnnnnnnnnnnnnnnnnngcnnnnnnnnnnnnnnntaacctctacctcccaggttcaagcaattctttnnnnnnnnnnnnnnnnnnnnnnnnnnnnnnnnnnaacttaaaaggagtctagaaaatcaagcagaaaggaaaatggaagatggagcagatggtgctttttacccagatgaaatacaaaggccacctgtgagagtccctgcttggggactagaagacaatgttgtctgcagccagcctgctcgaaaccttagtcgacctgatggcttaaaggaccctgaggatagcaaagaagatgagaatgtgcctactgctcctgatcctccaagtcaacacttacgtgggcatgggaacagctttttgctttgattccagctttgatgttcacaagaagtgtcccctctgtgagttaatgtttcctccccaactacaatcagagcaaattttgaaaaaacatgttgaaagtcactggaaaggggtgcccccgaagtgccacggaacaatttccctcctggactaatgaccaagcagggtggtttgaaagggcatgtgccaaacccatttttgaatcagaaatggttccaaaatttttgacctagttcctttttttttttatgaatttaaaaaaggttttaaccggttctgacactaacattacatctagaaaattattaatccttgtttgggccgccctcgggcccctcgagaaagattttctagaaacactttccattttggg

SEQ ID NO: 26249 - DNA, 437 bp, Macaca Mulatta
cctcatcactcagagagatgccaaaatggccggtgaattgattaaaattctgggaaagagcaaatcagagtgttccggaagatcttgtagtaatagctgagcaatacaagttaaatcaacaaaagagggacacagaaacacgatcaagaaaacctggacaaaggcacaaggagtttcattatcgtttaagttgaaaagttgtacctggctactggaagattccaggcatgttaaagatatgcagtattgaatatagataaagaagtattggaaacatactggacatttaaagaagtaactaattcttagataatactgctaaactttcaatattgtgtatgttccttaattttaaaaagtctcaaaaatgagagagtgagagactatgtgaagaaaaagtaaatgttatgtgttaaagtttaatttcttttaaaaaa

SEQ ID NO: 26250 - DNA, 958 bp, Macaca Mulatta
tattcccaaggacaaaaggagcaggcgggccaacctagctcaccctgggctcactgacctctgagcctgggattagtgcacgagctgactggattccatgtcaggaactgaaggtcagtgtgaattaggaaatgagaaataaactgctccttctccttcctggtgtcccttccattcgcctgtcattgttaagcctgcctcgaagtcgaagctggttaaataatgagagcccatggtagaatgttacgaattgtgttgacacagcactcacacaaaatgtttacaaaaatttaaggcattattcaaaacaactgctttctgcacccctttttttgactatggccgttgcctcagtgttcatagattagagatactgtacttctggtttctctcaggtggcaccttgacgaggtctttttagagctcaaggatggtcagcagattcctgtgttcaagctcagtggggaaaacggtgacgaagtgaaaaaggagtagagacgacccagaagacccagcagacccagcgtgcttctagtccatccttccctcatctctaccatatgcccactggggtggtggcccatctgagtggcagacactcctgcaacccagttttccagccaccagcgggatgattgtatgtgccagcacatggtaattttggtataattccaacttggtcacaacgaatgctatttgtcatttttaaactgaatccgaaagaaacccctattacaaatttaagataattgatttgaaagtgctttgtataaaaaagcaaatgataaaaggaatcagaattaatgaaatgtttgttgatctttgctggttctcatttctttcctttctcttcctcttcctttcccctggaattttcagtcttcattacaaagcctgaagctcagtagtactgaagggattttttctaaattattgacatgagaatgatgaggaagac

SEQ ID NO: 26251 - DNA, 2547 bp, Macaca Mulatta
  misc_feature (1)...(2547): n = A,T,C or G
gctgtccccctaccctgtcatcctatccctggagaaccactgtgggctggagcagcaggctgccatggcccgccacctccgcaccatcataggggacatgctggtgacacaggcgctggactccccaaatcctgaggagctgccttccccnnnnnnnnnnnnnnnnnnnnnnnnnnnnnnnnnnnnnnnnnnnnnnnnnnnnnnnnnnnnnnnnnnnnnnnnnnnnnnnnnnnnnnnnnnnnnnnnnnnnnnnnnnnnnnnnnnnnnnnnnnnnnnnnnnnnnnnnnnnnnnnnnnnnnnnnnnnnnnnnnnnnnnnnnnnnnnnnnnnnnnnnnnnnnnnnnnnnnnnnnnnnnnnnnnnnnnnnnnnnnnnnnnnnnnnnnnnnnnnnnnnnnnnnnnnnnnnnnnnnnnnnnnnnnnnnnnnnnnnnnnnnnnnnnnnnnnncagggaacagcttcgtcaggcacaatgcccgccagctgacccgcgtgtacccgctggggctgcggatgaactcggccaactatagtccccaggagatgtggaactcgggctgtcagctgnnnnnnnnnnnnnnnnnnnnnnnnnnnnnnnnnnnnnnnnnnnnnnnnnnnnnnnnnnnnnnnnnnnnnnnnnnnnnnnnnnnnnnnnnnnnnnnnnnnnnnnnnnnnnnnnnnnnnnnnnnnnnnnnnnnnnnnnnnnnnnnnnnnnnnnnnnnnnnnnnnnnnnnnnnnnnnnnnnnnnnnnnnnnnnnnnnnnnnnnnnnnnnnnnnnnnnnnnnnnnnnnnnnnnnnnnnnnnnnnnnnnnnnnnnnnnnnnnnnnnnnnnnnnnnnnnnnnnnnnnnnnnnnnnnnnnnnnnnnnnnnnnnnnnnnnnnnnnnnnnnnnnnnnnnnnnnnnnnnnnnnnnnnnnnnnnnnnnnnnnnnnnnnnnnnnnnnnnnnnnnnnnnnnnnnnnnnnnnnnnnnnnnnnnnnnnnnnnnnnnnnnnnnnnnnnnnnnnnnnnnnnnnnnnnnnnnnnnnnnnnnnnnnnnnnnnnnnnnnnnnnnnnnnnnnnnnnnnnnnnnnnnnnnnnnnnnnnnnnnnnnnnnnnnnnnnnnnnnnnnnnnnnnnnnnnnnnnnnnnnnnnnnnnnnnnnnnnnnnnnnnnnnnnnnnnnnnnnnnnnnnnnnnnnnnnnnnnnnnnnnnnnnnnnnnnnnnnnnnnnnnnnnnnnnnnnnnnnnnnnnnnnnnnnnnnnnnnnnnnnnnnnnnnnnnnnnnnnnnnnnnnnnnnnnnnnnnnnnnnnnnnnnnnnnnnnnnnnnnnnnnnnnnnnnnnnnnnnnnnnnnnnnnnnnnnnnnnnnnnnnnnnnnnnnnnnnnnnnnnnnnnnnnnnnnnnnnnnnnnnnnnnnnnnnnnnnnnnnnnnnnnnnnnnnnnnnnnnnnnnnnnnnnnnnnnnnnnnnnnnnnnnnnnnnnnnnnnnnnnnnnnnnnnnnnnnnnnnnnnnnnnnnnnnnnnnnnnnnnnnnnnnnnnnnnnnnnnnnnnnnnnnnnnnnnnnnnnnnnnnnnnnnnnnnnnnnnnnnnnnnnnnnnnnnnnnnnnnnnnnnnnnnnnnnnnnnnnnnnnnnnnnnnnnnnnnnnnnnnnnnnnnnnnnnnnnnnnnnnnnnnnnnnnnnnnnnnnnnnnnnnnnnnnnnnnnnnnnnnnnnnnnnnnnnnnnnnnnnnnnnnnnnnnnnnnnnnnnnnnnnnnnnnnnnnnnnnnnnnnnnnnnnnnnnnnnnnnnnnnnnnnnnnnnnnnnnnnnnnnnnnnnnnnnnnnnnnnnnnnnnnnnnnnnnnnnnnnnnnnnnnnnnnnnnnnnnnnnnnnnnnnnnnnnnnnnnnnnnnnnnnnnnnnnnnnnnnnnnnnnnnnnnnnnnnnnnnnnnnnnnnnnnnnnnnnnnnnnnnnnnnnnnnnnnnnnnnnnnnnnnnnnnnnnnnnnnnnnnnnnnnnnnnnnnnnnnnnnnnnnnnnnnnnnnnnnnnnnnnnnnnnnnnnnnnnnnnnnnnnnnnnnnnnnnnnnnnnnnnnnnnnnnnnnnnnnnnnnnnnnnnnnnnnccactgccactccctgatcacctctatgctgacacccccacaggcccatgatgagtttcagggctggatgaatcccttggccctctcccctcaacagggcatggacttgactaacacagccaggggtgtggcaacaggagatgccacagctcaaaataacctgacccctgctcctggcttaaagctgctgcgaggatcacaacactgtctgaggatgccaatttacaaggtcagcgcctctccacnnnnnnnnnnnnnnnnnnnnnnnnnnnnnnnnnnnnnnnnnnngaggggccttgaatgatgacgggacaggagtcagaaggatcctcagacagactgccactcccaagcttagctgggctcaaggcccctgtctgctcagcacgacaaatcccaaggacaagggctttccttccttcctccagccagccagacttttacacataggctggaaacactgcttgggtcgcct

SEQ ID NO: 26252 - DNA, 431 bp, Macaca Mulatta
  misc_feature (1)...(431): n = A,T,C or G
atggaaaccaaaatcctgtgaaccaattcgccgggaagnnnnnnnnnnnnnnnnnnnnnnnnnnnnnnnnnnnnnnnnnnnnnnnnnnnnnnnnnnnnnnnnnnnnnnnnnnnnnnnnnnnnnnnnnnnnnnnnnnnnnnnnnnnnnnnnnnnnnnnnnnnnnnnnnnnnnnnnnnnnnnnnnnnnnnnnnnnnnnnnnnnnnnnnnnnnnnnnnnnnnnnnnnnnnnnnnnnnnnnnnnnnnnnnnnnnnnnnnnnnnnnnnnnnnnnnnnnnnnnnnnnnnnnnnnnncagaggatgcctggatctgaagctagaagaattgaaatcctttgtcctaccctcctggatggtggagaagatgagaaagtatatggagacactacggacagagaatgagcatcgtactgttgaagcacctccacagacctg

SEQ ID NO: 26253 - DNA, 749 bp, Macaca Mulatta
tctttcttttcctaggatttcaagcacacaaaatcctttataatttaaagactccacttttgagatacaccaaaaccaccgttgttacacaaattattaaactattataaaactctgctttgtctgacatttgcaaagaggtacatgaggaaatgaaagtggtatttcattttaatttttatgactactaactcacctgaacttgttattttaaacaaatagttctgtccacacctaaaatacagtctggcttcttgtgtctggactaagttaaaagaatcaaaatactttgtaatattctgggctttggcaactgttaaccatatcctaacgtctagagaacgttactaaaatgtaacatactgattgtgaagttaatccacagatcatgaaaatataaatcagactctgagcgagagtctgatttagggcatccaacaaatactctgacagatgcaaaaggaacctctggtctcatttctgccagactcctcttttctcccctcatatcatcttattccgatgctcgttcatcactaacatatccacagaaaggaggaagcgggatgggtcttaggcctgaggatttgcacttagtgtttacttccattcctgagaactaaaagcaacatcaaaagaaatacctaatggctggagcccacaggtgtgcaccacaggattcgcctggtgtgtgtcactgatttcttcattaaatgtaattttgacggtcaaacacaaaccaaagtggc

SEQ ID NO: 26254 - DNA, 143 bp, Macaca Mulatta
agaagctggcacggagcgttgggcacatctttgagatggatgataacgacagccagaaggaagaggagatccgcacatacagcatcatctatggccgtttcgactctaagcggcgggagggcaagcagctcagcctgcacgag

SEQ ID NO: 26255 - DNA, 846 bp, Macaca Mulatta
cgcgttggcttctttccacggagttatgtgcagcccgtgcacctgtgagcagcccggcggccgatctggccgacgggccattttacaggaactgaggtccagagaggacatggacacccccagcccggtcagagtcacacggggctcagtggacggccttggactgaatgtgggctcccaactgcctccagccactttgcacaaattgggatggcccaggttccccagcaagggtaccctgtaagggtagctctggggcttcctggctggttgcttcccattggctgccagctgtgtgacacgacagggcgaagtctgtggaggccccacccacctcctctggtcaatggtcccatctgccaggaaggttgaggactcccaggtttcacccaccggaggctcaacctgaggaaccctggccatggtgggtgggtacaccttgggctgaccacccactgggcctgcctgcccctccctcaaaaggccccttgagttgtacgggctgttgggaggtggctcaacctggaaggatagactgcacacctgttgacctaaactcagtggacagactccaggtggacaccgctcctcaacagccccatgacttcaattccacctggggcacccagcacccgcaccccgccacaggactagaggccctgagaccctgaaaaaggggctggcagtagggaaggtggaggcacactcctctcctgttggacagatgagctctgagggcaagccctgggcccagccacgcagagaccctggctgccctggctcttgtttgtttaggcccaggttctgcccagaccagggcccaggagagctctcaggaggctgaga

SEQ ID NO: 26256 - DNA, 2788 bp, Macaca Mulatta
  misc_feature (1)...(2788): n = A,T,C or G
tacaaccagatggacgacctgctggccgactttgactcgccctgtgtgatggactgcaagatgggcatcaggnnnnnnnnnnnnnnnnnnnnnnnnnnnnnnnngaagaagcccagcctgcggaaggacatgtaccagaagatgatcgaggtggaccccgaggcccccactgaggaggagaaagcacagcgggctgtgaccaagccgcggtacatgcagtggcgggagaccatcagctccacggccaccctggggttcaggatcgagggaatcaannnnnnnnnnnnnnnnnnnnnnnnnnnnnnnnnnnnnnnnnnnnnnnnnnnnnnnnnnnnnnnnnnnnnnnnnnnnnnnnnnnnnnnnnnnnnnnnnnnnnnnnnnnnnnnnnnnnnnnnnnnnnnnnnnnnnnnnnnnnnnnnnnnnnnnnnnnnnnnnnnnnnnnnnnnnaggtcattggcagctccctcctcttcatccatgacaagaaggaacaggccaaagtgtggatgatcgactttgggaaaaccacacccctgcctgagggccagaccctgcagcatgacgtcccctggcaggaggggaaccgggaggatggctacctctcggggctgaacaacctcatcgacatcctgagagaaaatcccaggatgccccacttgcctgagctgcccacgcccnnnnnnnnnnnnnnnnnnnnnnnnnnnnnnnnnnnnnnnnnnnnnnnnnnnnnnnnnnnnnnnnnnnnnnnnnnnnnnnnnnnnnnnnnnnnnnnnnnnnnnnnnnnnnnnnnnnnnnnnnnnnnnnnnnnnnnnnnnnnnnnnnnnnnnnnnnnnnnnnnnnnnnnnnnnnnnnnnnnnnnnnnnnnnnnnnnnnnnnnnnnnnnnnnnnnnnnnnnnnnnnnnnnnnnnnnnnnnnnnnnnnnnnnnnnnnnnnnnnnnnnnnnnnnnnnnnnnnnnnnnnnnnnnnnnnnnnnnnnnnnnnnnnnnnnnnnnnnnnnnnnnnnnnnnnnnnnnnnnnnnnnnnnnnnnnnnnnnnnnnnnnnnnnnnnnnnnnnnnnnnnnnnnnnnnnnnnnnnnnnnnnnnnnnnnnnnnnnnnnnnnnnnnnnnnnnnnnnnnnnnnnnnnnnnnnnnnnnnnnnnnnnnnnnnnnnnnnnnnnnnnnnnnnnnnnnnnnnnnnnnnnnnnnnnnnnnnnnnnnnnnnnnnnnnnnnnnnnnnnnnnnnnnnnnnnnnnnnnnnnnnnnnnnnnnnnnnnnnnnnnnnnnnnnnnnnnnnnnnnnnnnnnnnnnnnnnnnnnnnnnnnnnnnnnnnnnnnnnnnnnnnnnnnnnnnnnnnnnnnnnnnnnnnnnnnnnnnnnnnnnnnnnnnnnnnnnnnnnnnnnnnnnnnnnnnnnnnnnnnnnnnnnnnnnnnnnnnnnnnnnnnnnnnnnnnnnnnnnnnnnnnnnnnnnnnnnnnnnnnnnnnnnnnnnnnnnnnnnnnnnnnnnnnnnnnnnnnnnnnnnnnnnnnnnnnnnnnnnnnnnnnnnnnnnnnnnnnnnnnnnnnnnnnnnnnnnnnnnnnnnnnnnnnnnnnnnnnnnnnnnnnnnnnnnnnnnnnnnnnnnnnnnnnnnnnnnnnnnnnnnnnnnnnnnnnnnnnnnnnnnnnnnnnnnnnnnnnnnnnnnnnnnnnnnnnnnnnnnnnnnnnnnnnnnnnnnnnnnnnnnnnnnnnnnnnnnnnnnnnnnnnnnnnnnnnnnnnnnnnnnnnnnnnnnnnnnnnnnnnnnnnnnnnnnnnnnnnnnnnnnnnnnnnnnnnnnnnnnnnnnnnnnnnnnnnnnnnnnnnnnnnnnnnnnnnnnnnnnnnnnnnnnnnnnnnnnnnnnnnnnnnnnnnnnnnnnnnnnnnnnnnnnnnnnnnnnnnnnnnnnnnnnnnnnnnnnnnnnnnnnnnnnnnnnnnnnnnnnnnnnnnnnnnnnnnnnnnnnnnnnnnnnnnnnnnnnnnnnnnnnnnnnnnnnnnnnnnnnnnnnnnnnnnnnnnnnnnnnnnnnnnnnnnnnnnnnnnnnnnnnnnnnnnnnnnnnnnnnnnnnnnnnnnnnnnnnnnnnnnnnnnnnnnnnnnnnnnnnnnnnnnnnnnnnnnnnnnnnnnnnnnnnnnnnnnnnnnnnnnnnnnnnnnnnnnnnnnnnnnnnnnnnnnnnnnnnnnnnnnnnnnnnnnnnnnnnnnnnnnnnnnnnnnnnnnnnnnnnnnnnnnnnnnnnnnnnnnnnnnnnnnnnnnnnnnnnnnnnnnnnnnnnnnnnnnnnnnnnnnnnnnnnnnnnnnnnnnnnnnnnnnnnnnnnnnnnnnnnnnnnnnnnnnnnnnnnnnnnnnnnnnnnnnnnnnnnnnnnnnnnnnnnnnnnnnnnnnnnnnnngggagccaaagtcaactcggcctctggagctgtagtgacttttgggctagaagggaccctggtggtctgtgcttcagccatttgcagggcaggggcatcatttattcagacataaagattatatgactatggactgaccaaaagttatcctcttccatctgtgaaagaagtttgctaaagcaaatcatgatatgaacgaaaattacatgaggcctgtttaagagaacaaaatgttccaagcactttaggcagacaccagttgtttgcaaacaatgtgctaatatgcaaatgatgtgcttattaaaggaggcccatggggcctcttactggcaatactttgctgtgggttacattaaatatgtgaaagtgtgtgaaatagcatcactttagggttattctgttacttagg

SEQ ID NO: 26257 - DNA, 225 bp, Macaca Mulatta
  misc_feature (1)...(225): n = A,T,C or G
ggcatttccacaggtggccgtgtaaatcctcgggaaggaattgtgctgcattctaccaaactgatccaagagtggaactctgtggaccttaggacccccctttctgacactttgcatctccccgtgtgggtagacaatgatggcaactgtgctgccctggcagaaaggaaatttggccaaggaaagggactggaaaactttgttacacttatcacaggcacaggn

SEQ ID NO: 26258 - DNA, 91 bp, Macaca Mulatta
gaagccaggggccaacatggatcttgtccttgacatcagctaagcctagaggactcttccctcagagaccatggagagggacagccacggg

SEQ ID NO: 26259 - DNA, 1024 bp, Macaca Mulatta
  misc_feature (1)...(1024): n = A,T,C or G
ggttctctcaatataggtacctttaaaaaaacaagtttgggggcacttaatagtttatttcactgtgtttgtcagaagttagtattgaaataaaaatatttttggtaattattattcaagcttggaaagaactgggaataaaaattttttgagttgaagnnnnnnnnnnnnnnnnnnnnnatctcacccaccctgactacattcctgcttttgcaaactaattctccctgaaattttgctgagaacacccaaacatctatccttctcaagctttgcaggaaataatttggggaaaagtatcaatagagtaaagagaaactggaggatagaaagaggctgatattttgttattcattttgatgtgtactcacttttgatgtgtactcactcaaattcttcaaccttatgtatttcacttgcttttgactacttttacctatggcatagtttataattatgttnnnnnnnnnnnnnnnnnnnnaaataaacctgtggaccatatatggtataaaatctcacactatttctgataattcatattatttttatgaatagcttttttatggctctcagaggatgaaacaacatttgctaactaaattctttctttctttatctaacctctgctttagaaaataccataacttctgattttatctggctgggcacatcatctcaatttctctctatatataggtagttcattcagttcctttttatttattgatttttcttttacacttgacatcccatggaaagnnnnnnnnnnnnnnnnnnnnnnnnnnnnnnngtagagagttgcccaggctggtcctgaactcctggcatcaaacaatcctccagcttcggccacccaaagcgctgagattacatgtgtgagctaccacgccaggctaattcaatttcatcacacatatgccacacagatatctaggcttgaagtgagtaaagctttcactaatgaagccatcattcacattcttgtttagaatactgtacagtacctcccaataaacagaatcat

SEQ ID NO: 26260 - DNA, 683 bp, Macaca Mulatta
  misc_feature (1)...(683): n = A,T,C or G
ggggagcctcagcacagggcagccaccttgatgctctcaaatatcactgttgtgaatacagagaaggaaaaccaactgtaacgtgctacccaaatataagttttactcatattttgatgttaggatggatagcttgcaaaaagttggagggtacggcctttattatgaggcatctatgaaggatcaggaatggatgtagacaaggaactagtaatggaaagtgttaaagctggagcccctggaaaaccagaaatgaggctgggctctcaggaagaaacaaatgaaggtgatgctaatgaaagttcattacaagtcctatccagcaatgtgcctctcctggccctagagttcttggacacagtccaggccaaagagaaggcctttctccccatggtcagccacacgttccacatgcccacagaagagtctggtgctccacaggagggtgatgacctaccgaagtcctcagcaaacaccagccatcccaagcagggtgacatcccccagtccccagaagaaaccatcagccnacggagggtgacatctgcaagtcccctagagaaaccacccaatccagaaggacgacctccccagtctcagaagagtctcaaccnaggaggtgacatcccagtctcacaaactatcagtcagctggcaatccaatctcatgagccatcgtcaga

SEQ ID NO: 26261 - DNA, 192 bp, Macaca Mulatta
  misc_feature (1)...(192): n = A,T,C or G
actggatctctgaacacccaggccccctccaccatggccagccggggtgggggccggggtcgtggccggggccagttgaccttcaacatggaggccgtgggcattgggaaaggggatactttgcccccacccaccctgcagccttctccactcttcccnnnntggagttccgcccagtacctttgccttcag

SEQ ID NO: 26262 - DNA, 428 bp, Macaca Mulatta
ttctgacgtcatggtgagtgactgccgaagtaaggagcagatgagtgattgttcacatacccaaacttctccggtgtctggcttctggatattctctcaatgctgcttcctggatttctgcaatgaccctcaacacagagggcactatatttcttagtgtgactgcaacaacctttggtgtaaaattctaccagtttccagccaccttcctgacttctttctgggcttggccaggacttctagtccctcataccagccctccttggctccctccggtcagtggaccccagccttggctcttcctcttggttggcacccttcagcacccttactcccactctgcacccccagccccaccgcccaccaggtttcctctcttgtccttagtccctggatgtttctcccaaataaatttgtgtgcaaactgt

SEQ ID NO: 26263 - DNA, 4260 bp, Macaca Mulatta
  misc_feature (1)...(4260): n = A,T,C or G
caggacacggttgatttcctctctcttgatttgtcttatgaatgccaaaatgaggcaagtctgcggcagaagctgagtaaattgcagnnnnnnnnnnnnnnnnnnnnnnnnnnnnnnnnnnnnnnnnnnnnnnnnnnnnnnnnnnnnnnnnnnnnnnnnnnnnnnnnnnnnnnnnnnnnnnnnnnnnnnnnnnnnnnnnnnnnnnnnnnnnnnnnnnnnnnnnnnnnnnnnnnnnnnnnnnnnnnnnnnnnnnnnnnnnnnnnnnnnnnnnnnnnnnnnnnnnnnnnnnnnnnnnnnnnnnnnnnnnnnnnnnnnnnnnnnnnnnnnnnnnnnnnnnnnnnnnnnnnnnnnnnnnnnnnnnnnnnnnnnnnnnnnnnnnnnnnnnnnnnnnnnnnnnnnnnnnnnnnnnnnnnnnnnnnnnnnnnnnnnnnnnnnnnnnnnnnnnnnnnnnnnnnnnnnnnnnnnnnnnnnnnnnnnnnnnnnnnnnnnnnnnnnnnnnnnnnnnnnnnnnnnnnnnnnnnnnnnnnnnnnnnnnnnnnnnnnnnnnnnnnnnnnnnnnnnnnnnnnnnnnnnnnnnnnnnnnnnnnnnnnnnnnnnnnnnnnnnnnnnnnnnnnnnnnnnnnnnnnnnnnnnnnnnnnnnnnnnnnnnnnnnnnnnnnnnnnnnnnnnnnnnnnnnnnnnnnnnnnnnnnnnnnnnnnnnnnnnnnnnnnnnnnnnnnnnnnnnnnnnnnnnnnnnnnnnnnnnnnnnnnnnnnnnnnnnnnnnnnnnnnnnnnnnnnnnnnnnnnnnnnnnnnnnnnnnnnnnnnnnnnnnnnnnnnnnnnnnnnnnnnnnnnnnnnnnnnnnnnnnnnnnnnnnnnnnnnnnnnnnnnnnnnnnnnnnnnnnnnnnnnnnnnnnnnnnnnnnnnnnnnnnnnnnnnnnnnnnnnnnnnnnnnnnnnnnnnnnnnnnnnnnnnnnnnnnnnnnnnnnnnnnnnnnnnnnnnnnnnnnnnnnnnnnnnnnnnnnnnnnnnnnnnnnnnnnnnnnnnnnnnnnnnnnnnnnnnnnnnnnnnnnnnnnnnnnnnnnnnnnnnnnnnnnnnnnnnnnnnnnnnnnnnnnnnnnnnnnnnnnnnnnnnnnnnnnnnnnnnnnnnnnnnnnnnnnnnnnnnnnnnnnnnnnnnnnnnnnnnnnnnnnnnnnnnnnnnnnnnnnnnnnnnnnnnnnnnnnnnnnnnnnnnnnnnnnnnnnnnnnnnnnnnnnnnnnnnnnnnnnnnnnnnnnnnnnnnnnnnnnnnnnnnnnnnnnnnnnnnnnnnnnnnnnnnnnnnnnnnnnnnnnnnnnnnnnnnnnnnnnnnnnnnnnnnnnnnnnnnnnnnnnnnnnnnnnnnnnnnnnnnnnnnnnnnnnnnnnnnnnnnnnnnnnnnnnnnnnnnnnnnnnnnnnnnnnnnnnnnnnnnnnnnnnnnnnnnnnnnnnnnnnnnnnnnnnnnnnnnnnnnnnnnnnnnnnnnnnnnnnnnnnnnnnnnnnnnnnnnnnnnnnnnnnnnnnnnnnnnnnnnnnnnnnnnnnnnnnnnnnnnnnnnnnnnnnnnnnnnnnnnnnnnnnnnnnnnnnnnnnnnnnnnnnnnnnnnnnnnnnnnnnnnnnnnnnnnnnnnnnnnnnnnnnnnnnnnnnnnnnnnnnnnnnnnnnnnnnnnnnnnnnnnnnnnnnnnnnnnnnnnnnnnnnnnnnnnnnnnnnnnnnnnnnnnnnnnnnnnnnnnnnnnnnnnnnnnnnnnnnnnnnnnnnnnnnnnnnnnnnnnnnnnnnnnnnnnnnnnnnnnnnnnnnnnnnnnnnnnnnnnnnnnnnnnnnnnnnnnnnnnnnnnnnnnnnnnnnnnnnnnnnnnnnnnnnnnnnnnnnnnnnnnnnnnnnnnnnnnnnnnnnnnnnnnnnnnnnnnnnnnnnnnnnnnnnnnnnnnnnnnnnnnnnnnnnnnnnnnnnnnnnnnnnnnnnnnnnnnnnnnnnnnnnnnnnnnnnnnnnnnnnnnnnnnnnnnnnnnnnnnnnnnnnnnnnnnnnnnnnnnnnnnnnnnnnnnnnnnnnnnnnnnnnnnnnnnnnnnnnnnnnnctgggataactttacccacacaccagggagcaatgtgaaagacaatgccactggagacatcgcctgtgacagctatcaccagctggatgccgatctgaatatgctccgagctttgaaggtgaaggcctatcgcttctctatctcctggtctcggattttcccaactgggagaaacagctctatcaacagtcacggggttgattattacaataggctgattgatggcttgatggcaagcaacatctttcctatgttgtcattgttccattgggacctgccccaggccctccaggatatcggaggctgggagaatcctgccttgattgannnnnnnnnnnnnnnnnnnnnnnnnnnnnnnnnnnnnnnnnnnnnnnnnnnnnnnnnnnnnnnnnnnnnnnnnnnnnnnnnnnnnnnnnnnnnnnnnnnnnnnnnnnnnnnnnnnnnnnnnnnnnnnnnnnnnnnnnnnnnnnnnnnnnnnnnnnnnnnnnnnnnnnnnnnnnnnnnnnnnnnnnnnnnnnnnnnnnnnnnnnnnnnnnnnnnnnnnnnnnnnnnnnnnnnnnnnnnnnnnnnnnnnnnnnnnnnnnnnnnnnnnnnnnnnnnnnnnnnnnnnnnnnnnnnnnnnnnnnnnnnnnnnnnnnnnnnnnnnnnnnnnnnnnnnnnnnnnnnnnnnnnnnnnnnnnnnnnnnnnnnnnnnnnnnnnnnnnnnnnnnnnnnnnnnnnnnnnnnnnnnnnnnnnnnnnnnnnnnnnnnnnnnnnnnnnnnnnnnnnnnnnnnnnnnnnnnnnnnnnnnnnnnnnnnnnnnnnnnnnnnnnnnnnnnnnnnnnnnnnnnnnnnnnnnnnnnnnnnnnnnnnnnnnnnnnnnnnnnnnnnnnnnnnnnnnnnnnnnnnnnnnnnnnnnnnnnnnnnnnnnnnnnnnnnnnnnnnnnnnnnnnnnnnnnnnnnnnnnnnnnnnnnnnnnnnnnnnnnnnnnnnnnnnnnnnnnnnnnnnnnnnnnnnnnnnnnnnnnnnnnnnnnnnnnnnnnnnnnnnnnnnnnnnnnnnnnnnnnnnnnnnnnnnnnnnnnnnnnnnnnnnnnnnnnnnnnnnnnnnnnnnnnnnnnnnnnnnnnnnnnnnnnnnnnnnnnnnnnnnnnnnnnnnnnnnnnnnnnnnnnnnnnnnnnnnnnnnnnnnnnnnnnnnnnnnnnnnnnnnnnnnnnnnnnnnnnnnnnnnnnnnnnnnnnnnnnnnnnnnnnnnnnnnnnnnnnnnnnnnnnnnnnnnnnnnnnnnnnnnnnnnnnnnnnnnnnnnnnnnnnnnnnnnnnnnnnnnnnnnnnnnnnnnnnnnnnnnnnnnnnnnnnnnnnnnnnnnnnnnnnnnnnnnnnnnnnnnnnnnnnnnnnnnnnnnnnnnnnnnnnnnnnnnnnnnnnnnnnnnnnnnnnnnnnnnnnnnnnnnnnnnnnnnnnnnnnnnnnnnnnnnnnnnnnnnnnnnnnnnnnnnnnnnnnnnnnnnnnnnnnnnnnnnnnnnnnnnnnnnnnnnnnnnnnnnnnnnnnnnnnnnnnnnnnnnnnnnnnnnnnnnnnnnnnnnnnnnnnnnnnnnnnnnnnnnnnnnnnnnnnnnnnnnnnnnnnnnnnnnnnnnnnnnnnnnnnnnnnnnnnnnnnnnnnnnnnnnnnnnnnnnnnnnnnnnnnnnnnncccaggtgaccatttaccactgggacctaccgcaggcgcttcaggatgtgggaggctgggagaatgagaccatcgtgcagcggtttaaggagtatgcagatgtgctcttccagaggctgggagacaaggtgaagttttggatcacgctgaatgagccctttgtcattgcttaccagggatatggctatggaacagcggctccagnnnnnnnnnaggcctggcactgccccctacattgttggccacaacctaataaaggctcatgctgaggcctggcatctgtacaacgatgtataccgcgccagtcaaggtggtgtgatttccatcaccatcagcagtgactgggctgaacccagagatccctctaaccaggaggatgtggaggcggccaggagatatgttcagnncagttcatgggaggctggtttgcgcatcctattttcaagaatggagattncancgagntgatgaaccttggagaacgtgacaggagcttggctgcagncctcaccaagtctc

SEQ ID NO: 26264 - DNA, 371 bp, Macaca Mulatta
aagaagcctggcactgggtttcctcttcaataacaatgaaaattaaagggtgcagaaccttcctggaacatggaatttctctgggagattccatgcagaggccactggggaggtggggggcacgcatgtgagtgtaggtggctgcagtgttggaaggctcccagcagagcagagagcatctcagtctcatcagggaacccacctcatggcttctcagccagcagtctcaggaacatagactgcagagaacggagggaggcagcagtggccgcggcacctgaggcatcctgctgtcatgggaaggtctctgcccaaatgtcagatgcatcagcctgtcacccactgatccagagctttcagctgtgctggtt

SEQ ID NO: 26265 - DNA, 569 bp, Macaca Mulatta
aatcaacaaaagtggtgaaaaagctatgtaaggtatacagggaacagcactctagaagctttgacttaattgagtctacaagtgccacggtgctacttgcatagacccctttggtaaaatgtaaattcatgtacaattgaaggatactcaggaggacatctttctagtctaacagtcaggaactgctctggtcattcccttgtatgaactgttctaaagactattagtggggtgttaattgatttttcctggtatactgttgcttggatgacaccactggtcaagtaagaaatttgtaaataaatttcttttggttcttattatctatatctgtgactgattttaaaaaggtatttgacacttgaaatttttttcaaatatataatctcatcaccatgtcttatatataataatttactcctgtttcttactgcatctcactgtttcctgtagtaaagttctctaaacttgttaagttatacccggtgttgggattagaagtccttatgtaagaattgactcttaatctctgagtgactataactccctgatttctttgctatatatga

SEQ ID NO: 26266 - DNA, 526 bp, Macaca Mulatta
actctcccctgcttttagctcataatttccccaaaagatatcagtgactgctttttgtgttgaaagttaaattccagtttgtcagcccttggggtttcataatcttttgcagggataccagatttcccaagggctggaatgttatctacagtatctgtgatactcatgatgtggcagagatcttcaccaacaaggaagaatttaatcctgaccgattcatgctgcctcacccagaggatgcatccaggttcagcttcattccatttggatgaggccttaggggactgtgtaggcaaagaatttgcaaaaattcttctcaaaatatttacagtggagctggccaggcattgtgactggcagcttctaaatggacctcctacaatgaaaaccagtcccaccgtgtatcctgtggacaatctccctgcaagattcacccatttccatggggaaatctgatgagcttgaatgctcaaacctcagacttattgcaagtgtacatatgagtttttaaggagtgttgtgttga

SEQ ID NO: 26267 - DNA, 1000 bp, Macaca Mulatta
  misc_feature (1)...(1000): n = A,T,C or G
tgctccaggaaccagcagttgaagacctgggtctgaggcacacttcctaaaaccagcaccgcagaggaggcccaggcannnnnnnnnnnnnnnnnnnnnnnnnnnnnnnnnnnnnnnnnnnnnnnnnnnnnnnnnnnnnnnnnnnnnnnnnnnnnnnnnnnnnnnnnnnnnnnnnnnnnnnnnnnnnnnnnnnnnnnnnnnnnnnnnnnnnnnnnnnnnnnnnnnnnnnnnnnnnnnnnnnnnnnnnnnnnnnnnnnnnnnnnnnnnnnnnnnnnnnnnnnnnnnnnnnnnnnnnnnnnnnnnnnnnnnnnnnnnnnnnnnnnnnnnnnnnnnnnnnnnnnnnnnnnnnnnnnnnnnnnnnnnnnnnnnnnnnnnnnnnnnnnnnnnnnnnnnnnnnnnnnnnnnnnnctgctgggatgctgcctcttccccagaatcctcctaagagtcctccccagggtcctcnnnnnnnnnnnnnnnnnnnnnnnnnnnnnnnnnnnnnnnnnnnnnnnnnnnnnnnnnnnnnnnnnnnnnnnnnnnnnnnnnnnnnnnnnnnnnnnnnnnnnnnnnnnnnnnnnnnnnnnnnnnnnnnnnnnnnnnnnnnnnnnnnnnnnnnnnnnnnnnnnnnnnnnctggatgaaaaggtggatgaggtggtacagtttcttctcctcagatatcaaacaaacagcctgtcacaaaagcagagatgctgacgaatgtcatcaacaggtacatgggctgctttcctatgatcttcaggaaagcccgtgagttcatagagattctttttggcatttccctgagagaggtggaccctgacgactcctacgtctttgtaaacacattagacctcagctgtgaggggagtctgagtgatgagcagggcgtgccccagaactgcctcctgattcttattctgagtgtgatctgcattgagggcaactgtgcgtctgaggagttcatctgggaagtgctgaatgcaataggggtgtatgct

SEQ ID NO: 26268 - DNA, 756 bp, Macaca Mulatta
  misc_feature (1)...(756): n = A,T,C or G
ttctgcttataaatgctatcactatgaaaaggcgaatgcagctctttctgttcttacttnttatctgaatgncaagttcctctttgggtgtaggagggggcgggcaggggacaaggccaggaggggtcccagggccttcatgcgtggtctcggggaagaagcttcctctggcctggtgtaggtcgttccatctgcctcccgggtctgcgtccctaaccccttccctagcttggtgttctaccctgaaatgggaaggaacagaggtcccgcagaacagggatcctggggaaggtgtccagggcagggtcctgggaagggcatcccgaccacttcctctccagctgtggctccatctgcccggcttgcctgcctcatgcacccactgcccatggccttcctgcttcccacgctgccatctctgccagggtgccccatgggttcctgtgccacccttcccccacccctcaaatcagcctttaagtcttcttccaagtgctgtggggcatagtgatgaggcgctggccttgggggccacaccaggtcgcagcagacgccttcagcctggggcgccagtgttttatgcacttagttcagtaaaacacgccccggaaattcaagattgtcagactttatatatgttcagcattcctcattacagaaatcttttactgaatgggaaaggtttaaaaggtaaccaaagcaatttatttttaattaatatttgtagaacggtgtgctgtcatactgaactcactg

SEQ ID NO: 26269 - DNA, 813 bp, Macaca Mulatta
  misc_feature (1)...(813): n = A,T,C or G
ttgcctgcaaacatttacttccgaaacgacttccacggctgggacgggaaccttccacccacagctacgcctctgattggtgaatggtgagggtgcctgtccaacttttcttttctgcaaagagaaccagccctctccaggcagccagccctcaagcatcacttacaggaccagaggnnnnnnnnnnnnnnnnnnnnnnnnnnnnnnnnnnnnnnnnnnnnnnnnnnnnnnnnnnnnnnnnnnnnnnnnnnnnnnnnnnnnnnnnnnnnnnnnnnnnnnnnnnnnnnnnnnnnnnnnnnnnnnnnnnnnnnnnnnnnnnnnnnnnnnnnnnnnnnnnnnnnnnnnnnnnnnnnnnnnnnnnnnnnnnnnnnnnnnnnnnnnnnnnnnnnnnnnnnnnnnnnnnnnnnnnnnnnnnnnnnnnnnnnnnnnnnnnnnnnnnnnnnnnnnnnnnnnnnnnnnnnnnnnnnnnnnnnnnnnnnnnnnnnnnnnnnnnnnnnnnnnnnnnnnnnnnnnnnnnnnnnnnnnnnnnnnnnnnnnnnnnnnnnnnnnnnnnnnnnnnnnnnnnnnnnnnnnnnnnnnnnnnnnnnnnnnnnnnnnnnnnnnnnnnnnnnnnnnnnnnnnnnnnnnnnnnnnnnnnnnnnnnnnnnnnnnnnnnnnnnnnnnnnnnnnnaggactctgaagtcattctctactctggccaacaactttgttctgatcgcgtcacaactgcaacccagtnnnaaaatgagatgttttccatcagagacagtgcacacaggcggtttctgctattccggagagcattcaaacag

SEQ ID NO: 26270 - DNA, 545 bp, Macaca Mulatta
tctgccccacaagtaggaatgatcaacgagaacttaacttagtcctttatttggagattttttcatcaaacaaaaatttcttgagttcttatggctagaatacctcggatgcccacagctatcacgtttgtgaaatccctccagactacatgcatacttacctaacagtttgaaatgggattgatctactgccggtaaccctgcttgatggcagcattttgatctaaattacataatggtttttcccaatctgaatcagtggaaaaaaatttaagtgaggaagaagagggcttcaaatgcttatttaattctaggtatgaacactgtttcagctcattttgtgcttttaaaactacaattttaaagatttgcaataccaataacttcctagattcatgtggatttttttaaaggcaatgaaaaaaggctggattataacacactgtagtaaccaaaaatgcatttaagcattgaatgcactctagtacagggccaaataagaggagttgaaatgagtaaagcagaaatagaactgctgaaagttt

SEQ ID NO: 26271 - DNA, 290 bp, Macaca Mulatta
caggcagcccttttccctccagtggcacctcctggaaacagtccacttgggcgcaggacccagtgccttccaaatgagcggcagttccccggccgtgagcctcccgggaatgtttaataaaaggcctggccacctcttctcactgtgtgggatggtctgtgaaagagtctgacaggagagcatctctgctctttgagctgcctgattgtggactttacggggacactcctcatcctggagcccatagggcaggtcctctcctggagggggtgctgccaccacactctagc

SEQ ID NO: 26272 - DNA, 94 bp, Macaca Mulatta
  misc_feature (1)...(94): n = A,T,C or G
ngaacggaaaccaccgctgtttaacatgaatgcgatgagtgccttataccacattgcacagaacgaatcccccgtgctccagtcaggacactgg

SEQ ID NO: 26273 - DNA, 241 bp, Macaca Mulatta
  misc_feature (1)...(241): n = A,T,C or G
agttcccatttggccggcgcttgccttgtgatatctactggcacggagtttcatttcacgacaatgacatattctccggtcaagtgaacaagtttccaggnccaggcatgacggagatggtgcgtaaaattactctgagcagagcagtgagaaccatgcagaatctctttcctgaggagtacaacttctaccctcgctcatggattctgcctgacgagttccagctctttgttgctcaggt

SEQ ID NO: 26274 - DNA, 194 bp, Macaca Mulatta
agacaccaaatgaggaatgtttgttcctggaaaggctggaggagaaccattacaacacctatacatccaagaagcacgcagagaagaattggtttgttggcctcaagaagaatggaagctgcaaacgtggtcctcggactcactatggccagaaagcaatcttgtttcttcccctgccagtctcttctgattaa

SEQ ID NO: 26275 - DNA, 96 bp, Macaca Mulatta
gcactttagatgatgcggatgaccccagcaccagtgttggagcctatcactacatgctggagtcaaacatggggaagaccatgctggaatttcagg

SEQ ID NO: 26276 - DNA, 1483 bp, Macaca Mulatta
  misc_feature (1)...(1483): n = A,T,C or G
agaattctgagacttacggttggtcatatagaacaatggcttgaacttacagtttccnnnnnnnnnnnnnnnnnnnnnnnnnnnnnnnnnnnnnnnnnnnnnnnnnnnnnnnnnnnnnnnnnnnnnnnnnnnnnnnnnnnnnnnnnnnnnnnnnnnnnnnnnnnnnnnnnnnnnnnnnnnnnnnnnnnnnnnnnnnnnnnnnnnnnnnnnnnnnnnnnnnnnnnnnnnnnnnnnnnnnnnnnnnnnnnnnnnnnnnnnnnnnnnnnnnnnnnnnnnnnnnnnnnnnnnnnnnnnnnnnnnnnnnnnnnnnnnnnnnnnnnnnnnnnnnnnnnnnnnnnnnnnnnnnnnnnnnnnnnnnnnnnnnnnnnnnnnnnnnnnnnnnnnnnnnnnnnnnnnnnnnnnnnnnnnnnnnnnnnnnnnnnnnnnnnnnnnnnnnnnnnnnnnnnnnnnnnnnnnnnnnnnnnnnnnnnnnnnnnnnnnnnnnnnnnnnnnnnnnnnnnnnnnnnnnnnnnnnnnnnnnnnnnnnnnnnnnnnnnnnnnnnnnnnnnnnnnnnnnnnnnnnnnnnnnnnnnnnnnnnnnnnnnnnnnnnnnnnnnnnnnnnnnnnnnnnnnnnnnnnnnnnnnnnnnnnnnnnnnnnnnnnnnnnnnnnnnnnnnnnnnnnnnnnnnnnnnnnnnnnnnnnnnnnnnnnnnnnnnnnnnnnnnnnnnnnnnnnnnnnnnnnnnnnnnnnnnnnnnnnnnnnnnnnnnnnnnnnnnnnnnnnnnnnnnnnnnnnnnnnnnnnnnnnnnnnnnnnnnnnnnnnnnnnnnnnnnnnnnnnnnnnnnnnnnnnnnnnnnnnnnnnnnnnnnnnnnnnnnnnnnnnnnnnnnnnnnnnnnnnnnnnnnnnnnnnnnnnnnnnnnnnnnnnnnnnnnnnnnnnnnnnnnnnnnnnnnnnnnnnnnnnnnnnnnnnnnnnnnnnnnnnnnnnnnnnnnnnnnnnnnnnnnnnnnnnnnnnnnnnnnnnnnnnnnnnnnnnnnnnnnnnnnnnnnnnnnnnnnnnnnnnnnnnnnnnnnnnnnnnnnnnnnnnnnnnnnnnnnnnnnnnnnnnnnnnnnnnnnnnnnnnnnnnnnnnnnnnnnnnnnnnnnnnnnnnnnnnnnnnnnnnnnnnnnnnnnnnnnnnnnnnnnnnnnnnnnnnnnnnnnnnnnnnnnnnnnnnnnnnnnnnnnnnnnnnnnnnnnnnnnnnnnnnnnnnnnnnnnnnnnnnnnnnnnnnnnnnnnnnnnnnnnnnnnnnnnnnnnnnnnnnnnnnnnnnnnnnnnnnnnnnnnnnnnnnnnnnnnnnnnnnnnnnnnnnnnnnnnnnnnnngccaagattctgggtcagacaatcgtataaacacagtcagtctcaaggaagcattggaaaggtttgatcatagcccaaccccttctgcctcttctcggagttcaagaaaatcatctcacacagcagtctcagacccttcct

SEQ ID NO: 26277 - DNA, 325 bp, Macaca Mulatta
gcataacaactgcccaaagtaatcatatggaagtcacacaggaccagaggttgaataggccctaacaggttagttgagaagcctccagctgtggtcagcagtgcaaggggctactgtcagaccttgggagcctcagcagagcggagcctcagcccagccgactcttggcacagctcaaccaggccagcaaggctggagaagcagccttcagccctggccggctcaccttcttccagctgaggggtgcttgagatgaagttgaaagtttgctgaggattcaagttaattcaccagtgtagcaatctggtgattacaaaaatgtata

SEQ ID NO: 26278 - DNA, 136 bp, Macaca Mulatta
caggagaggatctcctacctgtacaacataattaagagccgccgaaccaatctgttggctgccctgcaccgatcagtgaggcggcgggcggctgaccagggccacagaagtgccttcctagtgctggccagtcggt

SEQ ID NO: 26279 - DNA, 404 bp, Macaca Mulatta
tgaagggtcactggcctccctggacttgttttcacagcagaggaaggtgcagaggaagaagaagagaagatgcacaatgggaaagacagaggtaaaggcagctcaacaggactcctagtttaaatggggagccagagctcatggatgaactgccccccactttgtttctgccttcctccctgccaccacctttcccagagctttcggacccgagttccctgtacctacttttcccatctgacagtcaggttttaccttccaggagccaatgtcagtcaatcaccaagagcttcatttcctgatcctgggataggtggttgggatacaggaagtagatacaagtagaacacaaaagatgaccctttgactggagaagtttatgatctagttaagaaagcaagacc

SEQ ID NO: 26280 - DNA, 807 bp, Macaca Mulatta
  misc_feature (1)...(807): n = A,T,C or G
ggcagcctaatgagctgctctgccccttgtgcccagagtggatgttctgggattcttttttctttgttttatcttttcaagtggaattagttggttatccatttgcaaatgttttaaattgcaaagaaagccatgaggtcttcaatcctgttttaccccatcccttgtgcctatttccagggagaaggaaagcatatacacttttttctttgatttttccaaaaaagtgtatatgctttccttcaatcctgttttaccccatcccttgtgcctatttccagggagaaggaaagcatatacacttttttctttgatttttccaaaagagaaaaaaatgacaaaggtgaaacttacatacaaatattacctcatttgttgtgtgactgagtaaagaatttttggatcaagcagaaagtttaagtgtctaacaaacttaaagctactgtagtacctaaaaagtcaatgttgtacatagtataaaaactctgcagagaagtattcccaataaggaaatagcattgaaatgttaaatacaatttctgaaagttacgtggtttttttttctatcatcttgtataccattgctttatttttataaattattttctcattgccattgggatagagatctcagattgtgtagatatgctattttaaatatttatcaagaaatactgccctgtagcgttactaatttccatttttaaataagggtttgcaccctggaattgaaagaattgttgggnnnnnnnnnnnnnnnnnnnnnnnnnnnnnnnnnnnnnnnnnnnnnnnnnnnnncttttgaac

SEQ ID NO: 26281 - DNA, 166 bp, Macaca Mulatta
aaaaaatcagcgaagcagaaggccatgtgcccctcaagaactccatctggggctcttcatagaaaagggaaaatggcagcctggcccttctccaggctgtggaaagtctctgatccaattctcttccaaatgaccttggtcgctgctctgttgcctgctattcttg

SEQ ID NO: 26282 - DNA, 804 bp, Macaca Mulatta
gggggagccgctgccgtcgccatgacccgcggtaaccagcgtgagctcgcccgccagaagaatatgaaaaagcagagcgactcggttaagggaaagcgccgagatgacgggctttctgctgccgcccgcaagcagagggactcggagatcatgcagcagaagcagaaaaaggcaaacgagaagaaggaggaacccaagtagctttgtggcttcgtgtccaaccctcttgcccttcgcctgtgtgcctggagccagtcccaccacgctcgcgtttcctcctgtagtgctcacaggtcccagcaccgatggcattccctttgccctgagtctgcagcgggtcccttttgtgcttccttcccctcatgtagcctctctccccctgggccactcccgggggtgagggggtttacccctttccagtgtttttttattcctgtggggctcaccccaaatttttaaagtagctttggtatttggaaagaatttataagatgacgaaaatactcttgtgggccgccttcgccattaaaaaagtttctagacattttatttggcgtgcgggccccctaggtaacgttaaactgggcaatgctggtttcctaggaaaatcttggcaaaaaataggggttggatttccttcccattatacaacgcccgggggggctaacgaaagcttctgtaaataaatcctgaatgggtgttcttaggggctctttctgggggttctttaaaattgggagtttcaaatcagaactttttatatttaattttttccccatgttctgggtcctatatgtgtgggat

SEQ ID NO: 26283 - DNA, 2673 bp, Macaca Mulatta
  misc_feature (1)...(2673): n = A,T,C or G
tgacagtatcctgtggcaaatgtttgggccttttggagctgtcaccaacgtgaaggtcatccgtgactttaacaccaataaatgcaaaggttttggatttgtgactatgacaaactatgatgaggctgccatggcgatagctagcctcaatggataccgtctgggagacagagtactgcaggtctcctttaagacaaacaaaacgcacgaagcctaatgagctcttgtcctcagtccatttatatatgaaaactatacaacaaaggcaagttaagagaaactttatacattaataaatgtctttgtaagtcagtgttgagatggggataaaacgactacttagcatcctaagaaatatgtgagattttttattgctagtatttgaattaaaacttcttacatatcttttatgtttgaatatggacaagaggcacagggtttttacctgtcacattgcattctattgccttctttgaagaacgtggaccttttatagtgtatcagctaagggaagacatttcttttctttttacataactgccttgaacctgtgannnnnnnnnnnnnnnnnnnnnnnnnnnnnnnnnnnnnnnnnnnnnnnnnnnnnnnnnnnnnnnnnnnnnnnnnnnnnnnnnnnnnnnnnnnnnnnnnnnnnnnnnnnnnnnnnnnnnnnnnnnnnnnnnnnnnnnnnnnnnnnnnnnnnnnnnnnnnnnnnnnnnnnnnnnnnnnnnnnnnnnnnnnnnnnnnnnnnnnnnnnnnnnnnnnnnnnnnnnnnnnnnnnnnnnnnnnnnnnnnnnnnnnnnnnnnnnnnnnnnnnnnnnnnnnnnnnnnnnnnnnnnnnnnnnnnnnnnnnnnnnnnnnnnnnnnnnnnnnnnnnnnnnnnnnnnnnnnnnnnnnnnnnnnnnnnnnnnnnnnnnnnnnnnnnnnnnnnnnnnnnnnnnnnnnnnnnnnnnnnnnnnnnnnnnnnnnnnnnnnnnnnnnnnnnnnnnnnnnnnnnnnnnnnnnnnnnnnnnnnnnnnnnnnnnnnnnnnnnnnnnnnnnnnnnnnnnnnnnnnnnnnnnnnnnnnnnnnnnnnnnnnnnnnnnnnnnnnnnnnnnnnnnnnnnnnnnnnnnnnnnnnnnnnnnnnnnnnnnnnnnnnnnnnnnnnnnnnnnnnnnnnnnnnnnnnnnnnnnnnnnnnnnnnnnnnnnnnnnnnnnnnnnnnnnnnnnnnnnnnnnnnnnnnnnnnnnnnnnnnnnnnnnnnnnnnnnnnnnnnnnnnnnnnnnnnnnnnnnnnnnnnnnnnnnnnnnnnnnnnnnnnnnnnnnnnnnnnnnnnnnnnnnnnnnnnnnnnnnnnnnnnnnnnnnnnnnnnnnnnnnnnnnnnnnnnnnnnnnnnnnnnnnnnnnnnnnnnnnnnnnnnnnnnnnnnnnnnnnnnnnnnnnnnnnnnnnnnnnnnnnnnnnnnnnnnnnnnnnnnnnnnnnnnnnnnnnnnnnnnnnnnnnnnnnnnnnnnnnnnnnnnnnnnnnnnnnnnnnnnnnnnnnnnnnnnnnnnnnnnnnnnnnnnnnnnnnnnnnnnnnnnnnnnnnnnnnnnnnnnnnnnnnnnnnnnnnnnnnnnnnnnnnnnnnnnnnnnnnnnnnnnnnnnnnnnnnnnnnnnnnnnnnnnnnnnnnnnnnnnnnnnnnnnnnnnnnnnnnnnnnnnnnnnnnnnnnnnnnnnnnnnnnnnnnnnnnnnnnnnnnnnnnnnnnnnnnnnnnnnnnnnnnnnnnnnnnnnnnnnnnnnnnnnnnnnnnnnnnnnnnnnnnnnnnnnnnnnnnnnnnnnnnnnnnnnnnnnnnnnnnnnnnnnnnnnnnnnnnnnnnnnnnnnnnnnnnnnnnnnnnnnnnnnnnnnnnnnnnnnnnnnnnnnnnnnnnnnnnnnnnnnnnnnnnnnnnnnnnnnnnnnnnnnnnnnnnnnnnnnnnnnnnnnnnnnnnnnnnnnnnnnnnnnnnnnnnnnnnnnnnnnnnnnnnnnnnnnnnnnnnnnnnnnnnnnnnnnnnnnnnnnnnnnnnnnnnnnnnnnnnnnnnnnnnnnnnnnnnnnnnnnnnnnnnnnnnnnnnnnnnnnnnnnnnnnnnnnnnnnnnnnnnnnnnnnnnnnnnnnnnnnnnnnnnnnnnnnnnnnnnnnnnnnnnnnnnnnnnnnnnnnnnnnnnnnnnnnnnnnnnnnnnnnnnnnnnnnnnnnnnnnnnnnnnnnnnnnnnnnnnnnnnnnnnnnnnnnnnnnnnnnnnnnnnnnnnnnnnnnnnnnnnnnnnnnnnnnnnnnnnnnnnnnnnnnnnnnnnnnnnnnnnnnnnnnnnnnnnnnnnnnnnnnnnnnnactaaaaaataaaatacatgtatatacttaaaaaaaaataataaggtttccctcaagggaaaacagcagctacatgcttctttcctatactacagtagcaaaccaaggcattgatgagagggcatgcaaattgtgcttcactttacagtgtttatcagagcacttaataaaatgtaaggctggtatttatttgaagttgtacagtatgacttaattcacatctgttggaatagaaaatatattctgctgagtatttaagaggctgtacatgttttcttttgtgtttggattctttgtactttttcatgttcagtacatcaataatcaaagttgaagggaaagaac

SEQ ID NO: 26284 - DNA, 638 bp, Macaca Mulatta
ttgcttaatcgctgccttatgacacttcacactatgatctgacatctattattaagttcttcttaggtgtactttgtaatcttttacatgtactgtgtaagtggatcttgcccccccttgacttcaagttcatggaggacaggacctccatctcttattttcaaggtttccaatgatgtacctgatacatttgttgctaggatgagaacagtatatcattgagaatattaacttaagttttgaaatttgttattgctttgatacagggtaaaatccaggacaaggaatatatcatcgaaggatttgaaaacatgccagctgcatttatgggaatgctgaaaggagataatttggggaaaacaatagtgaaagtatgaaaaaaaggacagatggaatctggaggccatttagatgattacttaatttgtttttcaccatttagcaaaaatgtatactaccttaaatgtctaagaaacagtactggtaatgagtttgatctacttaataaaatacatttaagtggtatgtaattagtgatggaggatggaagtttcacaatcaacaacaaccagtcacctcactgttcactacagcttcttctgagttgtggtagaaaataatggctttgaaatgtgaag

SEQ ID NO: 26285 - DNA, 575 bp, Macaca Mulatta
tgatggaggccttcaggaagactttccctgtatgaagagtgacgggcggatccacagcaacagctccttcgaagaggtttcccaggaattggaatccgatgacggctgaatgaacttgagacgcttcagcaaaggcagcattggtcacggagttcaagggaatcgatgagtaagcaacgtttcaaattcgggatgaaaagaccgccaaactattggctgaccaagctttttaaattcagaagagcaattctaaatctaaagaaatgtatcattaaagtaattacgttacattgaaacctgctgctgctgtgactgtgaggagggtgggagtgtggatggggaggaaggttctagactctcttcttgtttttctcatttcccaatgcctctctgtgggagagctccatgccagttttcaccactctcaggcaaatactctgcagctgttattggatgggccattccagtctgccttatgaaattccacaagaatgttaggggcacctatgggatctccagtgggatgggcagggtgctgatggggacgctggccacagggaggaaggaatatctct

SEQ ID NO: 26286 - DNA, 161 bp, Macaca Mulatta
atggcggagaccgtggctgacacccggcggctgatcaacaagccgcagaacctgaatgatgcctacggaccccccagcaacttcctcgagatcgatgtgagcaacccgcagacggtgggggtcggccggggccgcttcaccacttacgaaatcagggtcaa

SEQ ID NO: 26287 - DNA, 920 bp, Macaca Mulatta
atggaaccagaaaaccaaaccgaaatctcagaattctttcttcagggactctcagaaaagccagagcatcagaccctcctcttcacaacgttcctctccacatacctggtcaccatcattggaaatgtcctcattatcctggccatcatcacagacgctcacctccacacgcccatgtacttcttcctcttcaacctctcacttgttgacatcctattatcctccaccaccgtccccaagatgctagtgaacatccagactcagagcagagccatcacctttgcgggctgcctcacccagatgtatgccttccacctgttcgggaccatggacagctttctcctggcggtaatggccatcgaccgcttcgtggccattgtccatccgctgcgttacttggttctcatgtgccctcgtgtctgtgggttgctgctgggggtatcgtgggtgatcaccaacctccagtctctcatacacacctgcctcatggttcaactgaccttctgcgccagctccgaaatctcccacttcttttgtgacctcatgcccctgctgaagctctcctgctcggacacacacaccaacgagctgatgatctttgcttctggcattgtcatgggcaccagcccactctcctgcatcctcctctcgtacatccgcattttccggacagtctttaagatcccttcggctcggggcaagtggaaagccttctccacctgtggctcacatctcactgtggtgtcactgttctacgggaccatctttgctatgtacttacagcccgcatcccccagctcctcccagaaggacaaggcagccaccctaatgtgtggggtagtcatccccatgctcaacccctttatctacagcctacggaacaaggacggaaggcagccctgggaagctcatcggcaaag

SEQ ID NO: 26288 - DNA, 513 bp, Macaca Mulatta
tagtgtagaactgtactgtgatgatatatgtctactgtgactttgttttttggctaatgctattgatgaaattcatttggctatagattggtaatttaattttggtgcttaccacatttccaggcatttcagaagatggacacaaagaaaaaggaggaacagttgaagcttctcaaggagaaatatggcatcaacacagatccaccaaaataaatgttttctacattttcattttggactaaatcccatgaatgacaattttccacttttttttcctttttaattaatactaaatattgtgatttctaatttgaggttcaacatgacctacttgaaactttgatacatattagaatacattgtgttaataaacttacagctttttgtgaaacacctcaatcttttctcttgaactttcccttcctgtttgataccaggaaaaaacagtcgaagcttatcaaccattgtaggtgctcctagggattctgtgcttcttgagaacaggacctctta

SEQ ID NO: 26289 - DNA, 324 bp, Macaca Mulatta
gctgacacttcctccatggcccatttatcgccggcatcctctcaagtggttacctgttcaagactcaagcacagacgacaagaaaccaggggaaagaaaaattaagaggcatgctaaaaataattgaggttttcatgattcagcacctgcttttgtttcctgtgagatgagctaaattgctttcataccccagaaaagagctaaaaccatctaatgctcttatggcacagctgtgtgtagatttagttctctttatacttcatttctagcacagttgggtcttgatttatataagtagtttagaccttctcttcataatcttgc

SEQ ID NO: 26290 - DNA, 483 bp, Macaca Mulatta
gagaagtgggagctggacctggacatcgaggaggtcttcatccaccccaactacaccaagagcaccactgacaatgacatcgcgctgctgcgcctggcccagcccgccaccctctcgcagaccatcgtgcccatctgtctcccggacagcggccttgcagagcgcgagctcactcaggctggccaggagaccctcgtgacgggctggggctaccacagcagccgagagaaggaggccaagagaaaccgcaccttcatcctcaacttcatcaagattcccgtggtcccgcgcaatgagtgcagcgaggtcatgagcaacatggtgtctgagaacatgctgtgtgcgggcatccttggggaccggcaggacgcctgcgagggcgacagtggggggcccatggtcgcctccttccatggcacctggttcctggtgggcctggtgagctggggtgagggctgtgggctccttcacaactacggcgtt

SEQ ID NO: 26291 - DNA, 915 bp, Macaca Mulatta
  misc_feature (1)...(915): n = A,T,C or G
ttgagaacanggcactgtagtatgttgcccagtcttaacatttttgaagctgcatttaagtagactttggaccgttaaggtgggcaaaggaaatgacaaggggatggggtctgtgagagtcaattcaggggaaagatacaagattgatttgtaaaacccttgaaatgtagatttcttgtagatgtatccttcacgttgtaaatatgttttgtagagtgaagccatgggaagccatgtgtaacagagcttagacatccaaaactaatcaatgctgaggtggctaaatacctagccttttacatgtaaacctgtctgcaaaattagnnnnnnnnnnnnnnnnnnnnnttggggggttaatttatcattcagaaatcttgcattttcaaaaattcaagtgcaagcgccaggcgatctgtgtctaaggatacgatttttgaaccatatgggcagtgtacaaaatatgaaacaactgtttccacacttgcacctgatcaagagcagtgcttctccatttgttttgcagagaaatgtttttcatttcccgtgtgttccatttccctctgaaattctgattttatccatttttttaaggctcctctttatctcctttcttaaggcactgttgctatggcacttttctataaccttttcattcctgtgtacagtagcttaaaattgcagtgattgagcataacctacttgtttgtataaattattgaaatccatttgcaccccgtaagaatggacttaagagtactgctggacaggcatgtgtgcttaaagtacattgattgctcaaatataaggaaatggcccaatgaacatggttgtgggaggggaaagaggaaacagagctagtcagatgtgaattgtatctgttgtaataaacatgttaaaacaaaagaaaaaaaaaaa

SEQ ID NO: 26292 - DNA, 221 bp, Macaca Mulatta
atgatgagttttctacccattgttttttccattctagtagtggttgcatttgttcttggaaattttgccaatggctttatagcactgataaatttcattgcctggttcaagagacaaaagatctcctcagctgatcaaattattgctgctctggcggtctccagagttggtttgctctgggtaatagtcttacactggtatgcaacttgtgttgaatccaa

SEQ ID NO: 26293 - DNA, 417 bp, Macaca Mulatta
ctcaccttaaaataatctggattttctttgggcacaacagtcagacttgttgataatatatatgaagtttttattattaatatgctgaggaacttgaagattaataaaatatgctcttcagagaatgatatataaatattacatgtttgctttacctcatatgagttatttataacctcttgaatcatcttctgtacatgtggattttatccaaggatatttttatttttgttcctcatttcccatggctcctttgcatatgtgtgaaggagtttaaaatacatttcctccccatctaatttatttacttttttcatacaggaagaaacagaatgcttttcagaatattctaaaatggctttttgcaaaatatctaaaactatttttaatgaagtttttagcttaagaaacagctag

SEQ ID NO: 26294 - DNA, 1033 bp, Macaca Mulatta
  misc_feature (1)...(1033): n = A,T,C or G
gctgcaaactacttagacatcaaaggtttgcttgatgttacatgcaagactgttgccaatatgatcaaggggaagactcctgaggagattcgcaagaccttcaatatcaaaaatgactttactgaagaggaggaagcccaggtannnnnnnnnnnnnnnnnnnnnnnnnnnnnnnnnnnnnnnnnnnnnnnnnnnnnnnnnnnnnnnnnnnnnnnnnnnnnnnnnnnnnnnnnnnnnnnnnnnnnnnnnnnnnnnnnnnnnnnnnnnnnnnnnnnnnnnnnnnnnnnnnnnnnnnnnnnnnnnnnnnnnnnnnnnnnnnnnnnnnnnnnnnnnnnnnnnnnnnnnnnnnnnnnnnnnnnnnnnnnnnnnnnnnnnnnnnnnnnnnnnnnnnnnnnnnnnnnnnnnnnnnnnnnnnnnnnnnnnnnnnnnnnnnnnnnnnnnnnnnnnnnnnnnnnnnnnnnnnnnnnnnnnnnnnnnnnnnnnnnnnnnnnnnnnnnnnnnnnnnnnnnnnnnnnnnnnnnnnnnnnnnnnnnnnnnnnnnnnnnnnnnnnnnnnnnnnnnnnnnnnnnnnnnnnnnnnnnnnnnnnnnnnnnnnnnnnnnnnnnnnnnnnnnnnnnnnnnnnnnnnnnnnnnnnnnnnnnnnnnnnnnnnnnnnnnnnnnnnnnnnnnnnnnnnnnnnnnnnnnnnnnnnnnnnnnnnnnnnnnnnnnnnnnnnnnnnnnnnnnnnnnnnnnnnnnnnnnnnnnnnnnnnnnnaatcctcttagttttaaatatattgcctagagactcagttactacctagtttgtgggtttttgggagaaatgtaactggacagtttgttagcttttcaattaaaaaagacacttaacccatgtgggatgtcatctttttataatcagtgttcccacgtggggaaaattattcacactacttgcatgtaaaaaataatttaacttttatcattaaaatatgtggtaaaaccccagaaagcatccatcatgaatgcaagatactttcaataaaaagtaagt

SEQ ID NO: 26295 - DNA, 497 bp, Macaca Mulatta
  misc_feature (1)...(497): n = A,T,C or G
aggacgtgtcaggaaatgctgcatttctggccttcactccttttgggtttgttgttcttcaaggaaacaagagggtccacttcattaaatgnnnnnnnnnnnnnnnnnnnnnnnnnnnnnnnnnnnnnnnnnnnnnnnnnnnnnnnnnnnnnnnnnnnnnnnnnnnnnnnnnnnnnnnnnnnnnnnnnnnnnnnnnnnnnnnnnnnnnnnnnnnnnnnnnnnnnnnnnnnnnnnnnnnnnnnnnnnnnnnnnnnnnnnnnnnnnnnnnnnnnnnnnnnnnnnnnnnnnnnnnnnnnnnnnnnnnnnnnnnnnnnnnnnnnnnnnnnnnnnnnnnnnnnnnnnnnnnnnnnnnnnnnnnnnnnnnnnnnnnnnnnnnnnnnnnnnnnncagagcagggatggttcccagccggagctgtccctccataacccatggcccaaggctgagcagcgtccccaggacccgcaggagagctgttcacatctccatcatggaag

SEQ ID NO: 26296 - DNA, 937 bp, Macaca Mulatta
ggggtcaacctcacccgagagcagtgccaggatccaagtaaagtcccaagtgaaaacaaggatctgtatgagtactcgtgggtccagggccctttgaattccaatgagacggaccgactcccccggtgtgtgcgttccactgcacgattagccagggccttgtctcctgccttcgaactgagtcagtggagctctactgaatactctacatggactgagagccgctggaaagatatccgtgcccggatatttctcatcgccagcaaagagcttgagtttatcaccctgatagtgggcttcggcatcctcgtcttctccctcatcgtcacctactgcatcaatgccaaagctgatgtccttttcattgctccccgggagccaggagctgtgtcatactgaggaggaccccagcttttcctgccagctcagcagttcacttcctagagcatctgtcccactgggacacaaccactaatttgtcactggaacctccctgggcctgtctcagactgggattaacataaaagactggaactatccaaaagagacagggagagataaataagttgcctcccttcttccactccactttcccatctccccttccccatttcctcctccttctctactcatgccagattttgggaatacaaatagaagcttcttgctcctgtttaactcccttggttacccaccctaatttgcccttcagtatccttctactttttccgtcctgccctgtacctctctctgctcctcaacccacaaccctgtacccaagttaccttcctgactgggaaggacataaaaggtggaatgtcagggtcaaactacattgaacccctgaggaggacaggggcatctctgggccgagcctcctgtatccttcccactgtcctttcttcaggccctcagacgggcacattagggtgggcgt

SEQ ID NO: 26297 - DNA, 563 bp, Macaca Mulatta
  misc_feature (1)...(563): n = A,T,C or G
acggcagttgttaaattcactgactacggaaactatgaagaggtgctactgagcaatatcaagcccgttcagacagaggcatgggaggaagaaggcacctacgaccaaactctggagttccgtaggggaggtgatggccagccaagaagatccactcggccaactcaacaattttaccagccaccccgggctcggaactaatacgaaaaggaaactctttgtgaagaaacaagctggtgattaaaacatcctggtggaaacgtgttgaccttccactttctcttcagaataagtagcagctgtggtggatattattatttgaagaaagaaaaagcagattttagggtggaaaaaacattcaactcacacaaagaatgggaaaaaatactgagttaaataaagcaaataccttttacaagtgaaaggaagaatttttcttctgccatcaataaaacccattgtgctatttaagaaaatcacaataaaaaaaactcgcagggggggcccgggtaacccaannnnnnnnnnnnnnnnnnnnnnnnnnatcactgggcggcgtttac

SEQ ID NO: 26298 - DNA, 2001 bp, Macaca Mulatta
  misc_feature (1)...(2001): n = A,T,C or G
agctcccaaagcagttcaagtttgccccagagatggaggattatgtgggcaccttcctagaggggtgccaggatgaccctgagcggcagctggccgtgctagtggccttctcatccgtcaccaaccaaggcctccctgttgcgcctactttctggcgggtcgtgcggttcctgagccctccggccctgcggggctatgtggcctggctgcaggacatgtttctccagccagacctggactccttggttgacttcagcaccaacaaccagaagcaagcccaggacgcgtcgctccanncctgagcgagctgtgttccggctgaggaaatggatcatctttcgattggtgagcattgtggacagcctgcacctggagatggaggaggccttgactgcacaggtggccaggtnnnnnnnnnnnnnnnnnnnnnnnnnnnnnnnnnnnnnnnnnnnnnnnnnnnnnnnnnnnnnnnnnnnnnnnnnnnnnnnnnnnnnnnnnnnnnnnnnnnnnnnnnnnnnnnnnnnnnnnnnnnnnnnnnnnnnnnnnnnnnnnnnnnnnnnnnnnnnnnnnnnnnnnnnnnnnnnnnnnnnnnnnnnnnnnnnnnnnnnnnnnnnnnnnnnnnnnnnnnnnnnnnnnnnnnnnnnnnnnnnnnnnnnnnnnnnnnnnnnnnnnnnnnnnnnnnnnnnnnnnnnnnnnnnnnnnnnnnnnnnnnnnnnnnnnnnnnnnnnnnnnnnnnnnnnnnnnnnnnnnnnnnnnnnnnnnnnnnnnnnnnnnnnnnnnnnnnnnnnnnnnnnnnnnnnnnnnnnnnnnnnnnnnnnnnnnnnnnnnnnnnnnnnnnnnnnnnnnnnnnnnnnnnnnnnnnnnnnnnnnnnnnnnnnnnnnnnnnnnnnnnnnnnnnnnnnnnnnnnnnnnnnnnnnnnnnnnnnnnnnnnnnnnnnnnnnnnnnnnnnnnnnnnnnnnnnnnnnnnnnnnnnnnnnnnnnnnnnnnnnnnnnnnnnnnnnnnnnnnnnnnnnnnnnnnnnnnnnnnnnnnnnnnnnnnnnnnnnnnnnnnnnnnnnnnnnnnnnnnnnnnnnnnnnnnnnnnnnnnnnnnnnnnnnnnnnnnnnnnnnnnnnnnnnnnnnnnnnnnnnnnnnnnnnnnnnnnnnnnnnnnnnnnnnnnnnnnnnnnnnnnnnnnnnnnnnnnnnnnnnnnnnnnnnnnnnnnnnnnnnnnnnnnnnnnnnnnnnnnnnnnnnnnnnnnnnnnnnnnnnnnnnnnnnnnnnnnnnnnnnnnnnnnnnnnnnnnnnnnnnnnnnnnnnnnnnnnnnnnnnnnnnnnnnnnnnnnnnnnnnnnnnnnnnnnnnnnnnnnnnnnnnnnnnnnnnnnnnnnnnnnnnnnnnnnnnnnnnnnnnnnnnnnnnnnnnnnnnnnnnnnnnnnnnnnnnnnnnnnnnnnnnnnnnnnnnnnnnnnnnnnnnnnnnnnnnnnnnnnnnnnnnnnnnnnnnnnnnnnnnnnnnnnnnnnnnnnnnnnnnnnnnnnnnnnnnnnnnnnnnnnnnnnnnnnnnnnnnnnnnnnnnnnnnnnnnnnnnnnnnnnnnnnnnnnnnnnnnnnnnnnnnnnnnnnnnnnnnnnnnnnnnnncaccacctgtgccgtgcccggcgctactgccacgacttgggcgagcgcgcagaggcactgcatgcccaggtggagcggttggtgcagcaggctggccgccagcccgactccgccaccgccctctaccacttcaacgcctccctctacctgctccgggtcttgaagggcagcactgccgagggctgcatgcgtgagacacgggagaagcagaaagccggcactgaccccagccccgtgcccaccggcccgcaggnaggctgccagctgcttggacttgaacctggtgacccgggtgtactcatcagcgctgagctccttcctgaccaagcgcaacagccccctcacagttcccatgttcctcagcctcttctcccggcacccggtg

SEQ ID NO: 26299 - DNA, 659 bp, Macaca Mulatta
agtacgactcagcatacattttcccgcacacatttttacattgtacctttaggacttaatcatctccacttaaattgatgacacaagcagctaataaccatttttgggtttctgtctaaccttctaattgtctgttaaagccagattctctgaggtgtcccagtgagtggtggctctttttctttccacactggcacattcacttcccccactcttggcatgtaggaaataaacatttacataattggaaaaatccagatttctgatgccaaagggttaaagcctcttggatttcattgcagtgatatacagccactattttatttttgatcagtggcctttgggccactgtttagggcactgaacatcagtgtcagcattagggtttgggtttttgtttatcttgggtctttcttttttggcacatgtgaatcttgttttgtgtaaaatgaaatgactttctcttgttctctgatgatgggtttaaaattaaaagagcatctggtttcggtatggggatgatccaggattatgttgtgactgatatatattagttacttgtacattttcttttttgatctttgtaaggggaagactacaagtaacgagttttatataattaatttacatttgttacaggttttcatgttcaggataag

SEQ ID NO: 26300 - DNA, 560 bp, Macaca Mulatta
  misc_feature (1)...(560): n = A,T,C or G
tggagaagcccacccgggtcgtgggcgggttcggagctgcctccggggaggtgccctggcaggtcagcctgaaggaagggtcccggcacttctgtggagcgactgtggtgggggaccgctggctgctgtctgccgcccactgcttcaaccannnnnnnnnnnnnnnnnnnnnnnnnnnnnnnnnnnnnnnnnnnnnnnnnnnnnnnnnnnnnnnnnnnnnnnnnnnnnnnnnnnnnnnnnnnnnnnnnnnnnnnnnnnnnnnnnnnnnnnnnnnnnnnnnnnnnnnnnnnnnnnnnnnnnnnnnnnnnnnnnnnnnnnnnnnnnnnnnnnnnnnnnnnnnnnnnnnnnnnnnnnnnnnnnnnnnnnnnnnnnnnnnnnnnnnnnnnnnnnnnnnnnnnnnnnnnnnnnnnnnnnnnnnnnnnccaccaagcccgagctcctgcagaaggcgtccgtgggcatcatagaccagaagacctgtagcgtgctctacaacttctccctcacagaccgcatgatctgcgctggcttcctggaaggcaaagttgactcctgccagg

SEQ ID NO: 26301 - DNA, 97 bp, Macaca Mulatta
aggctgaaaagaagggaaccagcaatacgattatcggtatgatctttggatgttttgctttgttcgagttgctggcatgcttggtatttggaaacta

SEQ ID NO: 26302 - DNA, 891 bp, Macaca Mulatta
tctccttctgccccatggggctgcctggaaggcagtggccctcatctggctggtggccttctgcttccccacattccttctttggctcagcaagtggcaggatgcccagctggacgaggaaggagcttcatgcatcctaccactgagcatgggcacccagcagggatgcggcctcctggccattgttacctacacctccattctgtgcgttctgttcctctgcatggctctcattgcctactgcttctggaggatctatgcagaggccaagacttcaggcatctgggggcagggctattcccgggccaggggcaccctgctgatccactcagtgctgatcacattgtatgtgagcacaggggtggtgttctccctggacatggtgctaaccaggtaccaccacattgactctgagactcacaaatggctcctggcagctaacagtgaggtactcatgatgcttccccgtgccatgctcccatatctgtacatgctccgctaccggcagctgttgggcatggtccggggccacctcccatccaggaggcaccaggccgtctttaccatttcctagagttcttgagtccacagtgtggcaagttgaggttaaaaatcatatgttgaatgcagcagcgtccagttatggctaacttcttagaacagcacattataatcgtggaattgggcctttcagaggacctcaactgatgtttttcaccattttgatagtttttaaatagagaaagctcttttatgacactgaaatcctacttggaaatggaagcaagtaaaggcaatcaagcagggctctggtctaagtgaagccttgatctgcaaccctccagtggcttgctgcacaccctccatggccactgtggatgcatccttgct

SEQ ID NO: 26303 - DNA, 795 bp, Macaca Mulatta
  misc_feature (1)...(795): n = A,T,C or G
gggctctttcccatcgtgcaagatggcgggtgaaaaagttgagaagccagatactaaagagaagaaacccgaagccaagaaggctgatgctggtggcaaggtgaaaaagggtaacctcaaggctaagaagcccaagaaggggaagccccattgcagccgcaaccctgtccttgtcagaggaattggcaggtattcccgatctgccatgtattccagaaaggccatgtacaagaggaagtactcagccgctaaatccaagnnnnnnnnnnnnnnnnnnnngaagggtcttgcaactcttacaaagccagttggtggtgacaagaacggcggtacccgggtgggtaaacttcgcaaaatgcctagatattatcctactggagatgtgcctcggaaagctgttgagccacggcaagaaacccttcagtcagcacgtgagaaaactgcgagccagcattacccccgggaccagttctgatcatcctcgctggacgcgacaagagcaaggaggggggggttcctgaagcggctgggtagtggcttggtacgtgtgacgggagctgctggcggccgggcaggtcctccacggaagaaacgcccggaaaagtttggagttgccgcccggggggagaagggaggatggaccactggggaaaaccgcgaaagggtcttacggaagggcggcctgtcagggagaaaacaaggcggccgggaaaaccgcgcggacggcgccgnggagggcctacggaggcgttccaaggacggaggagaaaaagggagagaggggccacagaaaat

SEQ ID NO: 26304 - DNA, 420 bp, Macaca Mulatta
aagtcttatgagagagaaactctttgaaagcaaagaaagtcatcactgtggagaaagcttcaaccagattgcagatgacatgctgaacaagaaaactcttcctgaagtaataccgtgtgaaagcagtgtgtgtggagaagttggcatgggtcactcatctcttaataggcacatcagagctgacactggacacaagtcttctgagtatcaggaatatggagagaatccatatagaaataaggaatgtaagaaagccttcagttatcttgactcctttcaatcacatgatgaagcttgcactaaagagaaaccctatgatggtaaagaatgtgcggaaaccttcatttcccattcatgcattcaaagacacaaggtgatgcaccgtgaagatggaccttataaatgtaagttttgtgggaa

SEQ ID NO: 26305 - DNA, 12952 bp, Macaca Mulatta
  misc_feature (1)...(12952): n = A,T,C or G
ggtccgcaagcacatcaatgatctttatgaagatctgcgggatggccataacctgatctctctgttggaggtcctctcaggcatcaaactgnnnnnnnnnnnnnnnnnnnnnnnnnnnnnnnnnnnnnnnnnnnnnnnnnnnnnnnnnnnnnnnnnnnnnnnnnnnnnnnnnnnnnnnnnnnnnnnnnnnnnnnnnnnnnnnnnnnnnnnnnnnnnnnnnnnnnnnnnnnnnnnnnnnnnnnnnnnnnnnnnnnnnnnnnnnnnnnnnnnnnnnnnnnnnnnnnnnnnnnnnnnnnnnnnnnnnnnnnnnnnnnnnnnnnnnnnnnnnnnnnnnnnnnnnnnnnnnnnnnnnnnnnnnnnnnnnnnnnnnnnnnnnnnnnnnnnnnnnnnnnnnnnnnnnnnnnnnnnnnnnnnnnnnnnnnnnnnnnnnnnnnnnnnnnnnnnnnnnnnnnnnnnnnnnnnnnnnnnnnnnnnnnnnnnnnnnnnnnnnnnnnnnnnnnnnnnnnnnnnnnnnnnnnnnnnnnnnnnnnnnnnnnnnnnnnnnnnnnnnnnnnnnnnnnnnnnnnnnnnnnnnnnnnnnnnnnnnnnnnnnnnnnnnnnnnnnnnnnnnnnnnnnnnnnnnnnnnnnnnnnnnnnnnnnnnnnnnnnnnnnnnnnnnnnnnnnnnnnnnnnnnnnnnnnnnnnnnnnnnnnnnnnnnnnnnnnnnnnnnnnnnnnnnnnnnnnnnnnnnnnnnnnnnnnnnnnnnnnnnnnnnnnnnnnnnnnnnnnnnnnnnnnnnnnnnnnnnnnnnnnnnnnnnnnnnnnnnnnnnnnnnnnnnnnnnnnnnnnnnnnnnnnnnnnnnnnnnnnnnnnnnnnnnnnnnnnnnnnnnnnnnnnnnnnnnnnnnnnnnnnnnnnnnnnnnnnnnnnnnnnnnnnnnnnnnnnnnnnnnnnnnnnnnnnnnnnnnnnnnnnnnnnnnnnnnnnnnnnnnnnnnnnnnnnnnnnnnnnnnnnnnnnnnnnnnnnnnnnnnnnnnnnnnnnnnnnnnnnnnnnnnnnnnnnnnnnnnnnnnnnnnnnnnnnnnnnnnnnnnnnnnnnnnnnnnnnnnnnnnnnnnnnnnnnnnnnnnnnnnnnnnnnnnnnnnnnnnnnnnnnnnnnnnnnnnnnnnnnnnnnnnnnnnnnnnnnnnnnnnnnnnnnnnnnnnnnnnnnnnnnnnnnnnnnnnnnnnnnnnnnnnnnnnnnnnnnnnnnnnnnnnnnnnnnnnnnnnnnnnnnnnnnnnnnnnnnnnnnnnnnnnnnnnnnnnnnnnnnnnnnnnnnnnnnnnnnnnnnnnnnnnnnnnnnnnnnnnnnnnnnnnnnnnnnnnnnnnnnnnnnnnnnnnnnnnnnnnnnnnnnnnnnnnnnnnnnnnnnnnnnnnnnnnnnnnnnnnnnnnnnnnnnnnnnnnnnnnnnnnnnnnnnnnnnnnnnnnnnnnnnnnnnnnnnnnnnnnnnnnnnnnnnnnnnnnnnnnnnnnnnnnnnnnnnnnnnnnnnnnnnnnnnnnnnnnnnnnnnnnnnnnnnnnnnnnnnnnnnnnnnnnnnnnnnnnnnnnnnnnnnnnnnnnnnnnnnnnnnnnnnnnnnnnnnnnnnnnnnnnnnnnnnnnnnnnnnnnnnnnnnnnnnnnnnnnnnnnnnnnnnnnnnnnnnnnnnnnnnnnnnnnnnnnnnnnnnnnnnnnnnnnnnnnnnnnnnnnnnnnnnnnnnnnnnnnnnnnnnnnnnnnnnnnnnnnnnnnnnnnnnnnnnnnnnnnnnnnnnnnnnnnnnnnnnnnnnnnnnnnnnnnnnnnnnnnnnnnnnnnnnnnnnnnnnnnnnnnnnnnnnnnnnnnnnnnnnnnnnnnnnnnnnnnnnnnnnnnnnnnnnnnnnnnnnnnnnnnnnnnnnnnnnnnnnnnnnnnnnnnnnnnnnnnnnnnnnnnnnnnnnnnnnnnnnnnnnnnnnnnnnnnnnnnnnnnnnnnnnnnnnnnnnnnnnnnnnnnnnnnnnnnnnnnnnnnnnnnnnnnnnnnnnnnnnnnnnnnnnnnnnnnnnnnnnnnnnnnnnnnnnnnnnnnnnnnnnnnnnnnnnnnnnnnnnnnnnnnnnnnnnnnnnnnnnnnnnnnnnnnnnnnnnnnnnnnnnnnnnnnnnnnnnnnnnnnnnnnnnnnnnnnnnnnnnnnnnnnnnnnnnnnnnnnnnnnnnnnnnnnnnnnnnnnnnnnnnnnnnnnnnnnnnnnnnnnnnnnnnnnnnnnnnnnnnnnnnnnnnnnnnnnnnnnnnnnnnnnnnnnnnnnnnnnnnnnnnnnnnnnnnnnnnnnnnnnnnnnnnnnnnnnnnnnnnnnnnnnnnnnnnnnnnnnnnnnnnnnnnnnnnnnnnnnnnnnnnnnnnnnnnnnnnnnnnnnnnnnnnnnnnnnnnnnnnnnnnnnnnnnnnnnnnnnnnnnnnnnnnnnnnnnnnnnnnnnnnnnnnnnnnnnnnnnnnnnnnnnnnnnnnnnnnnnnnnnnnnnnnnnnnnnnnnnnnnnnnnnnnnnnnnnnnnnnnnnnnnnnnnnnnnnnnnnnnnnnnnnnnnnnnnnnnnnnnnnnnnnnnnnnnnnnnnnnnnnnnnnnnnnnnnnnnnnnnnnnnnnnnnnnnnnnnnnnnnnnnnnnnnnnnnnnnnnnnnnnnnnnnnnnnnnnnnnnnnnnnnnnnnnnnnnnnnnnnnnnnnnnnnnnnnnnnnnnnnnnnnnnnnnnnnnnnnnnnnnnnnnnnnnnnnnnnnnnnnnnnnnnnnnnnnnnnnnnnnnnnnnnnnnnnnnnnnnnnnnnnnnnnnnnnnnnnnnnnnnnnnnnnnnnnnnnnnnnnnnnnnnnnnnnnnnnnnnnnnnnnnnnnnnnnnnnnnnnnnnnnnnnnnnnnnnnnnnnnnnnnnnnnnnnnnnnnnnnnnnnnnnnnnnnnnnnnnnnnnnnnnnnnnnnnnnnnnnnnnnnnnnnnnnnnnnnnnnnnnnnnnnnnnnnnnnnnnnnnnnnnnnnnnnnnnnnnnnnnnnnnnnnnnnnnnnnnnnnnnnnnnnnnnnnnnnnnnnnnnnnnnnnnnnnnnnnnnnnnnnnnnnnnnnnnnnnnnnnnnnnnnnnnnnnnnnnnnnnnnnnnnnnnnnnnnnnnnnnnnnnnnnnnnnnnnnnnnnnnnnnnnnnnnnnnnnnnnnnnnnnnnnnnnnnnnnnnnnnnnnnnnnnnnnnnnnnnnnnnnnnnnnnnnnnnnnnnnnnnnnnnnnnnnnnnnnnnnnnnnnnnnnnnnnnnnnnnnnnnnnnnnnnnnnnnnnnnnnnnnnnnnnnnnnnnnnnnnnnnnnnnnnnnnnnnnnnnnnnnnnnnnnnnnnnnnnnnnnnnnnnnnnnnnnnnnnnnnnnnnnnnnnnnnnnnnnnnnnnnnnnnnnnnnnnnnnnnnnnnnnnnnnnnnnnnnnnnnnnnnnnnnnnnnnnnnnnnnnnnnnnnnnnnnnnnnnnnnnnnnnnnnnnnnnnnnnnnnnnnnnnnnnnnnnnnnnnnnnnnnnnnnnnnnnnnnnnnnnnnnnnnnnnnnnnnnnnnnnnnnnnnnnnnnnnnnnnnnnnnnnnnnnnnnnnnnnnnnnnnnnnnnnnnnnnnnnnnnnnnnnnnnnnnnnnnnnnnnnnnnnnnnnnnnnnnnnnnnnnnnnnnnnnnnnnnnnnnnnnnnnnnnnnnnnnnnnnntatttgcagaaattgagagaaatcagacaaaactggatcaatgtcaaaaattttcccagcagtactctactattgtaaaggnnnnnnnnnnnnnnnnnnnnnnnnnnnnnnnnnnnnnnnnnnnnnnnnnnnnnnnnnnnnnnnnnnnnnnnnnnnnnnnnnnnnnnnnnnnnnnnnnnnnnnnnnnnnnnnnnnnnnnnnnnnnnnnnnnnnnnnnnnnnnnnnnnnnnnnnnnnnnnnnnnnnnnnnnnnnnnnnnnnnnnnnnnnnnnnnnnnnnnnnnnnnnnnnnnnnnnnnnnnnnnnnnnnnnnnnnnnnnnnnnnnnnnnnnnnnnnnnnnnnnnnnnnnnnnnnnnnnnnnnnnnnnnnnnnnnnnnnnnnnnnnnnnnnnnnnnnnnnnnnnnnnnnnnnnnnnnnnnnnnnnnnnnnnnnnnnnnnnnnnnnnnnnnnnnnnnnnnnnnnnnnnnnnnnnnnnnnnnnnnnnnnnnnnnnnnnnnnnnnnnnnnnnnnnnnnnnnnnnnnnnnnnnnnnnnnnnnnnnnnnnnnnnnnnnnnnnnnnnnnnnnnnnnnnnnnnnnnnnnnnnnnnnnnnnnnnnnnnnnnnnnnnnnnnnnnnnnnnnnnnnnnnnnnnnnnnnnnnnnnnnnnnnnnnnnnnnnnnnnnnnnnnnnnnnnnnnnnnnnnnnnnnnnnnnnnnnnnnnnnnnnnnnnnnnnnnnnnnnnnnnnnnnnnnnnnnnnnnnnnnnnnnnnnnnnnnnnnnnnnnnnnnnnnnnnnnnnnnnnnnnnnnnnnnnnnnnnnnnnnnnnnnnnnnnnnnnnnnnnnnnnnnnnnnnnnnnnnnnnnnnnnnnnnnnnnnnnnnnnnnnnnnnnnnnnnnnnnnnnnnnnnnnnnnnnnnnnnnnnnnnnnnnnnnnnnnnnnnnnnnnnnnnnnnnnnnnnnnnnnnnnnnnnnnnnnnnnnnnnnnnnnnnnnnnnnnnnnnnnnnnnnnnnnnnnnnnnnnnnnnnnnnnnnnnnnnnnnnnnnnnnnnnnnnnnnnnnnnnnnnnnnnnnnnnnnnnnnnnnnnnnnnnnnnnnnnnnnnnnnnnnnnnnnnnnnnnnnnnnnnnnnnnnnnnnnnnnnnnnnnnnnnnnnnnnnnnnnnnnnnnnnnnnnnnnnnnnnnnnnnnnnnnnnnnnnnnnnnnnnnnnnnnnnnnnnnnnnnnnnnnnnnnnnnnnnnnnnnnnnnnnnnnnnnnnnnnnnnnnnnnnnnnnnnnnnnnnnnnnnnnnnnnnnnnnnnnnnnnnnnnnnnnnnnnnnnnnnnnnnnnnnnnnnnnnnnnnnnnnnnnnnnnnnnnnnnnnnnnnnnnnnnnnnnnnnnnnnnnnnnnnnnnnnnnnnnnnnnnnnnnnnnnnnnnnnnnnnnnnnnnnnnnnnnnnnnnnnnnnnnnnnnnnnnnnnnnnnnnnnnnnnnnnnnnnnnnnnnnnnnnnnnnnnnnnnnnnnnnnnnnnnnnnnnnnnnnnnnnnnnnnnnnnnnnnnnnnnnnnnnnnnnnnnnnnnnnnnnnnnnnnnnnnnnnnnnnnnnnnnnnnnnnnnnnnnnnnnnnnnnnnnnnnnnnnnnnnnnnnnnnnnnnnnnnnnnnnnnnnnnnnnnnnnnnnnnnnnnnnnnnnnnnnnnnnnnnnnnnnnnnnnnnnnnnnnnnnnnnnnnnnnnnnnnnnnnnnnnnnnnnnnnnnnnnnnnnnnnnnnnnnnnnnnnnnnnnnnnnnnnnnnnnnnnnnnnnnnnnnnnnnnnnnnnnnnnnnnnnnnnnnnnnnnnnnnnnnnnnnnnnnnnnnnnnnnnnnnnnnnnnnnnnnnnnnnnnnnnnnnnnnnnnnnnnnnnnnnnnnnnnnnnnnnnnnnnnnnnnnnnnnnnnnnnnnnnnnnnnnnnnnnnnnnnnnnnnnnnnnnnnnnnnnnnnnnnnnnnnnnnnnnnnnnnnnnnnnnnnnnnnnnnnnnnnnnnnnnnnnnnnnnnnnnnnnnnnnnnnnnnnnnnnnnnnnnnnnnnnnnnnnnnnnnnnnnnnnnnnnnnnnnnnnnnnnnnnnnnnnnnnnnnnnnnnnnnnnnnnnnnnnnnnnnnnnnnnnnnnnnnnnnnnnnnnnnnnnnnnnnnnnnnnnnnnnnnnnnnnnnnnnnnnnnnnnnnnnnnnnnnnnnnnnnnnnnnnnnnnnnnnnnnnnnnnnnnnnnnnnnnnnnnnnnnnnnnnnnnnnnnnnnnnnnnnnnnnnnnnnnnnnnnnnnnnnnnnnnnnnnnnnnnnnnnnnnnnnnnnnnnnnnnnnnnnnnnnnnnnnnnnnnnnnnnnnnnnnnnnnnnnnnnnnnnnnnnnnnnnnnnnnnnnnnnnnnnnnnnnnnnnnnnnnnnnnnnnnnnnnnnnnnnnnnnnnnnnnnnnnnnnnnnnnnnnnnnnnnnnnnnnnnnnnnnnnnnnnnnnnnnnnnnnnnnnnnnnnnnnnnnnnnnnnnnnnnnnnnnnnnnnnnnnnnnnnnnnnnnnnnnnnnnnnnnnnnnnnnnnnnnnnnnnnnnnnnnnnnnnnnnnnnnnnnnnnnnnnnnnnnnnnnnnnnnnnnnnnnnnnnnnnnnnnnnnnnnnnnnnnnnnnnnnnnnnnnnnnnnnnnnnnnnnnnnnnnnnnnnnnnnnnnnnnnnnnnnnnnnnnnnnnnnnnnnnnnnnnnnnnnnnnnnnnnnnnnnnnnnnnnnnnnnnnnnnnnnnnnnnnnnnnnnnnnnnnnnnnnnnnnnnnnnnnnnnnnnnnnnnnnnnnnnnnnnnnnnnnnnnnnnnnnnnnnnnnnnnnnnnnnnnnnnnnnnnnnnnnnnnnnnnnnnnnnnnnnnnnnnnnnnnnnnnnnnnnnnnnnnnnnnnnnnnnnnnnnnnnnnnnnnnnnnnnnnnnnnnnnnnnnnnnnnnnnnnnnnnnnnnnnnnnnnnnnnnnnnnnnnnnnnnnnnnnnnnnnnnnnnnnnnnnnnnnnnnnnnnnnnnnnnnnnnnnnnnnnnnnnnnnnnnnnnnnnnnnnnnnnnnnnnnnnnnnnnnnnnnnnnnnnnnnnnnnnnnnnnnnnnnnaggttccatactgccctctgtaggaagctctgtaggcagtgtaaacggataccacacctgcaaagnnnnnnnnnnnnnnnnnnnnnnnnnnnnnnnnnnnnnnnnnnnnnnnnnnnnnnnnnnnnnnnnnnnnnnnnnnnnnnnnnnnnnnnnnnnnnnnnnnnnnnnnnnnnnnnnnnnnnnnnnnnnnnnnnnnnnnnnnnnnnnnnnnnnnnnnnnnnnnnnnnnnnnnnnnnnnnnnnnnnnnnnnnnnnnnnnnnnnnnnnnnnnnnnnnnnnnnnnnnnnnnnnnnnnnnnnnnnnnnnaggccttcctggctgaattggaacagaattctccaaaaattcaaaannnnnnnnnnnnnnnnnnnnnnnnnnnnnnnnnnnnnnnnnnnnnnnnnnnnnnnnnnnnnnnnnnnnnnnnnnnnnnnnnnnnnnnnnnnnnnnnnnnnnnnnnnnnnnnnnnnnnnnnnnnnnnnnnnnnnnnnnnnnnnnnnnnnnnnnnnnnnnnnnnnnnnnnnnnnnnnnnnnnnnnnnnnnnnnnnnnnnnnnnnnnnnnnnnnnnnnnnnnnnnnnnnnnnnnnnnnnnnnnnnnnnnnnnnnnnnnnnnnnnnnnnnnnnnnnnnnnnnnnnnnnnnnnnnnnnnnnnnnnnnnnnnnnnnnnnnnnnnnnnnnnnnnnnnnnnnnnnnnnnnnnnnnnnnnnnnnnnnnnnnnnnnnnnnnnnnnnnnnnnnnnnnnnnnnnnnnnnnnnnnnnnnnnnnnnnnnnnnnnnnnnnnnnnnnnnnnnnnnnnnnnnnnnnnnnnnnnnnnnnnnnnnnnnnnnnnnnnnnnnnnnnnnnnnnnnnnnnnnnnnnnnnnnnnnnnnnnnnnnnnnnnnnnnnnnnnnnnnnnnnnnnnnnnnnnnnnnnnnnnnnnnnnnnnnnnnnnnnnnnnnnnnnnnnnnnnnnnnnnnnnnnnnnnnnnnnnnnnnnnnnnnnnnnnnnnnnnnnnnnnnnnnnnnnnnnnnnnnnnnnnnnnnnnnnnnnnnnnnnnnnnnnnnnnnnnnnnnnnnnnnnnnnnnnnnnnnnnnnnnnnnnnnnnnnnnnnnnnnnnnnnnnnnnnnnnnnnnnnnnnnnnnnnnnnnnnnnnnnnnnnnnnnnnnnnnnnnnnnnnnnnnnnnnnnnnnnnnnnnnnnnnnnnnnnnnnnnnnnnnnnnnnnnnnnnnnnnnnnnnnnnnnnnnnnnnnnnnnnnnnnnnnnnnnnnnnnnnnnnnnnnnnnnnnnnnnnnnnnnnnnnnnnnnnnnnnnnnnnnnnnnnnnnnnnnnnnnnnnnnnnnnnnnnnnnnnnnnnnnnnnnnnnnnnnnnnnnnnnnnnnnnnnnnnnnnnnnnnnnnnnnnnnnnnnnnnnnnnnnnnnnnnnnnnnnnnnnnnnnnnnnnnnnnnnnnnnnnnnnnnnnnnnnnnnnnnnnnnnnnnnnnnnnnnnnnnnnnnnnnnnnnnnnnnnnnnnnnnnnnnnnnnnnnnnnnnnnnnnnnnnnnnnnnnnnnnnnnnnnnnnnnnnnnnnnnnnnnnnnnnnnnnnnnnnnnnnnnnnnnnnnnnnnnnnnnnnnnnnnnnnnnnnnnnnnnnnnnnnnnnnnnnnnnnnnnnnnnnnnnnnnnnnnnnnnnnnnnnnnnnnnnnnnnnnnnnnnnnnnnnnnnnnnnnnnnnnnnnnnnnnnnnnnnnnnnnnnnnnnnnnnnnnnnnnnnnnnnnnnnnnnnnnnnnnnnnnnnnnnnnnnnnnnnnnnnnnnnnnnnnnnnnnnnnnnnnnnnnnnnnnnnnnnnnnnnnnnnnnnnnnnnnnnnnnnnnnnnnnnnnnnnnnnnnnnnnnnnnnnnnnnnnnnnnnnnnnnnnnnnnnnnnnnnnnnnnnnnnnnnnnnnnnnnnnnnnnnnnnnnnnnnnnnnnnnnnnnnnnnnnnnnnnnnnnnnnnnnnnnnnnnnnnnnnnnnnnnnnnnnnnnnnnnnnnnnnnnnnnnnnnnnnnnnnnnnnnnnnnnnnnnnnnnnnnnnnnnnnnnnnnnnnnnnnnnnnnnnnnnnnnnnnnnnnnnnnnnnnnnnnnnnnnnnnnnnnnnnnnnnnnnnnnnnnnnnnnnnnnnnnnnnnnnnnnnnnnnnnnnnnnnnnnnnnnnnnnnnnnnnnnnnnnnnnnnnnnnnnnnnnnnnnnnnnnnnnnnnnnnnnnnnnnnnnnnnnnnnnnnnnnnnnnnnnnnnnnnnnnnnnnnnnnnnnnnnnnnnnnnnnnnnnnnnnnnnnnnnnnnnnnnnnnnnnnnnnnnnnnnnnnnnnnnnnnnnnnnnnnnnnnnnnnnnnnnnnnnnnnnnnnnnnnnnnnnnnnnnnnnnnnnnnnnnnnnnnnnnnnnnnnnnnnnnnnnnnnnnnnnnnnnnnnnnnnnnnnnnnnnnnnnnnnnnnnnnnnnnnnnnnnnnnnnnnnnnnnnnnnnnnnnnnnnnnnnnnnnnnnnnnnnnnnnnnnnnnnnnnnnnnnnnnnnnnnnnnnnnnnnnnnnnnnnnnnnnnnnnnnnnnnnnnnnnnnnnnnnnnnnnnnnnnnnnnnnnnnnnnnnnnnnnnnnnnnnnnnnnnnnnnnnnnnnnnnnnnnnnnnnnnnnnnnnnnnnnnnnnnnnnnnnnnnnnnnnnnnnnnnnnnnnnnnnnnnnnnnnnnnnnnnnnnnnnnnnnnnnnnnnnnnnnnnnnnnnnnnnnnnnnnnnnnnnnnnnnnnnnnnnnnnnnnnnnnnnnnnnnnnnnnnnnnnnnnnnnnnnnnnnnnnnnnnnnnnnnnnnnnnnnnnnnnnnnnnnnnnnnnnnnnnnnnnnnnnnnnnnnnnnnnnnnnnnnnnnnnnnnnnnnnnnnnnnnnnnnnnnnnnnnnnnnnnnnnnnnnnnnnnnnnnnnnnnnnnnnnnnnnnnnnnnnnnnnnnnnnnnnnnnnnnnnnnnnnnnnnnnnnnnnnnnnnnnnnnnnnnnnnnnnnnnnnnnnnnnnnnnnnnnnnnnnnnnnnnnnnnnnnnnnnnnnnnnnnnnnnnnnnnnnnnnnnnnnnnnnnnnnnnnnnnnnnnnnnnnnnnnnnnnnnnnnnnnnnnnnnnnnnnnnnnnnnnnnnnnnnnnnnnnnnnnnnnnnnnnnnnnnnnnnnnnnnnnnnnnnnnnnnnnnnnnnnnnnnnnnnnnnnnnnnnnnnnnnnnnnnnnnnnnnnnnnnnnnnnnnnnnnnnnnnnnnnnnnnnnnnnnnnnnnnnnnnnnnnnnnnnnnnnnnnnnnnnnnnnnnnnnnnnnnnnnnnnnnnnnnnnnnnnnnnnnnnnnnnnnnnnnnnnnnnnnnnnnnnnnnnnnnnnnnnnnnnnnnnnnnnnnnnnnnnnnnnnnnnnnnnnnnnnnnnnnnnnnnnnnnnnnnnnnnnnnnnnnnnnnnnnnnnnnnnnnnnnnnnnnnnnnnnnnnnnnnnnnnnnnnnnnnnnnnnnnnnnnnnnnnnnnnnnnnnnnnnnnnnnnnnnnnnnnnnnnnnnnnnnnnnnnnnnnnnnnnnnnnnnnnnnnnnnnnnnnnnnnnnnnnnnnnnnnnnnnnnnnnnnnnnnnnnnnnnnnnnnnnnnnnnnnnnnnnnnnnnnnnnnnnnnnnnnnnnnnnnnnnnnnnnnnnnnnnnnnnnnnnnnnnnnnnnnnnnnnnnnnnnnnnnnnnnnnnnnaggtgaggaggtgttacttatccaggaaaaactagatggaataaagactcgttacacagacatcacagttactagctccaaggccctcagaactttagagcaagcccggcaactggccaccaagttccagtctacttacgaggaactgaccgggtggctgagggaggtggaggaggagctggcagccagtggaggacagtctcccacaggggagcagataccccagtttcagcaaagacagaaggnnnnnnnnnnnnnnnnnnnnnnnnnnnnnnnnnnnnnnnnnnnnnnnnnnnnnnnnnnnnnnnnnnnnnnnnnnnnnnnnnnnnnnnnnnnnnnnnnnnnnnnnnnnnnnnnnnnnnnnnnnnnnnnnnnnnnnnnnnnnnnnnnnnnnnnnnnnnnnnnnnnnnnnnnnnnnnnnnnnnnnnnnnnnnnnnnnnnnnnnnnnnnnnnnnnnnnnnnnnnnnnnnnnnnnnnnnnnnnnnnnnnnnnnnnnnnnnnnnnnnnnnnnnnnnnnnnnnnnnnnnnnnnnnnnnnnnnnnnnnnnnnnnnnnnnnnnnnnnnnnnnnnnnnnnnnnnnnnnnnnnnnnnnnnnnnnnnnnnnnnnnnnnnnnnnnnnnnnnnnnnnnnnnnnnnnnnnnnnnnnnnnnnnnnnnnnnnnnnnnnnnnnnnnnnnnnnnnnnnnnnnnnnnnnnnnnnnnnnnnnnnnnnnnnnnnnnnnnnnnnnnnnnnnnnnnnnnnnnnnnnnnnnnnnnnnnnnnnnnnnnnnnnnnnnnnnnnnnnnnnnnnnnnnnnnnnnnnnnnnnnnnnnnnnnnnnnnnnnnnnnnnnnnnnnnnnnnnnnnnnnnnnnnnnnnnnnnnnnnnnnnnnnnnnnnnnnnnnnnnnnnnnnnnnnnnnnnnnnnnnnnnnnnnnnnnnnnnnnnnnnnnnnnnnnnnnnnnnnnnnnnnnnnnnnnnnnnnnnnnnnnnnnnnnnnnnnnnnnnnnnnnnnnnnnnnnnnnnnnnnnnnnnnnnnnnnnnnnnnnnnnnnnnnnnnnnnnnnnnnnnnnnnnnnnnnnnnnnnnnnnnnnnnnnnnnnnnnnnnnnnnnnnnnnnnnnnnnnnnnnnnnnnnnnnnnnnnnnnnnnnnnnnnnnnnnnnnnnnnnnnnnnnnnnnnnnnnnnnnnnnnnnnnnnnnnnnnnnnnnnnnnnnnnnnnnnnnnnnnnnnnnnnnnnnnnnnnnnnnnnnnnnnnnnnnnnnnnnnnnnnnnnnnnnnnnnnnnnnnnnnnnnnnnnnnnnnnnnnnnnnnnnnnnnnnnnnnnnnnnnnnnnnnnnnnnnnnnnnnnnnnnnnnnnnnnnnnnnnnnnnnnnnnnnnnnnnnnnnnnnnnnnnnnnnnnnnnnnnnnnnnnnnnnnnnnnnnnnnnnnnnnnnnnnnnnnnnnnnnnnnnnnnnnnnnnnnntctggtatgacatggcagctctcctgaccaccatcaaagacacccaggatattgtccatgacttggaaagcccaggcattgatccttccatcatcaaacaacaggttgaagctgctgagnnnnnnnnnnnnnnnnnnnnnnnnnnnnnnnnnnnnnnnnnnnnnnnnnnnnnnnnnnnnnnnnnnnnnnnnnnnnnnnnnnnnnnnnnnnnnnnnnnnnnnnnnnnnnnnnnnnnnnnnnagatgaataatgcttgggagaacttaaacaaaacatggaaagagaggctagaaaaacttgaggatgctatgcaagctgctgtgcagtatcaggacactcttcagnnnnnnnnnnnnnnnnnnnnnnnnnnnnnnnnnnnnnnnnnnnnnnnnnnnnnnnnnnnnnnnnnnnnnnnnnnnnnnnnnnnnnnnnnnnnnnnnnnnnnnnnnnnnnnnnnnnnnnnnnnnnnnnnnnnnnnnnnnnnnnnnnnnnnnnnnnnnnnnnnnnnnnnnnnnnnnnnnnnnnnnnnnnnnnnnnnnnnnnnnnnnnnnnnnnnnnnnnnnnnnnnnnnnnnnnnnnnnnnnnnnnnnnnnnnnnnnnnnnnnnnnnnnnnnnnnnnnnnnnnnnnnnnnnnnnnnnnnnnnnnnnnnnnnnnnnnnnnnnnnnnnnnnnnnnnnnnnnnnnnnnnnnnnnnnnnnnnnnnnnnnnnnnnnnnnnnnnnnnnnnnnnnnnnnnnnnnnnnnnnnnnnnnnnnnnnnnnnnnnnnnnnnnnnnnnnnnnnnnnnnnnnnnnnnnnnnnnnnnnnnnnnnnnnnnnnnnnnnnnnnnnnnnnnnnnnnnnnnnnnnnnnnnnnnnnnnnnnnnnnnnnnnnnnnnnnnnnnnnnnnnnnnnnnnnnnnnnnnnnnnnnnnnnnnnnnnnnnnnnnnnnnnnnnnnnnnnnnnnnnnnnnnnnnnnnnnnnnnnnnnnnnnnggcccagggcttccacagtgaaattgaagatttcctcttggaacttactagaatggagagccagctttctgcatctaagcccacaggaggacttcctgaaactgctagggaacagcttgatacacatatgg

SEQ ID NO: 26306 - DNA, 376 bp, Macaca Mulatta
  misc_feature (1)...(376): n = A,T,C or G
ntgggtatccattgcccagctcctgcccacactcctgccctgaccagagtcatcatgtctcttgaacagaagagtcagcactgcaagcctgaggaaggccttgaggtccaagaagaggccctgggcctggtgagtgcgcaggctgccgctactgaagagcaggaagttgcgtcctcctcctctcctctggtcccaggcaccctggggaggtgcctgctgctgggtcgccaggtcctctccagagtcctcaggaagcctctgccttccccactgccattgatttcactctatggaggtaatccattaaggaatccagaaaccaagaagaggacgggccaagtacctttcctgacctggagtccgtgttctgagcagc

SEQ ID NO: 26307 - DNA, 802 bp, Macaca Mulatta
gggggccgccggggccgccgcgcacgccatgggagccgtgactgacgatgaagttatacggaagcgtctcctcattgatggagatggtgctggagatgatcggagaattaatctgctagtgaagagtttcattaaatggtgcaactctgggtcccaggaagaggggtatagccagtaccaacgtatgctgagcacgctgtctcaatgtgaattttcaatgggcaaaactttactagtatatgatatgaatctcagagaaatggaaaattatgaaaaaatttacaaggaaatagaatgtagcatagctggagcacatgaaaaaattgctgagtgcaaaaagcaaattcttcaagcaaaacgaatacgaaaaaatcgccaagaatatgatgctttggcaaaagtgattcaacaccatccagacaggcatgagacattaaaggaactagaggctctgggaaaagaattagagcatctttcacacattaaagaaagtgttgaagataagctggaattgagacggaaacagtttcacgttcttcttagtaccatccatgaacttcagcaaacattggaaaatgatgaaaaactctcagaggtagaagacgctcaggaagcaagcatggaaacagatcctaagccatagacaagctaatcgcccaccacttcccaggaatattgaaatagctacgtgaccataatgtgtttaaaatgtggtgtgctcttgagatatttaaagttttggcagtaaaatactctgtttttaaatatgaatgtgtatttcattcatatttcctcacacaaa

SEQ ID NO: 26308 - DNA, 345 bp, Macaca Mulatta
catctcaatgggaatgtccagcagtgatgtccaagtgggaggtgaagacccgagggctcaagggacacaggtggctgaccatggtcaaaggctggggggcaggatcaggtagaggagctctagggggtaagtttttgccaccccgtgtgaactcccaagactctaccaggtgggcagaaaggagtaccccagaagggcccaaggggtccttgggttgacctgaccctctgaagtcctggatgggtcactggctgtgggtgtttgaggagggcagttcctgccgccaggctggggcagcagacccccaagacgtagttacaaagcctttagtgtcactcagtgtct

SEQ ID NO: 26309 - DNA, 243 bp, Macaca Mulatta
gggccggttgggcatatagataagggagcagacgtggggaagggcccagcctcggattctctgcggagccaggtctgacgagggccaggcaacccgcccgggagcctggacccatcagggcagtgtgtccagagaccgttacatggaatcaagggaaccaaaccccaagcccaaccccacctagggttgaggactttggagcaatgggaggcagttgtcaagagatattttaatgttttatgt

SEQ ID NO: 26310 - DNA, 217 bp, Macaca Mulatta
aaggtgattttaaagatggaccagtttggaaatggacttgaaattgatcaagctcggctaggaatgtgcagacaacttggggatatattcacagaagagaagtttcgttacatgtgtattctttcaggctgtgactacctttcatcactgcgtgggattggattggcaaaagcatgcaaagtcctaagactagccaataatccagatatagtaaagg

SEQ ID NO: 26311 - DNA, 262 bp, Macaca Mulatta
tcacaggcgttggaggtgagtgtgaaggcatcaactgcaaggagaaaggttaatgccagttgcgggaggcacacagatgttctacccttcaccccacccagccctacctaggactcactttatctagacgatggcgacaaatgaggccactggaattcaggtagaaagtggagtaggcatcataggtcctggggaatacagggaggcttactgagggagaaggtgactggtcccaaagctgaattcaagcatttgtttaaac

SEQ ID NO: 26312 - DNA, 913 bp, Macaca Mulatta
ttattttggttggcatcccagggttggaggcagagcacctctgggtatccgtccccttctgcctgatatacatcatcattttccttgggaatggaatcattcttcatgtcatcagaacagatgttgccctacatcaacccatggacctctttcttgccatgttggcactggccgaggttggtgtctctgcatccaccctgcctacagtgttaggcatatttctttttggaaattctgaaattagttttgaagcttgtcttctccagatgttctccatccattctttatctattatggagtcagctgtgctgctggccatgtctttggaccgctttgtagccatctacagcccactgcgttatacagctatcctgacactgcccagggtctttggcacaggagctattatcgtactgaaaagcattatgctcatgactccattgcccattctcttacagcgtctgtccttctgtggccacaatgctctctcacattcctattgtctgcacccaaatcttatctatctatcttgtgggaacatttctgttaataatatctatgggattttcattgttacctctacttttgggctggatttgttgctgattgtgatctcctatgggctcatactccacactgtactgggtattgccactggagaagggcggaagaaggcattcaacacatgtggctcacatatctgtgctgtgcttgcttactatgtgcctatgattagcttgtctatagtgcaccgccttagacatcgtgtgtcccctctgctgcaagccatgatggccagtgcctacctcttcttcccacctgttgtcaatcctattgtctatagcattaagaccaaggagatccgtggtgccattttccgaatgctatcagaaaaaagacccagactgatgcc

SEQ ID NO: 26313 - DNA, 205 bp, Macaca Mulatta
gtgcctccatccaagcctacagttagcatctcctcctcttccaccattgggaaccgggcagtggtgacatgctcagaaaaagatggttccccaccttctgaatacacctggttcaaagatgggattgtgatgcctacgaattccaagagtacccgtgccttcagcaactgttcttatgtcctgaatcccacaacaggagagctgg

SEQ ID NO: 26314 - DNA, 2026 bp, Macaca Mulatta
ctacaaaaagaaaacaagatggtatcaaaaggacaatttacaaactaagaatagtaacatagctttcagcatcctgtgcctgaacatcacacatctacaaatctttcaagtcttaatgcaacaggaaattttttggagacccagcaaggaacatggaattagagaggcactgatcccaaggcaaaagcccactaacctttttagatgagaagtcccacacaacgaattgttagggagggattgtgggagaagcagcccattgcttaatacaatgaaaccctttccctaagttgagtttcaaccatgaatgcaataactagcataaaatgattcttctgctcatgttctgaagccaacagcagaacctgaattatgagtgacagacatggaggcagaagagttaaactctgctagatttcagctgtgctcaggccataatagcttttaaggttttactgttattttgtgattacaatgtcccaggtgtttaaaagggaagcaagcaatccaaataaccacttgcttgcagagacctttccctcaaacagatgctttcaagagctgcgagagagtagggcatcccttgtggtggaacctctatgtttaaagaaagaagaaaaaaacccagaatttggttgtagaaaacaatgcccacaacagactggccagtgcttagacaaatttggggtaggggggaacactttggtttgaaagcacagagcagtttgccacgtttcgtctgtgcctaccatcctcccttggcctcaacttctataagatgggggggacaaaaagagaagtaaagttaagaaagaagaaagtggaaaattaaaaaaaagatgtcaaagtttttacatgcatacatttcagcttatgctgaagacctacctgtatgttgcacattgaatcatactttcagaacccctcagaaagcatccctctctccctaaagaattttaaaaggaaaacaaaaacctcgaacatagatcttacaaatcagcaagcattcaagccttagccaaagaatgcagtggagccttccgccttaaactgcattgtgaatgaatacaaattaacagcataaaaattaatagtcccatatcagatctgaaaggggtttctggggctgtctgatgtctctaccctgttgtagtgaacacaatagcagaaaattctttctgggttcatctgctatataaaaagtcttggtaaaacagcattactatgaagaggatgaactcacctaccttcagatggaggaaaagtgaaaaggacttaggctttagtcctccatgacttttcttaagcactacctacctgtaataagctgagtgcaaaaggatgccgaagaaaatctgcacccagaagctgttagaaagcactgcagagaacagggtatgaagaaaataagagttcttaataaaccctgaagattctttgttcaaggtaactttgccaaaagggcagagtagctggcaaagagttgtttttattctagctctacactgcatttcaaaagaaaatctgcccattttgaatatattgtttataattaaatgtgctttttacactgcaggtcaatataaaaactggttagtttccagtgagcatttatgttcatttgctcacagcagctgtctggctggaaaattaatttcacagatggtccccagttttaccgggaaatataggcagcttccacccagatgctgagatgctacagttaaaccactgcaataaacacttgtggtttttaatttaaaggatacacaagactccgcatttcaatttctaacctgacactaaaatgttatttttcagtaatgggggcgggggaaaggcagagtgtaaagggagataaaaccaattagtgatttttaactgtcaaatgcactcaagcaatcagtcaaaacaggcctgaggaaacctgttccaacttgagaaacatttaaaagcacaaaagaaaatgtgcagggaatcctgtttgttttctaacccagtaaatgagaaatttaaagcacagatg

SEQ ID NO: 26315 - DNA, 543 bp, Macaca Mulatta
tgtgttcgtaataacattttaaagaattaaggtcagtcctatcagggtgcatttaatagtactataggatttttagcattagtcatgaattattttgcatgtgctttccagaatcatacaaagctgagcaatctaggggcgagaatgctaacatattatctgtttttgtttttaggacggtgaactttgacataataaaatacttgtatgatttcttgtgaaaacaagcttcagagccatatggacactgtgacaatgactaagccaagctgtgttcatccaactacttagctggccaaggagaggagttctttggctctactggatttgtccaaacaggtgctggcccagcatggaatctgatgaaaatattctgattggtctgggtggatgtgagcagaagactatttaccagggaccctggagtatttggaagcaacgtgttaattataaacagcagggtttgagcacaatctgttctactcttaatgatgttatcttaacactgaaattgcctgaaacccatttacttaggactacatt

SEQ ID NO: 26316 - DNA, 438 bp, Macaca Mulatta
gaaggcacagagcatggagaatgatgaatttccgtcagcggatgggatggattggagtgggattgtatctgttagcaagtgcagcagcattttactatgtttttgaaatcaatgagacttacaataggctggccttggaacacattcaacagcaccctgaggagccccttgaaggaaccacatggacacactccttgaaagctcgattactctccttgcctttttggttgtggacaattatttttctggtaccttacttacagatgtttttgttcctatactcttgtacaagagctgatcccaaaacagtgggctactgtatcatccctatatgcttggcagttatttgcaatcgccaccaggcatttgtcaaggcttctaatcagatcagcagacttacaactgattgacacataaaatcagtcaccgttttttccc

SEQ ID NO: 26317 - DNA, 112 bp, Macaca Mulatta
agctgcccacccccagcacttgtcaaagaggccctcagcaacgttcagagactgaccttctatgggttcctcatggctctctcaaagcaccatggaatcaaccaagccctcg

SEQ ID NO: 26318 - DNA, 763 bp, Macaca Mulatta
  misc_feature (1)...(763): n = A,T,C or G
ggcacagactctaaattgaaaaatatagtatgatctatatttgaccctaaaattgttccataaattaacaaagatatggcaaatttttcataactaaatctaagtcttctaaaaggaagctgttacccttctgtttttaattacattaattgaaatgtgtttaagagatgatttcagcatattttgtannnnnnnnnnnnnnnnnnnttagtattgggccaatggccaaaaggtaatattactaccatgtagattgttatagttcaaattgtcccacttcccccagaattttagaaactagaattctgggagatactgtatcagctgtagttgggtaattccaagtgctgatagtactattcatcttttttattactgtgtcagatgaaacaaataccaagttgcaaaagatgcagatttttattatataatggttttaggcataaattattaacaagccatgccttgtatgtttcatcttacatttttctttagaactaaactataatagattttggaaaacgatttgatgtgcttgctcacttgattcacttggtcagatatttgaatgatggtattacctagattctaatccttgattctagttatataataaataacaatatagaatgtgaaaatatgtttgggcacttactgtttatattatgtagtagcctccatcatgatacactacatttaatgaattaaagcaggttgtggtaattgtaaattaattattggctggttcctggtaacaaaaaca

SEQ ID NO: 26319 - DNA, 2703 bp, Macaca Mulatta
  misc_feature (1)...(2703): n = A,T,C or G
gagaaatcttgcggatgactcatattgcccggggcttggattccgatggtgctttgctgctagatatcgttgtgagtggctatgtcctacagcttcagtcacctgctgaagtcactgtaaaggnnnnnnnnnnnnnnnnnnnnnnnnnnnnnnnnnnnnnnnnnnnnnnnnnnnnnnnnnnnnnnnnnnnnnnnnnnnnnnnnnnnnnnnnnnnnnnnnnnnnnnnnnnnnnnnnnnnnnnnnnnnnnnnnnnnnnnnnnnnnnnnnnnnnnnnnnnnnnnnnnnnnnnnnnnnnnnnnnnnnnnnnnnnnnnnnnnnnnnnnnnnnnnnnnnnnnnnnnnnnnnnnnnnnnnnnnnnnnnnnnnnnnnnnnnnnnnnnnnnnnnnnnnnnnnnnnnnnnnnnnnnnnnnnnnnnnnnnnnnnnnnnnnnnnnnnnnnnnnnnnnnnnnnnnnnnnnnnnnnnnnnnnnnnnnnnnnnnnnnnnnnnnnnnnnnnnnnnnnnnnnnnnnnnnnnnnnnnnnnnnnnnnnnnnnnnnnnnnnagatattgatgagtgtgctttgggtaggcacacctgccacgctggtcaggactgtgacaatacaattggatcctatcgctgtgtggtccattgtggaactggttttcgaagaacctctgatgggctgagttgtcaanagatattaatgaatgtcaagaatccagcgcctgtcagcagcgctgtttcaatgccataggaagtttccactgtggatgtgaacctgggtatcagctcaaaggcagaaaatgcatgnnngaacgagtgcagacagaatgtatgcagaccttatcaacactgtaagaacacccatggtagctttaagtgcattgatctttgtccaaatggaatgaccaaggcagaaaatgaaacctgtcttgatattgatgaatgtaaagatgggacccatcagtgcagatataaccagatatgtgagaatacaagaggcagctattgttgtgtatgcccaagaggttatcggtctcaaggagttggaagcccctgcatggatactgataaatgtgaaaatacagatgcctgccagcatgagtgtaagaatacctttggaagttatcagtgcatctgcccacctggctattaactcacactcagtggaaagacatgccaagataacgatgagtgcctggagcagaatgtacactgtgggcccaatcgcatgtgcttcaacatgagaggaagttaccagtgcatcagtacaccctgtccacccaactaccaacatgatcctgtttcagggttctgcctcaagaactgtccacccaatgatttggaatgtgccttgagtccatatgctttggaatacaaactcatctccctcccatgtggaatagccaccaatcaagttttaatccggctggttgcatacacgcaggatggagtgatgcatcccaggacaacttttctcatggtatgaggaacagactgtcccttttgccttgagggatgaaaaggagtggtgtatacaacacaaccactatgagaagcagagacctaccacatgagggtctgagcctcatcctacagtgccaatgggaccactgagtatcagaccacattcatagtttatacagctgtgtctgcctatccatactaaggaactctccaannnnnnnnnnnnnnnnnnnnnnnnnnnnnnnnnnnnnnnnnnnnnnnnnnnnnnnnnnnnnnnnnnnnnnnnnnnnnnnnnnnnnnnnnnnnnnnnnnnnnnnnnnnnnnnnnnnnnnnnnnnnnnnnnnnnnnnnnnnnnnnnnnnnnnnnnnnnnnnnnnnnnnnnnnnnnnnnnnnnnnnnnnnnnnnnnnnnnnnnnnnnnnnnnnnnnnnnnnnnnnnnnnnnnnnnnnnnnnnnnnnnnnnnnnnnnnnnnnnnnnnnnnnnnnnnnnnnnnnnnnnnnnnnnnnnnnnnnnnnnnnnnnnnnnnnnnnnnnnnnnnnnnnnnnnnnnnnnnnnnnnnnnttcagagtcaaatagagtttttgagcatttgactatttttagaatcataaaattagttactaagtattttgatcaaagcttataaaataacttctggcaatttttataagtattgatacaatataataggatttacctattttcattttaaggagaaaaataccactcatttttaaaaatatagtacagttactagaagtcttgtttgatcccaaatggtgcttatcttgactgaacattcagaacaaggatattattttcagtgattttgtgnnnnnnnnnnnnnnnnnnnnnnnnnnnnnnnnnnnnnnnnnnctttgccctcacaacagttgttcagggcatggaactttaacattttaatataaactttcatccagttagcttcataacttttacattccagaattttttattttcctgtcaatgaaaacaatttttaaagataccagtgggacaggcttgtttcttaaaaatctcatatgttcaaattaacataaatgttaaacgtcaatacactgtacatggtggtaatagactaagcaattgccaagatgtattctatttttatgaagtgtatatatatattaccttagtgtgcattttctatgtaatatcttgatggactcttttataaaattattttataaaaaaacaatattacactaaaatcagcctcaataaattttcaca

SEQ ID NO: 26320 - DNA, 589 bp, Macaca Mulatta
  misc_feature (1)...(589): n = A,T,C or G
ggggggggacagcccacagagttccacctgctcacaggttggctggctcagccaaggtggtgccctgctctgagcattcaggccaagcccatcccgcaccatggccaggtacagatgctgtcgcagccagagccggagcagatgctgccgccggagacgaagatgtcgcagacgaaggaggcggagatgccgggcacggaggagagccatgaggtgctgccgccgcaggtacaggctgaggtgtagaagatactaattgcacaaaatagcacgtccaccaaactcctgcctgagaattttaccagacttcacgaccctcttgccacatcttgaaaacgccaccatccaatgaaaatcaggagcctgctaaggaacaatgccccctgtcaataaatgttgaaaagcctcccaaaatatacacacttcaacacatttatttttatcttccccccctcatacccatactcttacaaaaccctaatatttctacctccaacctccaaccaaatccatttaaatcctccccctccacaaaaaataaaaaanttttttgcccccccccccaaaatattataaattttttgggccc

SEQ ID NO: 26321 - DNA, 755 bp, Macaca Mulatta
ggcttccttccctctcttctgcctgatagaggaaagaggaagaggagggtgaacagagatcctggaattatgacttgctgctattccaacccagcctcctgggttcccccagtcctcatttttcctcccaatacccacccttctctctcaagggatctagtcagcttggtcccagtctcttccttttgttctcactgccaaactgcctgtcctgggatctagttatcttggccctgcacgctacatgagtagcaaacacttattgggttttcaacagtcccagctttcactgccagggtcccagtcagattccaggaatttacaccctagctttgcttgctaatcctggtttagagctatcctactaaaatatttaatcctaaatcttagtccttgactgtgagatatgaggtcttacaggagacctcagggctcccagcccttctcctcctgctaaccctcctcacgccctgaagaggagttagaaaagaggtccttgtcattctcacctcttatggaaaatagaacaggaaataatcatatcctttcttcccacccttctcctgtgatttaggatttctgacaaagatggctgagattggtcacttagagccaactatctcctccgcccttttgttttttcagcttcagagacagatccacgttatagtccccagggaaccttgagtctctaaggatagggaagggaagaaggggaagggagccaaagaagatttgggggtaatatccccccc

SEQ ID NO: 26322 - DNA, 833 bp, Macaca Mulatta
  misc_feature (1)...(833): n = A,T,C or G
ggaaagacaaaaggagatcgctcttatcaaatgtgtgagcagtagaagagaccacatttgccagtcagtagaaataatgaaaaaaatttggtgtttagtgtattttaaacttgttttacttgagggggacgtcccaaaattaaaggaatggagaaataatcaaaatcatgtataccatcttctgtttctagctcctgattccccatagataacattccttaggaacgaagagttcaattagtaatatttatgtgttatgtcgggagatgaaacctttgttcttaggatcacagaatactaaagcacctccaaaaaaacaggtatcatgtgaaacagtggttgccaaaagtggagcgaggataatttcactaggcatttggcaattcttagagacatttttggttgtcacaactgggaaggatactagtggcatgaattgggagaggccagggatgctgctaaatagactgtaatacacaaggaaagcaacctcaccccctcaaagaaataccctgcccaaaatgtcaaaaatgctgaggttggaaaaaccctgaagtaaagatcagtcccagttaccaactggaaaaccgctatttttccaagctgtaaatggcnnnnnnnnnnnnnnnnnntttccaaaaagaaaggtgaatgtaagccaaatttgagggattttacaagaatccacctacctgccgcccttaaagtcaagggggcgaaaggatttttcaacaaagccgagcaaaataggcaaatccactttgacccaggctggtatatnttgccaccccccccttagaggaaaatcccttcctcttttcagggacacaaag

SEQ ID NO: 26323 - DNA, 996 bp, Macaca Mulatta
  misc_feature (1)...(996): n = A,T,C or G
ggagcagaggttgnnnnnnnnnnnnnnnnnnnnnnnnnnnnnnnnnnnnnnnnnnnnnnnnnnnnnnnnnnnnnnnnnnnnnnnnnnnnnnnnnnnnnnnnnnnnnnnnnnnnnnnnnnnnnnnnnnnnnnnnnnnnnnnnnnnnnnnnnnnnnnnnnnnnnnnnnnnnnnnnnnnnnnnnnnnnnnnnnnnnnnnnnnnnnnnnnnnnnnnnnnnnnnnnnnnnnnnnnnnnnnnnnnnnnnnnnnnnnnnnnnnnnnnnnnnnnnnnnnnnnnnnnnnnnnnnnnngggagttccgtcgcagccgggagtgggatcgcagttcttgtttgtgtgtcggtgtcatcgccacttgacaatgcagatcttcgtgaagaccctgactggcaagaccatcactcttgaggttgagcccagtgacaccnnnnnnnnnnnnnnnnnnnnnnnnnnnnnnnnnnnnnnnnnnnnnnnnnnnnnnnnnnnnnnnnnnnnnnnnnnnnnnnnnnnnnnnnnnnngcgcaccctgtctgactacaacatccagaaagagtccaccctgcacctcgtgctccgcctcagaggtgggatgcagatcttcgtgaagaccctgactggcaagaccatcaccctcgaggtcgagcccagtgacaccatcgagaacgtcaaagcaaagatccaagacaaggaaggcatccctcctgaccagcagaggttgatctttgccgggaaacagctggaagatggacgcaccctgtctgactacaacatccagaaagagtctaccctgcacctggtgctccgcctcagaggtgggatgcagatcttcgtgaagaccctcactggcaagaccatcaccctcgaggtggagcccagtgacaccatcgagatgtcaagcaaagattcagacaaggagcattctctgacacaaagtgatcttcgaaccgaagccgtatatcaaccgcggccagatagacgctagaagccgtgcctgggtcc

SEQ ID NO: 26324 - DNA, 2190 bp, Macaca Mulatta
  misc_feature (1)...(2190): n = A,T,C or G
gtggtcaccttgtatagcaagtcctacctcctcaccctcagcaacaagttcgtcttcagcctgaccctgtccaacttcctgctgtccgtgttggtgctgccttttgtggtgacgagctccatccgcagggaatggatctttggtgtagtgtggtgcaacttctctgccctcctctacctgctgatcagctcagccagcatgctaaccctcggggtcattgccatcgaccgnnnnnnnnnnnnnnnnnnnnnnnnnnnnnnnnnnnnnnnnnnnnnnnnnnnnnnnnnnnnnnnnnnnnnnnnnnnnnnnnnnnnnnnnnnnnnnnnnnnnnnnnnnnnnnnnnnnnnnnnnnnnnnnnnnnnnnnnnnnnnnnnnnnnnnnnnnnnnnnnnnnnnnnnnnnnnnnnnnnnnnnnnnnnnnnnnnnnnnnnnnnnnnnnnnnnnnnnnnnnnnnnnnnnnnnnnnnnnnnnnnnnnnnnnnnnnnnnnnnnnnnnnnnnnnnnnnnnnnnnnnnnnnnnnnnnnnnnnnnnnnnnnnnnnnnnnnnnnnnnnnnnnnnnnnnnnnnnnnnnnnnnnnnnnnnnnnnnnnnnnnnnnnnnnnnnnnnnnnnnnnnnnnnnnnnnnnnnnnnnnnnnnnnnnnnnnnnnnnnnnnnnnnnnnnnnnnnnnnnnnnnnnnnnnnnnnnnnnnnnnnnnnnnnnnnnnnnnnnnnnnnnnnnnnnnnnnnnnnnnnnnnnnnnnnnnnnnnnnnnnnnnnnnnnnnnnnnnnnnnnnnnnnnnnnnnnnnnnnnnnnnnnnnnnnnnnnnnnnnnnnnnnnnnnnnnnnnnnnnnnnnnnnnnnnnnnnnnnnnnnnnnnnnnnnnnnnnnnnnnnnnnnnnnnnnnnnnnnnnnnnnnnnnnnnnnnnnnnnnnnnnnnnnnnnnnnnnnnnnnnnnnnnnnnnnnnnnnnnnnnnnnnnnnnnnnnnnnnnnnnnnnnnnnnnnnnnnnnnnnnnnnnnnnnnnnnnnnnnnnnnnnnnnnnnnnnnnnnnnnnnnnnnnnnnnnnnnnnnnnnnnnnnnnnnnnnnnnnnnnnnnnnnnnnnnnnnnnnnnnnnnnnnnnnnnnnnnnnnnnnnnnnnnnnnnnnnnnnnnnnnnnnnnnnnnnnnnnnnnnnnnnnnnnnnnnnnnnnnnnnnnnnnnnnnnnnnnnnnnnnnnnnnnnnnnnnnnnnnnnnnnnnnnnnnnnnnnnnnnnnnnnnnnnnnnnnnnnnnnnnnnnnnnnnnnnnnnnnnnnnnnnnnnnnnnnnnnnnnnnnnnnnnnnnnnnnnnnnnnnnnnnnnnnnnnnnnnnnnnnnnnnnnnnnnnnnnnnnnnnnnnnnnnnnnnnnnnnnnnnnnnnnnnnnnnnnnnnnnnnnnnnnnnnnnnnnnnnnnnnnnnnnnnnnnnnnnnnnnnnnnnnnnnnnnnnnnnnnnnnnnnnnnnnnnnnnnnnnnnnnnnnnnnnnnnnnnnnnnnnnnnnnnnnnnnnnnnnnnnnnnnnnnnnnnnnnnnnnnnnnnnnnnnnnnnnnnnnnnnnnnnnnnnnnnnnnnnnnnnnnnnnnnnnnnnnnnnnnnnnnnnnnnnnnnnnnnnnnnnnnnnnnnnnnnnnnnnnnnnnnnnnnnnnnnnnnnnnnnnnnnnnnnnnnnnnnnnnnnnnnnnnnnnnnnnnnnnnnnnnnnnnnnnnnnnnnnnnnnnnnnnnnnnnnnnnnnnnnnnnnnnnnnnnnnnnnnnnnnnnnnnnnnnnnnnnnnnnnnnnnnnnnnnnnnnnnnnnnnnnnnnnnnnnnnnnnnnnnnnnnnnnnnnnnnnnnnnnnnnnnnnnnnnnnnnnnnnnnnnnnnnnnnnnnnnnnnnnnnnnnnnnnnnnnnnnnnnnnnnnnnnnnnnnnnncagcacttcttcctaatgacacgcgaccatcctggtgcttcttcatggttgatgcgggcagtgtgggaccctcagttctaggactggtccgcagagcgagcacccaggagtagggtgaagcggtcctcagtggcgccacctgctggtgctaataggaagagccacaggcctcttgaccggcccaccctgcccacttccctactgacaagttctgtggtatttcaaaagggagaaaccactataatttactagaggaagggcagatagtaggtgttccatttccagaatt

SEQ ID NO: 26325 - DNA, 1142 bp, Macaca Mulatta
  misc_feature (1)...(1142): n = A,T,C or G
ctcctcctcttcctnccgctgtatcctcctgccccagcgagcctcctagctgagctgtagataccaatgggaatcccaatggggaagtcgatgctggtgcttctcaccttcttggccttcgcctcgtgctgcattgctgcttaccgccccagtgagaccctgtgcggcggggagctcgtggacaccctccagttcgtctgtggggaccgcggcttctacttcagcaggcccgcaagccgtgtgagccgtcgcagccgtggcatcgttgaggagtgctgtttccgcagctgtgacctggccctcctggagacgtactgtgctacccccgccaagtccgagagggacgtgtcgacccctccgaccgtgcttccggacaacttccccagataccccgtgggcaagttcttccgatatgacacctggaagcagtccacccagcgtctgcgcaggggcctgcctgccctcctgcgtgcccgccggggtcgcatgctcgccaaggagctcgaggcattcagggaggccaagcgtcaccgtcccctgattgctctgcccacccaagaacccacccacgggggcgcgtccccagagatgtccagcaattggaagtgagcaaaactgccgcaagtctgcagccggcaccaccaccctccagcctcctcctgaccagcgacgtttccatcaggttccatctccaaaatctcttggttccacttcccccccggggcttctcctgaccccagcccccgtgccccgcctccccgaaacaggctactctcctcggacccctccatcgggctgaggtccacagcaacatcttcaaacatgtacaaaatcgattggctttaaacaccctccctccaaattatccccaattatccccacacataaaaaatcaaaactttaaactaacccccttcccccccaccacaacaaccctcttaaaaataattggctttttagaaacaccagaaaaactcagaaattggctttaaaacgacaacaaccaaaacaaaaatcaatttnnnnnnnnnnnnnnnnnnnnnnnnaagggtnnnnnnnnnnnnnnnnnnnnnnnnnnnnnnnnnnnnnnnnnnnnnnnnnnnnnnnnatttacacnnnnnnnnnnnnnnnnnnnnnnngcg

SEQ ID NO: 26326 - DNA, 658 bp, Macaca Mulatta
  misc_feature (1)...(658): n = A,T,C or G
ggggtggcaagacctttgctcgaaattcatcccttgtaattcataaggcaannnnnnnnnnnnnnnnnnnnnnnaagtgtaatgaatgtggcaaggtttttaatcaacaatcaaaccttgcacaacatcagagagnnnnnnnnnnnnnnnnnnnnnnnaagtgtaatgagtgtggcaagaccttcagtcatatgtcatcctctgtataccatcatagacttcataatggggagaaaccttacaagtgtaatgagtgtggcaagaccttcagtcatatgtcatcctttgtatgtcatcatagacttcatactggagaaaaaccttataagtgcaatgagtgtggcaaagcctttagtgggcagtcatcacttactcatcatcaagcaatccacagtataggcaaactttacaaatgtaatgattctcacaaagtcctcagtaatgctactatcatttgcaaatcattagagaattcataatgaagagagatcttacaagtgtagtaaatgtggcagagttttcagacatcgttcatagcttgtagttcattggcgaactcatactggagagaaccttacagatgtcatgattgtgcaaggtgttcagtncagcttcatctttatgcaaacagagaatcatacangagagaaacttacaa

SEQ ID NO: 26327 - DNA, 824 bp, Macaca Mulatta
ggctttcctggttctcaaactcttcagatctctctcttcatgctttttctggtgatgtacatcctcacagttagtggtaatggggctatcttgatgttggtgaggacctcccatcagttgcatacccccatgtacttctttctgagcaacctctccttcctggagattttgtataccacagctgcagtccccaaagcactggccatcctactggggagaagtcagaccatatcatttacaagctgtcttttgcagatgtaccttgttttctcattaggctgcacagagtacttcctcctggcagccatggcttatgaccgctatctcgccatctgctatcctctacactacggaaccatcatgagtagcctgctctcagcgcagctggccctgggctcctggatctgtggtttcatggccattgcagtgcccacagccctcatcagtggcctgtccttctgtggcccccatgccatcaaccacttcttctgtgacattgcaccctggattgccttggcctgcaccagcacacaggcagtagagcttgtggcctttgtgattgcttttgtggtcatcctgagttcattcctcatcactcttatctcctacatctacatcatcagcaccatcctcaggatcccctctgccagtggccggagcaaagccttttccacgtgctcctcgcatctcactgtggtgctcatttggtatgggtccacgattttccttcacgtccgcacctctatcaaagatgccttggatctgaccaaagctgtccacatcctgaacaccgtggtgactccagttttaaaccccttcatcta

SEQ ID NO: 26328 - DNA, 1195 bp, Macaca Mulatta
  misc_feature (1)...(1195): n = A,T,C or G
gggcctcttttcccggctggaaccatggagggtgcggaagagaagaagaaggttcctgctgtgccagaaacccttaagaaaaagcgaaggaatttcgcagagctgaagataaagcgcctgagaaagaagtttgcccaaaagatgcttcgaaaggcaaggaggaagcttatctatgaaaaagcgaagcactatcacaaggaatataggcagatgtacagaactgaaattctaatggcgaggatggcccgaaaagctggcaacttctatgtacctgctgaacccagattggcgtttgtcctccggatcacacgtatccatggcgtgagcccaaaggtccgagaggcattgcaacctcttgcgccttccgtcaaatccctccgcgtgaaccctgcgcgaaccctccctctcggctttgcgatcacccgtcgccgacggattggtcccagcccatccttgtggccttggcagggtatccgccccaatccattcgacctccccttaacattcgccgcttgccctgctcggtttgcccgctggctcttcggcgtgtcgccctgcattggcgttaaccggacacccgcgcacctctctgcgttatgtacgcacctaggccatacactccgcggtgtgtcatggtctgcttcgcgcggacgcggattatccagtatgttgcctcgggtctaatccaagtctccactgcttgtgcgccggtgccatatgtcctcctgggccgagtgatgcagcgagcgagagacttcgcgcccatattacgtcctcacgtgagaacatatgtgtgtgacgcgtacgccgagagtataaggtgcaagtaacagtcgcgtggcgcacggaaaagcgaaggggcgccatgcatgccttagcgccatctcgacttcgcgataggcggcgcttgtcccgcctgtacgctctctctagctctgagacgtatagaggagatccacatcgtgcgtttccgctatgccgctacctgttaccgcgcgtcccccccgtgtccgccttggctggtgtgccgcggcgcgagtgtccgctcctgttcgcgcagtcgcgccggtccgccccttcgagcgcggcncncttgcgcgttgtgcgccagacgtaccttgcagtgtctcgtggccggctctgtctgaggcgcttgcgatcggatattccgatgccgtgcgccacaccacgtatg

SEQ ID NO: 26329 - DNA, 560 bp, Macaca Mulatta
acacctccctgcaccccggggttgtatactgcatcctgggctcctaaccccaggccccgagataggagagccagctggtctcttctctcctgtgatctcagtaggcctaacctataacctaacacagattgctacagctgctcccctcccaccaaacaaaaccccaagagagcaatgcccctaccaccccagggtgccatggtcccaggagagtccaaacctatcaccacctgttgggtatagccagagcttttcccacccagtcagggcatgaaacagcaaccccccacatgtgaacccatcattcctaaaccctgggtgggctctatgccaagtaacggcagagggagttaagccacaggaatttggctgtggagtaggagggaatgcggtgaggcactctggaatatgaccccaccagagtttggaaaacaaacttgggcagccggagcgcgtcactattctagacttccctggcattcaaggagccctttgaactttccaaagtgcagccacagctacaatgctgttaaatcctcccacattcttggatgcccctt

SEQ ID NO: 26330 - DNA, 312 bp, Macaca Mulatta
  misc_feature (1)...(312): n = A,T,C or G
ctccagtgtaataattatattacattaatagtgttgtcaaacagccataaaaatgggatatactcgccactctttaaaggcaaattttgcaattctaagtattcttgaaaagcaagaaaggtcagcctaattcttaagtggtctaactcttaagagcaactttacccaggtgatgaaagtctagtgactcatttgcattacaatttgattccgatgagaggagaatatgggatacagaatttcctgaatcccatatttgtaaatccttagccgcatatctttggagaaggtgntattaatgcacacttttag

SEQ ID NO: 26331 - DNA, 1985 bp, Macaca Mulatta
  misc_feature (1)...(1985): n = A,T,C or G
agaggaggtcgtgacgaggaagtcctcgagcacagtggagttcttcagcttggtgacccggagctccaacatccctgcgggcgacagcgtcccagaaatcgtggagaagcctcacccggtcaccgcgcccgaggnnnnnnnnnnnnnnnnnnnnnnnnnnnnnnnnnnnnnnnnnnnnnnnnnnnnnnnnnnnnnnnnnnnnnnnnnnnnnnnnnnnnnnnnnnnnnnnnnnnnnnnnnnnnnnnnnnnnnnnnnnnnnnnnnnnnnnnnnnnnnnnnnnnnnnnnnnnnnnnnnnnnnnnnnnnnnnnnnnnnnnnnnnnnnnnnnnnnnnnnnnnnnnnnnnnnnnnnnnnnnnnnnnnnnnnnnnnnnnnnnnnnnnnnnnnnnnnnnnnnnnnnnnnnnnnnnnnnnnnnnnnnnnnnnnnnnnnnnnnnnnnnnnnnnnnnnnnnnnnnnnnnnnnnnnnnnnnnnnnnnnnnnnnnnnnnnnnnnnnnnnnnnnnnnnnnnnnnnnnnnnnnnnnnnnnnnnnnnnnnnnnnnnnnnnnnnnnnnnnnnnnnnnnnnnnnnnnnnnnnnnnnnnnnnnnnnnnnnnnnnnnnnnnnnnnnnnnnnnnnnnnnnnnnnnnnnnnnnnnnnnnnnnnnnnnnnnnnnnnnnnnnnnnnnnnnnnnnnnnnnnnnnnnnnnnnnnnnnnnnnnnnnngggtactgagccactgaggatccagtactccctgggcaagtacgatgtgaagcagatgggcaccaagtacatgctggttattagcaacgtgaacatgaacgatgctggcatctacagcctgtccgtgggcgataagcggatgagtgcagagctcacagtgctggnnnnnnnnnnnnnnnnnnnnnnnnnnnnnnnnnnnnnnnnnnnnnnnnnnnnnnnnnnnnnnnnnnnnnnnnnnnnnnnnnnnnnnnnnnnnnnnnnnnnnnnnnnnnnnnnnnnnnnnnnnnnnnnnnnnnnnnnnnnnnnnnnnnnnnnnnnnnnnnnnnnnnnnnnnnnnnnnnnnnnnnnnnnnnnnnnnnnnnnnnnnnnnnnnnnnnnnnnnnnnnnnnnnnnnnnnnnnnnnnnnnnnnnnnnnnnnnnnnnnnnnnnnnnnnnnnnnnnnnnnnnnnnnnnnnnnnnnnnnnnnnnnnnnnnnnnnnnnnnnnnnnnnnnnnnnnnnnnnnnnnnnnnnnnnnnnnnnnnnnnnnnnnnnnnnnnnnnnnnnnnnnnnnnnnnnnnnnnnnnnnnnnnnnnnnnnnnnnnnnnnnnnnnnnnnnnnnnnnnnnnnnnnnnnnnnnnnnnnnnnnnnnnnnnnnnnnnnnnnnnnnnnnnnnnnnnnnnnnnnnnnnnnnnnnnnnnnnnnnnnnnnnnnnnnnnnnnnnnnnnnnnnnnnnnnnnnnnnnnnnnnnnnnnnnnnnnnnnnnnnnnnnnnnnnnnnnnnnnnnnnnnnnnnnnnnnnnnnnnnnnnnnnnnnnnnnnnnnnnnnnnnnnnnnnnnnnnnnnnnnnnnnnnnnnnnnnnnnnnnnnnnnnnnnnnnnnnnnnnnnnnnnnnnnnnnnnnnnnnnnnnnnnnnnnnnnnnnnnnnnnnnnnnnnnnnnnnnnnnnnnnnnnnnnnnnnnnnnnnnnnnnnnnnnnnnnnnnnnnnnnnnnnnnnnnnnnnnnnnnnnnnnnnnnnnnnnnnnnnnnnnnnnnnnnnnnnnnnnnnnnnnnnnnnnnnnnnnnnnnnnnnnnnnnnnnnnnnnnnnnnnnnnnnnnnnnnnnnnnnnnnnnnnnnnnnnnnnnnaaagtgacatggtacaaggatggcatggaggtgacggaggaggaacgcgtgtccctgcagcgcggggaagaccaggcgctgctcaccatctccaactgtgtgcgtgaagacagtggcctcgtcctgcttaagctcaagaatgaccacggctcagccacagccactctgcaccttagtgtgctg

SEQ ID NO: 26332 - DNA, 457 bp, Macaca Mulatta
tttcagttgggacccacggaagcctcttactactgggtgtactgggttccaactcaatatgtggatgcaatcaaagacactgtgctggggaaatggcagtatttttgaaagcactttcacctctggcccaggagactgacccaaagtgaaggacattgccgggagaggcctgcagcatccctggatttcagagttctggaactttgttcacaaaaaatctatattcagtctgaggtgatgtggtgactgaagccagaggtgatgtactttcaccattagcttaattttaacttaaaatgaccagttccctttcttgtagtcagcttcataccatttttaaactcaatacgatggaaatcaataaatttgaattccgaacatgttgtgtggaatactcttaagtgtgtttgagagtagatctgccaattatgttgacaagggaatgatcaaaagcttt

SEQ ID NO: 26333 - DNA, 100 bp, Macaca Mulatta
tggtcattgagcacctgggacggagacccctcctcattggtgactttgggctaatggcactcttctttggggaccctcaccatcatgctgaccctgcagg

SEQ ID NO: 26334 - DNA, 1087 bp, Macaca Mulatta
ctcccactcctccagggatgtagggattctttagctgacctaaaggaaggatcccacccacacctaaaacctccagattatagtgtggcagtgcagagatcaaagatgatgcataacagcctctctagactgccacgagcctctctcagtagcaacctcgtggcctgtgttccatcgaagattgtaactcagcctcagagacataatttgcagccattccatcctaaactagcagatgtgactgatgcagatagcgaagcggatgaaaatgaacaagtttcagcagtctagcctttggatgacctatttgaaaaccactgaaagttatggaggaatgggcagaaccacctcatgattctgcaggccattgctgacaaacagttcattgctacaaccagtccagaggttttattccctctactctgagcaatgaaatagacttgagttatgcttcctttcatttactttctgcagatgaatagtttcctgagcaatggatgctatgcctggataccagtctccactttgcacgccagaactgccttgggaccacagttacagaaaaaatttaaaactcagagtgatccttctgtatattgctatagatttttctttaataagctattttaaagagagtggcattattatttccaagccatagcttgggctgaaggacagattgaaagtatctgccaataccaaggatattcttgtatatttgaataataacttactatttgcattgttgtgattttgtttgtatttgagagctcttgttagctgatgttcatgtttgaggtcataaaattgtctctgatctgaccaaacagaagtcatctttacagaggtgatatgcttgatctacacacagatgtgacttgatctgtagcaccaatgcaatgtaggtctcagtttgagagaaataggaagccctttgcagttgaggtgttaggaacctgctggtcatggtgtggaaagccaaatgaagctgccacagggtttcttgtcagtcctttgggaaatgggagggagtagtttggggaggagggtgggaaccctaatttccaaagaatgaaattttgatgtt

SEQ ID NO: 26335 - DNA, 3489 bp, Macaca Mulatta
  misc_feature (1)...(3489): n = A,T,C or G
ggtgtgagatgcacaatgcgaaacctaggccccagcttttacaccatgatgcgcagggttgtactttttgtactgaactgataggtggcctagtggttatgccttgttttaccattttgaggatctggactccgtttccggccttgctctttggaccacattgtcaattcacaccggaaactatgttccaacttcctgtcaacaatcttggcagtttaagaaaagcccggaaaactgtgaaaaaaatacttagtgacattgggttggaatactgtaaagaacatatagaannnnnnnnnnnnnnnnnnnnnnnnnnnnnnnnnnnnnnnnnnnnnnnnnnnnnnnnnnnnnnnnnnnnnnnnnnnnnnnnnnnnnnnnnnnnnnnnnnnnnnnnnnnnnnnnnnnnnnnnnnnnnnnnnnnnnnnnnnnnnnnnnnnnnnnnnnnnnnnnnnnnnnnnnnnnnnnnnnnnnnnnnnnnnnnnnnnnnnnnnnnnnnnnnnnnnnnnnnnnnnnnnnnnnnnnnnnnnnnnnnnnnnnnnnnnnnnnnnnnnnnnnnnnnnnnnnnnnnnnnnnnnnnnnnnnnnaccaagtagcagcctcagcactttcaaagataaaaacaaaaatgatggccttaaacctaagcaggctgacagtgtagagcaagctgtttattactgtaagaagtgcacttaccgagatcctctttacgaaatagttaggaagcacatttacagggaacattttcagcatgtggcagcaccttacatagcaaaggcaggagaaaaatcactcaatggggcagtccccttaggctcaaatgcccgagaagagagtagtattcactgcaagcgatgccttttcatgccaaagtcctatgaagctttggtacagcatgtcatcgaagaccatgaacgtataggctatcaggtcactgccatgattgggcacacaaatgtagtggttccccgatccaaacccttgatgctaattgctcccaaacctcaagacaagaagagcatgggacttccaccaagaatcggttcccttgcttctggaaatgtccggtctttaccatcacagcagatggtgaatcgactctcaataccaaagcctaacttaaattctacaggagtcaacatgatgtccagtgttcacctgcagcagaacaactatggagtcaaatctgtaggccagggttacagtgttggtcagtcaatgagactgggtctaggtggcaacgcaccagtttctattcctcacaatctcagtctgtnnnnnnnnnnnnnnnnnnnnnnnnnnnnnnnnnnnnnnnnnnnnnnnnnnnnnnnnnnnnnnnnnnnnnnnnnnnnnnnnnnnnnnnnnnnnnnnnnnnnnnnnnnnnnnnnnnnnnnnnnnnnnnnnnnnnnnnnnnnnnnnnnnnnnnnnnnnnnnnnnnnnnnnnnnnnnnnnnnnnnnnnnnnnnnnnnnnnnnnnnnnnnnnnnnnnnnnnnnnnnnnnnnnnnnnnnnnnnnnnnnnnnnnnnnnnnnnnnnnnnnnnnnnnnnnnnnnnnnnnnnnnnnnnnnnnnnnnnnnnnnnnnnnnnnnnnnnnnnnnnnnnnnnnnnnnnnnnnnnnnnnnnnnnnnnnnnnnnnnnnnnnnnnnnnnnnnnnnnnnnnnnnnnnnnnnnnnnnnnnnnnnnnnnnnnnnnnnnnnnnnnnnnnnnnnnnnnnnnnnnnnnnnatattgccgttcaactttcaatgatgtggagaagatggccgcacacatgcggatggttcacatcgatgaagagatgggacctaaaacagattctactttgagttttgatttgacattgcagcagggtagtcacactaacatccatctcctggtgaccacatacaatctgagggatgccccagctgaatctgttgcttaccatgcccagaataaccctccagttcctccaaagccacagccaattgttcaggaaaaggcagatatccctgttaaaagttcacctcaagctgcagtgccctataaaaaagatgttgggaaaaccctttgtcctctttgcttttcaatcctaaaaggacccatatctgatgcacttgcacatcacttacgatagaggcaccaggttattcagacggttcatccagttgagaaaaagctcacctacaaatgtatccattgccttggtgtgtataccagcaacatgaccgcctcgactatcactctgcatctagttcactgcaggggtgttggaaagacccacaatggccaggataagacaaatgcaccctctcggcttaatcagtctccaagcctggcacctgtgatacgcacttatgagcaaatggaatttcccttactgaaaaaacggaagttagatgatgatattgactcacccagtttctttgaggaaaagcctgaagagcctgttgttttagcttttaaaccccatggtcattgaaatgattcctatgaagccaggaaaagctttctaacaaagtatttcaacaaacagccctatcccaccaggagagaaattgagaagctagcagccagtttatggttatggaagagtgacattgcttcccattttagtaacaaaaggaagaaatgtgtccgtgattgtgaaaagtacaagcgtagcgtgttgctggggtttnnnnnnnnnnnnnnnnnnnnnnnnnnnnnnnnnnnnnnnnnnnnnnnnnnnnnnnnnnnnnnnnnnnnnnnnnnnnnnnnnnnnnnnnnnnnnnnnnnnnnnnnnnnnnnnnnnnnnnnnnnnnnnnnnnnnnnnnnnnnnnnnnnnnnnnnnnnnnnnnnnnnnnnnnnnnnnnnnnnnnnnnnnnnnnnnnnnnnnnnnnnnnnnnnnnnnnnnnnnnnnnnnnnnnnnnnnnnnnnnnnnnnnnnnnnnnnnnnnnnnnnnnnnnnnnnnnnnnnnnnnnnnnnnnnnnnnnnnnnnnnnnnnnnnnnnnnnnnnnnnnnnnnnnnnnnnnnnnnnnnnnnnnnnnnnnnnnnnnnnnnnnnnnnnnnnnnnnnnnnnnnnnnnnnnnnnnnnnnnnnnnnnnnnnnnaagtggaaaaacggtgtttctccatcgaagaagtgggcctgtatcccaccaaggtgtcagacttggaggacaataccttgaaaatgaaaccaggaacctggtatgatgagtcttcccaaagtgaagatccaggaggcagtaagccagctgccaaaaaaaagtctaccatgcaaggtgacagagagcagttgaaatggaagaaatagttcctatggaaaagttgaagggttttggtctaaggaccagtcacagtggaagaatgcagctgagaatgatgagcgcttatctaacccccagattgagtggcagaatagcacaattgacagtgaggatggggaacagtttgacaacatgactgacggagtagctgagcccaggcatggcagcttagctggagttaaactgagcagccaacaggccta

SEQ ID NO: 26336 - DNA, 320 bp, Macaca Mulatta
ggtgcagtacctgaaggacaggcagctggcaggcgccatggtatgggccctggacctggatgacttccagggctccttctgtggccaggatctgcgcttccctcttaccaatgccatcaaggatgccctcgccgcaacttagccctctgttcttctgcacacagcacgggggccaaggatgccccatcccctctggctccagctggccaggagcctgatcacctgccctgctgagtcccaggttgagcctcagtctccctcccttggagcctatgcagagggccacaacacacagatttgagctcagccctggtgggcag

SEQ ID NO: 26337 - DNA, 568 bp, Macaca Mulatta
  misc_feature (1)...(568): n = A,T,C or G
caggtggttccttaaaaacagttattgctcaagatgaaaacctcccagaagatgttgtgagagaatttgggattgacctggttactggattacatcatcttcataaacttggcattctcttttgtgacatttctcctgggaagnnnnnnnnnnnnnnnnnnnnnnnnnnnnnnnnnnnnnnnnnnnnnnnnnnnnnnnnnnnnnnnnnnnnnnnnnnnnnnnnnnnnnnnnnnnnnnnnnnnnnnnnnnnnnnnnnnnnnnnnnnnnnnnnnnnnnnnnnnnnnnnnnnnnnnnnnnnnnnnnnnnnnnnnnnnnnnnnnnnnnnnnnnnnnnnnnnnnnnnnnnnnnnnnnnnnnnnnnnnnnnnnnnnnnnnnnnnnnnnnnnnnnnnnnnnnnnnnnnnnnnnnnnnnnnnnnnnnnnnnnnnnnnnnnnnnnnnnnnnnnnnnnnnnnnnnnnnnnnnnnnnnnnnnnnnnnnnnnnnnnnnnnnnagattcttctcgtcctaaagcttcttcagattttattaatttgcttgatgggttacttcaaagagatcctcaaaaaag

SEQ ID NO: 26338 - DNA, 113 bp, Macaca Mulatta
aactcagacctatgaggagggtgcatcaccgtggcctgtcccagattgcctagcggggagctcattgtgcctttgatggtgtgaacatgagctagagaccagagcctacactg

SEQ ID NO: 26339 - DNA, 826 bp, Macaca Mulatta
agtgtggaaaggctctcactcactccacaggctgtgccacgcctgtgaaaatgcatgctgtcaggaacccccacgtatgtagggaatgtgggaaggcctttagacacactgcttaccttactagtcacatgcgagtccacactggggagaagccctgtgagttggaagaatgtggaaaagcctcccctgttgcttccggcctaactgcacttgtaagaactgatgctgcagagaagccctgtgaatgtaacgaatgtggaaaaaccttcactggatgctcaggtctttctaaacacgtccaaacatgccctggaaagcagctctctgaatggagggactgtgggaaagcctgcagtgggttttatctactgaatgaacatgtgaaaactcgcatgagggagaagccctttgcatgtatggtttgcggaaaatattttagaaattcctcctgccttaataatcatgttcgaattcacactggaataaaaccctatacatgtagctactgtgggaaggccttcaccgtgcgctgtggccttactagacacgtacgaacacacacgggcgagaagccatacacgtgtaaggactgtgggaaagccttctgtacgtcctcaggccttaccgagcacgtaaggactcacactggagagaaaccctatgaatgtaaagattgtgggaaatccttcactgtttcttcaagcctgactgaacatgcgagaatccatactggagagaaaccctacgaatgtaagcaatgtggcaaagccttcacagggcgctcagggctcactaaacagacacggacacacaccggggagaagcc

SEQ ID NO: 26340 - DNA, 618 bp, Macaca Mulatta
  misc_feature (1)...(618): n = A,T,C or G
tgcccgcttccaaaatggcgacggcagcggccgtggctggtgcgcttggccgggcgggctggaagcttctgcannnnnnnnnnnnnnnnnnnnnnnnnnnnnnnnnnnnnnnnnnnnnnnnnnnnnnnnnnnnnnnnnnnnnnnnnnnnnnnnnnnnnnnnnnnnnnnnnnnnnnnnnnnnnnnnnnnnnnnnnnnnnnnnnnnnnnnnnnnnnnnnnnnnnnnnnnnnnnnnnnnnnnnnnnnnnnnnnnnnnnnnnnnnnnnnnnnnnnnnnnnnnnnnnnnnnnnnnnnnnnnnnnnnnnnnnnnnnnnnnnnnnnnnnnnnnnnnnnnnnnnnnnnnnnnnnnnnnnnnnnnnnnnnnnnnnnnnnnnnnnnnnnnnnnnnnnnnnnnnnnnnnnnnnnnnnnnnnnnnnnnnnnnnnnnnnnnnnnnnnnnnnnnnnnnnnnaatactgcattttgtgaccgagtgcaatgcccggctcacacgcatgctggaagaggagcagaagctggtacagttggnccaggnnngaagaagaagacagaccagttcctgagggatgcagtggaaaccagactgagaatgctgatcccatacattgagcactggccccgg

SEQ ID NO: 26341 - DNA, 1551 bp, Macaca Mulatta
  misc_feature (1)...(1551): n = A,T,C or G
ctctgttcgaatctatgattttgctagtaaaactcttttgactcagatgaaattcaaacaaggaggtactgcccttgtttgggtaccccgaatggtaannnnnnnnnnnnnnnnnnnnnnnnnnnnnnnnnnnnnnnnnnnnnnnnnnnnnnnnnnnnnnnnnnnnnnnnnnnnnnnnnnnnnnnnnnnnnnnnnnnnnnnnnnnnnnnnnnnnnnnnnnnnnnnnnnnnnnnnnnnnnnnnnnnnnnnnnnnnnnnnnnnnnnnnnnnnnnnnnnnnnnnnnnnnnnnnnnnnnnnnnnnnnnnnnnnnnnnnnnnnnnnnnnnnnnnnnnnnnnnnnnnnnnnnnnnnnnnnnnnnnnnnnnnnnnnnnnnnnnnnnnnnnnnnnnnnnnnnnnnnnnnnnnnnnnnnnnnnnnnnnnnnnnnnnnnnnnnnnnnnnnnnnnnnnnnnnnnnnnnnnnnnnnnnnnnnnnnnnnnnnnnnnnnnnnnnnnnnnnnnnnnnnnnnnnnnnnnnnnnnnnnnnnnnnnnnnnnnnnnnnnnnnnnnnnnnnnnnnnnnnnnnnnnnnnnnnnnnnnnnnnnnnnnnnnnnnnnnnnnnnnnnnnnnnnnnnnnnnnnnnnnnnnnnnnnnnnnnnnnnnnnnnnnnnnnnnnnnnnnnnnnnnnnnnnnnnnnnnnnnnnnnnnnnnnnnnnnnnnnnnnnnnnnnnnnnnnnnnnnnnnnnnnnnnnnnnnnnnnnnnnnnnnnnnnnnnnnnnnnnnnnnnnnnnnnnnnnnnnnnnnnnnnnnnnnnnnnnnnnnnnnnnnnnnnnnnnnnnnnnnnnnnnnnnnnnnnnnnnnnnnnnnnnnnnnnnnnnnnnnnnnnnnnnnnnnnnnnnnnnnnnnnnnnnnnnnnnnnnnnnnnnnnnnnnnnnnnnnnnnnnnnnnnnnnnnnnnnnnnnnnnnnnnnnnnnnnnnnnnnnnnnnnnnnnnnnnnnnnnnnnnnnnnnnnnnnnnnnnnnnnnnnnnnnnnnnnnnnnnnnnnnnnnnnnnnnnnnnnnnnnnnnnnnnnnnnnnnnnnnnnnnnnnnnnnnnnnnnnnnnnnnnnnnnnnnnnnnnnnnnnnnnnnnnnnnnnnnnnnnnnnnnnnnnnnnnnnnnnnnnnnnnnnnnnnnnnnnnnnnnnnnnnnnnnnnnnnnnnnnnnnnnnnnnnnnnnnnnnnnnnnnnnnnnnnnnnnnnnnnnnnnnnnnnnnnnnnnnnnnnnnnnnnnnnnnnnnnnnnnnnnnnnnnnnnnnnnnnnnnnnnnnnnnnnnnnnnnnnnnnnnnnnnnnnnnnnnnnnnnnnnnnnnnnnnnnnnnnnnnnnnnnnnnnnnnnnnnnnnnnnnnnnnnnnnnnnnnnnnnnnnnnnnnnnnnnnnnnnnnnnnnnnnnnntattagaaatgaatgcagaattaccaacgcatatgcagtttaaacgaacagtaagcccaatataaacttgatttttattttaacatatgctctttctggatagagatgactattttcccaacaagtagaaacacttaaaatca

SEQ ID NO: 26342 - DNA, 796 bp, Macaca Mulatta
  misc_feature (1)...(796): n = A,T,C or G
ctgcccccaggctctttgtccttgggccgtgcggaccctgaggaagagctgagtctcacctttgccttgagacagcagaacctggaaagactctcggagctggtgcaggctgtgtcggatcccaactctcctcaatacggnnnnnnnnnnnnnnnnnnnnnnnnnnnnnnnnnnnnnnnnnnnnnnnnnnnnnnnnnnnnnnnnnnnnnnnnnnnnnnnnnnnnnnnnnnnnnnnnnnnnnnnnnnnnnnnnnnnnnnnnnnnnnnnnnnnnnnnnnnnnnnnnnnnnnnnnnnnnnnnnnnnnnnnnnnnnnnnnnnnnnnnnnnnnnnnnnnnnnnnnnnnnnnnnnnnnnnnnnnnnnnnnnnnnnnnnnnnnnnnnnnnnnnnnnnnnnnnnnnnnnnnnnnnnnnnnnnnnnnnnnnnnnnnnnnnnnnnnnnnnnnnnnnnnnnnnnnnnnnnnnnnnnnnnnnnnnnnnnnnnnnnnnnnnnnnnnnnnnnnnnnnnnnnnnnnnnnnnnnnnnnnnnnnnnnnnnnnnnnnnnnnnnnnnnnnnnnnnnnnnnnnnnnnnnnnnnnnnnnnnnnnnnnnnnnnnnnnagttcctggagcagtatttccatgactcagacctggctcagttcatgcgcctcttcggtggcaactttgcacatcaggcatcagtaacccgtgtggttggacaacagggccggggccgggccgggattgaggccagtctagatgtgcagtacctgatgagtgctggcgccaacatctccacctgggtctacagtagccctg

SEQ ID NO: 26343 - DNA, 5288 bp, Macaca Mulatta
  misc_feature (1)...(5288): n = A,T,C or G
gacgaatgcgcatccactgcctagagaatgtggacaaggcccttcagttcctgaaggagcagagagtccatcttgagaacatgggatcccatgacatcgtggatggaaaccaccggctgacccttggcctcatctggaccatcatcctgcgcttccagnnnnnnnnnnnnnnnnnnnnnnnnnnnnnnnnnnnnnnnnnnnnnnnnnnnnnnnnnnnnnnnnnnnnnnnnnnnnnnnnnnnnnnnnnnnnnnnnnnnnnnnnnnnnnnnnnnnnnnnnnnnnnnnnnnnnnnnnnnnnnnnnnnnnnnnnnnnnnnnnnnnnnnnnnnnnnnnnnnnnnnnnnnnnnnnnnnnnnnnnnnnnnnnnnnnnnnnnnnnnnnnnnnnnnnnnnnnnnnnnnnnnnnnnnnnnnnnnnnnnnnnnnnnnnnnnnnnnnnnnnnnnnnnnnnnnnnnnnnnnnnnnnnnnnnnnnnnnnnnnnnnnnnnnnnnnnnnnnnnnnnnnnnnnnnnnnnnnnnnnnnnnnnnnnnnnnnnnnnnnnnnnnnnnnnnnnnnnnnnnggtgcttgataatgctattgaaacagaaaaaatgattgaaaagtatgaatcacttgcctctgaccttctggaatggattgaacaaaccatcatcattctgaacaatcgcaaatttgccaattcactggtcggggttcaacagcagcttcaggcattcaacacttaccgcactgtggagaaaccacccaannnnnnnnnnnnnnnnnnnnnnnnnnnnnnnnnnnnnnnnnnnnnnnnnnnnnnnnnnnnnnnnnnnnnnnnnnnnnnnnnnnnnnnnnnnnnnnnnnnnnnnnnnnnnnnnnnnnnnnnnnnnnnnnnnnnnnnnnnnnnnnnnnnnnnnnnnnnnnnnnnnnnnnnnnnnnnnnnnnnnnnnnnnnnnnnnnnnnnnnnnnnnnnnnnnnnnnnnnnnnnnnnnnnnnnnnnnnnnnnnnnnnnnnnnnnnnnnnnnnnnnnnnnnnnnnnnnnnnnnnnnnnnnnnnnnnnnnnnnnnnnnnnnnnnnnnnnnnnnnnnnnnnnnnnnnnnnnnnnnnnnnnnnnnnnnnnnnnnnnnnnnnnnnnnnnnnnnnnnnnnnnnnnnnnnnnnnnnnnnnnnnnnnnnnnnnnnnnnnnnnnnnnnnnnnnnnnnnnnnnnnnnnnnnnnnnnnnnnnnnnnnnnnnnnnnnnnnnnnnnnnnnnnnnnnnnnnnnnnnnnnnnnnnnnnnnnnnnnnnnnnnnnnnnnnnnnnnnnnnnnnnnnnnnnnnnnnnnnnnnnnnnnnnnnnnnnnnnnnnnnnnnnnnnnnnnnnnnnnnnnnnnnnnnnnnnnnnnnnnnnnnnnnnnnnnnnnnnnnnnnnnnnnnnnnnnnnnnnnnnnnnnnnnnnnnnnnnnnnnnnnnnnnnnnnnnnnnnnnnnnnnnnnnnnnnnnnnnnnnnnnnnnnnnnnnnnnnnnnnnnnnnnnnnnnnnnnnnnnnnnnnnnnnnnnnnnnnnnnnnnnnnnnnnnnnnnnnnnnnnnnnnnnnnnnnnnnnnnnnnnnnnnnnnnnnnnnnnnnnnnnnnnnnnnnnnnnnnnnnnnnnnnnnnnnnnnnnnnnnnnnnnnnnnnnnnnnnnnnnnnnnnnnnnnnnnnnnnnnnnnnnnnnnnnnnnnnnnnnnnnnnnnnnnnnnnnnnnnnnnnnnnnnnnnnnnnnnnnnnnnnnnnnnnnnnnnnnnnnnnnnnnnnnnnnnnnnnnnnnnnnnnnnnnnnnnnnnnnnnnnnnnnnnnnnnnnnnnnnnnnnnnnnnnnnnnnnnnnnnnnnnnnnnnnnnnnnnnnnnnnnnnnnnnnnnnnnnnnnnnnnnnnnnnnnnnnnnnnnnnnnnnnnnnnnnnnnnnnnnnnnnnnnnnnnnnnnnnnnnnnnnnnnnnnnnnnnnnnnnnnnnnnnnnnnnnnnnnnnnnnnnnnnnnnnnnnnnnnnnnnnnnnnnnnnnnnnnnnnnnnnnnnnnnnnnnnnnnnnnnnnnnnnnnnnnnnnnnnnnnnnnnnnnnnnnnnnnnnnnnnnnnnnnnnnnnnnnnnnnnnnnnnnnnnnnnnnnnnnnnnnnnnnnnnnnnnnnnnnnnnnnnnnnnnnnnnnnnnnnnnnnnnnnnnnnnnnnnnnnnnnnnnnnnnnnnnnnnnnnnnnnnnnnnnnnnnnnnnnnnnnnnnnnnnnnnnnnnnnnnnnnnnnnnnnnnnnnnnnnnnnnnnnnnnnnnnnnnnnnnnnnnnnnnnnnnnnnnnnnnnnnnnnnnnnnnnnnnnnnnnnnnnnnnnnnnnnnnnnnnnnnnnnnnnnnnnnnnnnnnnnnnnnnnnnnnnnnnnnnnnnnnnnnnnnnnnnnnnnnnnnnnnnnnnnnnnnnnnnnnnnnnnnnnnnnnnnnnnnnnnnnnnnnnnnnnnnnnnnnnnnnnnnnnnnnnnnnnnnnnnnnnnnnnnnnnnnnnnnnnnnnnnnnnnnnnnnnnnnnnnnnnnnnnnnnnnnnnnnnnnnnnnnnnnnnnnnnnnnnnnnnnnnnnnnnnnnnnnnnnnnnnnnnnnnnnnnnnnnnnnnnnnnnnnnnnnnnnnnnnnnnnnnnnnnnnnnnnnnnnnnnnnnnnnnnnnnnnnnnnnnnnnnnnnnnnnnnnnnnnnnnnnnnnnnnnnnnnnnnnnnnnnnnnnnnnnnnnnnnnnnnnnnnnnnnnnnnnnnnnnnnnnnnnnnnnnnnnnnnnnnnnnnnnnnnnnnnnnnnnnnnnnnnnnnnnnnnnnnnnnnnnnnnnnnnnnnnnnnnnnnnnnnnnnnnnnnnnnnnnnnnnnnnnnnnnnnnnnnnnnnnnnnnnnnnnnnnnnnnnnnnnnnnnnnnnnnnnnnnnnnnnnnnnnnnnnnnnnnnnnnnnnnnnnnnnnnnnnnnnnnnnnnnnnnnnnnnnnnnnnnnnnnnnnnnnnnnnnnnnnnnnnnnnnnnnnnnnnnnnnnnnnnnnnnnnnnnnnnnnnnnnnnnnnnnnnnnnnnnnnnnnnnnnnnnnnnnnnnnnnnnnnnnnnnnnnnnnnnnnnnnnnnnnnnnnnnnnnnnnnnnnnnnnnnnnnnnnnnnnnnnnnnnnnnnnnnnnnnnnnnnnnnnnnnnnnnnnnnnnnnnnnnnnnnnnnnnnnnnnnnnnnnnnnnnnnnnnnnnnnnnnnnnnnnnnnnnnnnnnnnnnnnnnnnnnnnnnnnnnnnnnnnnnnnnnnnnnnnnnnnnnnnnnnnnnnnnnnnnnnnnnnnnnnnnnnnnnnnnnnnnnnnnnnnnnnnnnnnnnnnnnnnnnnnnnnnnnnnnnnnnnnnnnnnnnnnnnnnnnnnnnnnnnnnnnnnnnnnnnnnnnnnnnnnnnnnnnnnnnnnnnnnnnnnnnnnnnnnnnnnnnnnnnnnnnnnnnnnnnnnnnnnnnnnnnnnnnnnnnnnnnnnnnnnnnnnnnnnnnnnnnnnnnnnnnnnnnnnnnnnnnnnnnnnnnnnnnnnnnnnnnnnnnnnnnnnnnnnnnnnnnnnnnnnnnnnnnnnnnnnnnnnnnnnnnnnnnnnnnnnnnnnnnnnnnnnnnnnnnnnnnnnnnnnnnnnnnnnnnnnnnnnnnnnnnnnnnnnnnnnnnnnnnnnnnnnnnnnnnnnnnnnnnnnnnnnnnnnnnnnnnnnnnnnnnnnnnnnggaaggaatgcagctcatttcagaaaagcctgagacggaacctgtggtgaaggagaaactcactggtttacatgaaatgtgggaagtccttgaatctactacccagaccaaggcccagcggctctttgatgcaaacaaggccgaacttttcacccagagctgcgcagatctagacaaatggctgcacggcctggagagtcagattcagtctgatgactacggcaaagacctgaccagcgtcaatatcctgctgaaaaagcaacaggcaannnnnnnnnnnnnnnnnnnnnnnnnnnnnnnnnnnnnnnnnnnnnnnnnnnnnnnnnnnnnnnnnnnnnnnnnnnnnnnnnnnnnnnnnnnnnnnnnnnnnnnnnnnnnnnnnnnnnnnnnnnnnnnnnnnnnnnnnnnnnnnnnnnnnnnnnnnnnnnnnnnnnnnnnnnnnnnnnnnnnnnnnnnnnnnnnnnnnnnnnnnnnnnnnnnnnnnnnnnnnnnnnnnnnnnnnnnnnnnnnnnnnnnnnnnnnnnnnnnnnnnnnnnnnnnnnnnnnnnnnnnnnnnnnnnnnnnnnnnnnnnnnnnnnnnnnnnnnnnnnnnnnnnnnnnnnnnnnnnnnnnnnnnnnnnnnnnnnnnnnnnnnnnnnnnnnnnnnnnnnnnnnnnnnnnnnnnnnnnnnnnnnnnnnnnnnnnnnnnnnnnnnnnnnnnnnnnnnnnnnnnnnnnnnnnnnnnnnnnnnnnnnnnnnnnnnnnnnnnnnnnnnnnnnnnnnnnnnnnnnnnnnnnnnnnnnnnnnnnnnnnnnnnnnnnnnnnnnnnnnnnnnnnnnnnnnnnnnnnnnnnnnnnnnnnnnnnnnnnnnnnnnnnnnnnnnnnnnnnnnnnnnnnnnnnnnnnnnnnnnaggatgagcagagtgctgtctccatgttgaagaagcaccagatcttagaacaagctgtggaggactatgcagagactgtgcatcagctctccaagaccagccgggccctggtggccgacagccatcctgaaangtgagcgcattagcatgcggcaatccaaagtggataaactgtacgctggtctgaaagaccttgctgaagagagaagaggcaagctggatgagagacacagattattccagctcaaccgggaggtggacgacctggagcagtggatcgctgagagggaggtggtcgcagggtcccatgaactgggacaggactatgagcatnatgttacaagaacgattccgggaatttgcccgagacaccgggaacattggacaggaacgtgtggacacggtcaatcacatggcagatgagctcatcaactctggacattcagatgccgccaccattgctgaatggaaggacggcctcaatgaagcctgggccgacctcctggagctcattgacacaagaacacagattcttgccgcttcctatgaactgcacaagttttaccacgatgctaaggagatctttgggcgtatacaggacaaacacaagaaactccctgaggagcttgggagagatcagaacacagtggagaccttacagagaatgcacactacatttgagcatgacatccaggctctgggcacacaggtg

SEQ ID NO: 26344 - DNA, 1899 bp, Macaca Mulatta
  misc_feature (1)...(1899): n = A,T,C or G
agtgaatgagagccacaagtctgaatttatagagctaaggaagtggctgaaagctaggaagtttcaagattcaaacttagcgcctgcttgttttccaggtnnnnnnnnnnnnnnnnnnnnnnnnnnnnnnnnnnnnnnnnnnnnnnnnnnnnnnnnnnnnnnnnnnnnnnnnnnnnnnnnnnnnnnnnnnnnnnnnnnnnnnnnnnnnnnnnnnnnnnnnnnnnnnnnnnnnnnnnnnnnnnnnnnnnnnnnnnnnnnnnnnnnnnnnnnnnnnnnnnnnnnnnnnnnnnnnnnnnnnnnnnnnnnnnnnnnnnnnnnnnnnnnnnnnnnnnnnnnnnnnnnnnnnnnnnnnnnnnnnnnnnnnnnnnnnnnnnnnnnnnnnnnnnnnnnnnnnnnnnnnnnnnnnnnnnnnnnnnnnnnnnnnnnnnnnnnnnnnnnnnnnnnnnnnnnnnnnnnnnnnnnnnnnnnnnnnnnnnnnnnnnnnnnnnnnnnnnnnnnnnnnnnnnnnnnnnnnnnnnnnnnnnnnnnnnnnnnnnnnnnnnnnnnnnnnnnnnnnnnnnnnnnnnnnnnnnnnnnnnnnnnnnnnnnnnnnnnnnnnnnnnnnnnnnnnnnnnnnnnnnnnnnnnnnnnnnnnnnnnnnnnnnnnnnnnnnnnnnnnnnnnnnnnnnnnnnnnnnnnnnnnnnnnnnnnnnnnnnnnnnnnnnnnnnnnnnnnnnnnnnnnnnnnnnnnnnnnnnnnnnnnnnnnnnnnnnnnnnnnnnnnnnnnnnnnnnnnnnnnnnnnnnnnnnnnnnnnnnnnnnnnnnnnnnnnnnnnnnnnnnnnnnnnnnnnnnnnnnnnnnnnnnnnnnnnnnnnnnnnnnnnnnnnnnnnnnnnnnnnnnnnnnnnnnnnnnnnnnnnnnnnnnnnnnnnnnnnnnnnnnnnnnnnnnnnnnnnnnnnnnnnnnnnnnnnnnnnnnnnnnnnnnnnnnnnnnnnnnnnnnnnnnnnnnnnnnnnnnnnnnnnnnnnnnnnnnnnnnnnnnnnnnnnnnnnnnnnnnnnnnnnnnnnnnnnnnnnnnnnnnnnnnnnnnnnnnnnnnnnnnnnnnnnnnnnnnnnnnnnnnnnnnnnnnnnnnnnaggtgtcgcatatgaaggatgaaaaagaggccctaataaatcaactaactttggtggaatccttgtggacggaagagctaaaggttctcagggcatctgccaagaccctgcacagtttgcaaacagcttttacctgatttcaccaaagtgcgtttggtcacctcctctnnnnnnnnnnnnnnnnnnnnnnnnnnnnnnnnnnnnnnnnnnnnnnnnnnnnnnnnnnnnnnnnnnnnnnnnnnnnnnnnnnnnnnnnnnnnnnnnnnnnnnnnnnnnnnnnnnnnnnnnnnnnnnnnnnnnnnnnnnnnnnnnnnnnnnnnnnnnnnnnnnnnnnnnnnnnnnnnnnnnnnnnnnnnnnnnnnnnnnnnnnnnnnnnnnnnnnnnnnnnnnnnnnnnnnnnnnnnnnnnnnnnnnnnnnnnnnnnnnnnnnnnnnnnnnnnnnnnnnnnnnnnnnnnnnnnnnnnnnnnnnnnnnnnnnnnnnnnnnnnnnnnnnnnnnnnnnntgggtgtggggaagtgtgaggtagtcctgggttcccgccagggtggcccagccaccagccgttccctgtgtgactgcactgaggtgggcgttgaagagtcccctgggggacacagggcttccaagaggagggaatgtcctctaaacatgctcctggcctcccaaggcggcgcttgtctaattattcacttgggaagaatgactggcttagccagcggccctttctgctttgttctggtggctgtcctgggcaggcctttcaacctggggagctggcccatcc

SEQ ID NO: 26345 - DNA, 568 bp, Macaca Mulatta
actgcctcttctggttggagggtggtttctgtccctatcgcgtctccttgttttgttcagtttcctcagagtttgcattctgaacctttcccctctgcctgctaggtcagaaggatcgtcgcccaactggcttcaagccctgaaactgaagaagaagaaggtctgagaagtcactgaggtgaggacgggttcctgggcttggatccagtctgaggagggcctgccctggaggcttgggaggccttgtgccccttctgtcccttagttcccacccctttctgtgggaggttagaaacagcaggtgcagccaagttccagagactcggtgggcccttggatcctctagattttgtccacagggaggtcagggtgttgtctggcctggtatggaagaggaggagggccaccatcctagcctgcctctctttgctcagggacagtccccccatgctccctggctggacggagagtggtcagccagcccttctggtctggggccctgcaggcacttaccaggctctatgaccaggcttagcagggggaaccaagatgggtgtgggggagagga

SEQ ID NO: 26346 - DNA, 334 bp, Macaca Mulatta
ctgaactacctgggccctcctttcaacgagcctgacttcaaccctccccgcctgggggcagagactctgcccagggccactgttaacttggaggtgtggcaaagcctcaatgacaaactgcggctgacccaaaactacgaggcttacagccaccttctgtgttacttgcgtggcctcaaccgtcaggctgccactgctgagctgcgccgcagcctggcccacttctgcaccagcctccagggcctgctgggcagcattgcaggcgtcatggcagctctgggctacccactgccccagccgctgcctgggactgaacccactggactcctggccc

SEQ ID NO: 26347 - DNA, 3500 bp, Macaca Mulatta
  misc_feature (1)...(3500): n = A,T,C or G
cgctgaagaccctggggacagatggtctttttctcttttcctccttggacactgacggggatatgtacatcagccctgaggagttcaaacccattgctgagaagctaacaggnnnnnnnnnnnnnnnnnnnnnnnnnnnnnnnnnnnnnnnnnnnnnnnnnnnnnnnnnnnnnnnnnnnnnnnnnnnnnnnnnnnnnnnnnnnnnnnnnnnnnnnnnnnnnnnnnnnnnnnnnnnnnnnnnnnnnnnnnnnnnnnnnnnnnnnnnnnnnnnnnnnnnnnnnnnnnnnnnnnnnnnnnnnnnnnnnnnnnnnnnnnnnnnnnnnnnnnnnnnnnnnnnnnnnnnnnnnnnnnnnnnnnnnnnnnnnnnnnnnnnnnnnnnnnnnnnnnnnnnnnnnnnnnnnnnnnnnnnnnnnnnnnnnnnnnnnnnnnnnnnnnnnnnnnnnnnnnnnnnnnnnnnnnnnnnnnnnnnnnnnnnnnnnnnnnnnnnnnnnnnnnnnnnnnnnnnnnnnnnnnnnnnnnnnnnnnnnnnnnnnnnnnnnnnnnnnnnnnnnnnnnnnnnnnnnnnnnnnnnnnnnnnnnnnnnnnnnnnnnnnnnnnnnnnnnnnnnnnnnnnnnnnnnnnnnnnnnnnnnnnnnnnnnnnnnnnnnnnnnnnnnnnnnnnnnnnnnnnnnnnnnnnnnnnnnnnnnnnnnnnnnnnnnnnnnnnnnnnnnnnnnnnnnnnnnnnnnnnnnnnnnnnnnnnnnnnnnnnnnnnnnnnnnnnnnnnnnnnnnnnnnnnnnnnnnnnnnnnnnnnnnnnnnnnnnnnnnnnnnnnnnnnnnnnnnnnnnnnnnnnnnnnnnnnnnnnnnnnnnnnnnnnnnnnnnnnnnnnnnnnnnnnnnnnnnnnnnnnnnnnnnnnnnnnnnnnnnnnnnnnnnnnnnnnnnnnnnnnnnnnnnnnnnnnnnnnnnnnnnnnnnnnnnnnnnnnnnnnnnnnnnnnnnnnnnnnnnnnnnnnnnnnnnnnnnnnnnnnnnnnnnnnnnnnnnnnnnnnnnnnnnnnnnnnnnnnnnnnnnnnnnnnnnnnnnnnnnnnnnnnnnnnnnnnnnnnnnnnnnnnnnnnnnnnnnnnnnnnnnnnnnnnnnnnnnnnnnnnnnnnnnnnnnnnnnnnnnnnnnnnnnnnnnnnnnnnnnnnnnnnnnnnnnnnnnnnnnnnnnnnnnctccgggagactgtcctggaaagttcgcccatcctcaccctgctcaacgagagcttcatcagcacctggtccctggtgaaggagctggaggagctgcagncagaacaaccaggagaacccgtcccatcagaagctggctggcctgcacctggagaagtacagcttcccggtagagatgatgatctgcctgcccaatggcaccgtggtnggtccaccacatcaatgccaactacttcttggacatcacctccatgaagcccgaggaagtcgagagccatctcttcagcttctcatccacctttgaagacccatccacggccacctacatgcagttcctgaaggagggactccggcgtggcctgcccctcctccagccctagagtgcctgcggggccagacgggatctgatgcacaggcccccgcgccccagagccagagtgttcctcagcctgtttcagactgcagatgccgcccactcccaccccacgcctaggctgccttggggggtacaagctccactgagggtggccatcacagccttggctccatggtggcgggtagacaaggggtgcctgggctggctgggcagaggaacctctagctctgactgtcactctccgctctccctacccatttggctctggaaagctgcttggcacccccagatcagggcctgggtgaactctctggacctcttccagtgagccgcacagtctaggcccttgttgggtgaagaatggaaggaggagcaggctaggaagacagggccaccaccctctccttgctttcagcccttcccacaggaaacatccagaagccccagccaggagggaccaggcttccaaagcggctcnnnnnnnnnnnnnnnnnnnnnnnnnnnnnnnnnnnnnnnnnnnnnnnnnnnntgcctgatgtccccagctggggtcggtctcagcaggagccagtcttctggagcctctgggcagaaccctccattgaagcggaaatcagactggaccccctgcggcttccctgaccacgccactgaccagatgtctggggaagtttactgtgaaggggcttctgcctttagcaatggggcgcactaagggggttcttgaggcctagagccaaagcactcccaccacctaccttagcacagggtctccgcaggactgcgggagccagcgcttctgccgcccctcctgcccctcagacctcgcatccacagaagcacagcccggccaaagaccacagccttctccagagccggcgctgtccggcaaccaggggtgccccaggctagctcttctaccactggggcaccacggactccccttggccactcttgggactttggtccacgtcctgagccactgaccatggccagtctttctttttatatgtgcagaaaagtgtttttatacaaactttctcatggtttgtaggtatttttttataaccccagtgctgaggagaaaggaggggcagtggcttccccagcagcagccccatgatggctgaatccgnnnnnnnnnnnnnnnnnnnnnnnnnnnnnnnnnnnnnnnnnnnnnnnnnnnnnnnnnnnnnnnnnnnnnnnnnnnnnnngctttttaaaaacagtcctcagaggatccaccaccccccagcactgtcccatcctctccacgcaggcccacaggcgcacctacactctttcattaaggccttgaagtcaggctnnnnnnnnnnnnnnnnnnnnnnnnnnnnnnnnnnnnnnnnnnnnnnnnnnnnnnnnnnncctggcagcggaggaaggaaggcagacatctctgcagccactcctgggccttctattcgccgagttaccccgcttgccttgggcgtgttcactgagccttccccagccagtcttgttctgagttttgttttgtattgttttgagatgcagtcttgctctgtcactcaggctggagtgctacagcgtgatcttggctcactgcannnnnnnnnnnnnggttcaagcaattctgcctcagcctacctagtagctgggattacaggtgcatgccaccacacccggctaatttttgtatttttagtagagctggggtttcaccatattggtcaggctggtctggaactcctgaactcaggtgatccacccgcctcagcctcccaaattgctgggattacaggcgtgagccacacgcccaaccttgttcttaattttgtattatccaatcgttgctaatattacatgcactttctcacttaatcctcatgacaagcttgtgaggcagatgctcattgttcccatgtagatgaaacttgagtctcaggg

SEQ ID NO: 26348 - DNA, 904 bp, Macaca Mulatta
  misc_feature (1)...(904): n = A,T,C or G
ctcgatgggcttctcctgcgcgccgcccggtgtctggccgagtccagagagccgcggcgcctcgttccaaggagccatcgccgtagcccgaggccgggtcccgggttggggactgcaggggaaggcagcggcggccgcggcgggagccccaccggggtctgggactggggaactgcctccggcttcacgnnnnnnnnnnnnnnnnnnnnnnnnnnnnnnnnnnnnnnnnnnnnnnnnnnnnnnnnnnnnnnnnnnnnnnnnnnnnnnnnnnnnnnnnnnnnnnnnnnnnnnnnnnnnnnnnnnnnnnnnnnnnnnnnnnnnnnnnnnnnnnnnnnnnnnnnnnnnnnnnnnnnnnnnnnnnnnnnnnnnnnnnnnnnnnnnnnnnnnnnnnnnnnnnnnnnnnnnnnnnnnnnnnnnnnnnnnnnnnnnnnnnnnnnnnnnnnnnnnnnnnnnnnnnnnnnnnnnnnnnnnnnnnnnnnnnnnnnnnnnnnnnnnnnnnnnnnnnnnnnnnnnnnnnnnnnnnnnnnnnnnnnnnnnnnnnnnnnnnnnnnnnnnnnnnnnnnnnnnnnnnnnnnnnnnnnnnnnnnnnnnnnnnnnnnnnnnnnnnnnnnnnnnnnnnnnnnnnnnnnnnnnnnnnnnnnagtgtttgtaagcggtgcattcggaagatggatcaccactgtccgtgggtcaacaactgtgtcggcgagaacaaccagaagtacttcgtcctgtttacaatgtacatagctctcatttccttgcacgcccttatcatggtgggattccacttcctgcattgctttgaagaagattggacacctatggactgaacagggaagaaatggcagaggctggaatctctcttcatgaaaaaatgcagccccttaacgtcagttcgaca

SEQ ID NO: 26349 - DNA, 736 bp, Macaca Mulatta
  misc_feature (1)...(736): n = A,T,C or G
agctatgcctcagatgcagcttcaggccttagcgatgtgggagaagggatgggacaaatgaggagacccccagggaggaatctccggcgcagaccccgatcccggctgcgggtcactagtgtngtctcagaccagaatgacagagtggttgagtgccagctacagacccataacagcaagatggtgaccttccgatttgatctggatggggacagcccggaagagnnnnnnnnnnnnnnnnnnnnnnnnnnnnnnnnnnnnnnnnnnnnnnnnnnnnnnnnnnnnnnnnnnnnnnnnnnnnnnnnnnnnnnnnnnnnnnnnnnnnnnnnnnnnnnnnnnnnnnnnnnnnnnnnnnnnnnnnnnnnnnnnnnnnnnaggaggagccagcaccattacctcccttgaccatccccctcccagacccatccaatgnagagctccagagcagcaactccctggagcacaggagctgggcagccttctccacctcatcttctcctggaactcctttgtctcctggaaacccattttcccctggaacccccattttcccaggtcccatcttccccatcgcttctcccccattcagacacagaggacagtgctggagccgggccagagaccagggaagctctggctgagagcgaccgtgcagctgagggtctgggggctggagttgaggaggaaggagatgatgggaaggaaccccaagttgggggcagccccccacccctga

SEQ ID NO: 26350 - DNA, 2605 bp, Macaca Mulatta
  misc_feature (1)...(2605): n = A,T,C or G
cgccagttcctccgaccccctgctgctcggccgcggctgcccgcgcccccatccccggctcctcgcccggatgcctctccccgggggactgtggtggcttctctgctgccgtcgaggcttcactcttctgcaccgggactacggggacggcgagcttagcggggacggggacgaggacgaggacgaggaaacctttgagctacggaccccgagtccagcgggcggcgggaggnnnnnnnnnnnnnnnnnnnnnnnnnnnnnnnnnnnnnnnnnnnnnnnnnnnnnnnnnnnnnnnnnnnnnnnnnnnnnnnnnnnnnnnnnnnnnnnnnnnnnnnnnnnnnnnnnnnnnnnnnnnnnnnnnnnnnnnnnnnnnnnnnnnnnnnnnnnnnnnnnnnnnnnnnnnnnnnnnnnnnnnnnnnnnnnnnnnnnnnnnnnnnnnnnnnnnnnnnnnnnnnnnnnnnnnnnnnnnnnnnnnnnnnnnnnnnnnnnnnnnnnnnnnnnnnnnnnnnnnnnnnnnnnnnnnnnnnnnnnnnnnnnnnnnnnnnnnnnnnnnnnnnnnnnnnnnnnnnnnnnnnnnnnnnnnnnnnnnnnnnnnnnnnnnnnnnnnnnnnnnnnnnnnnnnnnnnnnnnnnnnnnnnnnnnnnnnnnnnnnnnnnnnnnnnnnnnnnnnnnnnnnnnnnnnnnnnnnnnnnnnnnnnnnnnnnnnnnnnnnnnnnnnnnnnnnnnnnnnnnnnnnnnnnnnnnnnnnnnnnnnnnnnnnnnnnnnnnnnnnnnnnnnnnnnnnnnnnnnnnnnnnnnnnnnnnnnnnnnnnnnnnnnnnnnnnnnnnnnnnnnnaggtccgggctatgcacccctgcgcgaggaggcggtgcggctgttcttggcgctgcaggcgctggagggggcgcgtcgccccgggcccttgatgcagggtgtgctccaaacctgccgggacttgcccgcgctccgggatgaactcttcctgcagctggctaagcagacctcgggccctgcaggcccccccgggctcccggctacccaagaccctgcgaccctgcggtactggcaactcctcacctgcatgagctgcaccttccggcctgggggagctgtgcgggggcacctcctggggcacttggagaggnnnnnnnnnnnnnnnnnnnnnnnnnnnnnnnnnnnnnnnnnnnnnnnnnnnnnnnnnnnnnnnnnnnnnnnnnnnnnnnnnnnnnnnnnnnnnnnnnnnnnnnnnnnnnnnnnnnnnnnnnnnnnnnnnnnnnnnnnnnnnnnnnnnnnnnnnnnnnnnnnnnnnnnnnnnnnnnnnnnnnnnnnnnnnnnnnnnnnnnnnnnnnnnnnnnnnnnnnnnnnnnnnnnnnnnnnnnnnnnnnnnnnnnnnnnnnnnnnnnnnnnnnnnnnnnnnnnnnnnnnnnnnnnnnnnnnnnnnnnnnnnnnnnnnnnnnnnnnnnnnnnnnnnnnnnnnnnnnnnnnnnnnnnnnnnnnnnnnnnnnnnnnnnnnnnnnnnnnnnnnnnnnnnnnnnnnnnnnnnnnnnnnnnnnnnnnnnnnnnnnnnnnnnnnnnnnnnnnnnnnnnnnnnnnnnnnnnnnnnnnnnnnnnnnnnnnnnnnnnnnnnnnnnnnnnnnnnnnnnnnnnnnnnnnnnnnnnnnnnnnnnnnnnnnnnnnnnnnnnnnnnnnnnnnnnnnnnnnnnnnnnnnnnnnnnnnnnnnnnnnnnnnnnnnnnnnnnnnnnnnnnnnnnnnnnnnnnnnnnnnnnnnnnnnnnnnnnnnnnnnnnnnnnnnnnnnnnnnnnnnnnnnnnnnnnnnnnnnnnnnnnnnnnnnnnnnnnnnnnnnnnnnnnnnnnnnnnnnnnnnnnnnnnnnnnnnnnnnnnnnnnnnnnnnnnnnnnnnnnnnnnnnnnnnnnnnnnnnnnnnnnnnnnnnnnnnnnnnnnnnnnnnnnnnnnnnnnnnnnnnnnnnnnnnnnnnnnnnnnnnnnnnnnnnnnnnnnnnnnnnnnnnnnnnnnnnnnnnnnnnnnnnnnnnnnnnnnnnnnnnnnnnnnnnnnnnnnnnnnnnnnnnnnnnnnnnnnnnnnnnnnnnnnnnnnnnnnnnnnnnnnnnnnnnnnnnnnnnnnnnnnnnnnnnnnnnnnnnnnnnnnnnnnnnnnnnnnnnnnnnnnnnnnnnnnnnnnnnnnnnnnnnnnnnnnnnnnnnnnnnnnnnnnnnnnnnnnnnnnnnnnnnnnnnnnnnnnnnnnnnnaggtggaagagatcatgcagctggtgaatgcctacttggccaacccctcccccgagaggccctgcagcagctcttctcgtccatgccaagacctgccagacacctcccctcccagccagcacccgggcctggacgagccccagggacagtctggctgcttggggcagctgcaggactgagcctgccaagaggtcacgacttccctcctgcctccagcctgggccaggactgctccgagatttgagggaaacatggacccttttggccctgcagggacagggcacatcccacacccaagggctacaatgggtgtgggcaattttctagtttgtttcttaatttatttgtagaagagaag

SEQ ID NO: 26351 - DNA, 456 bp, Macaca Mulatta
  misc_feature (1)...(456): n = A,T,C or G
aggaaatagagaaattgagaatagaactgggtgaaagcaaacaacacttggaacaggagcagcagaaggcagcccgggccagagaggagtgcctgagactaacagaactgctggnnnnnnnnnnnnnnnnnnnnnnnnnnnnnnnnnnnnnnnnnnnnnnnnnnnnnnnnnnnnnnnnnnnnnnnnnnnnnnnnnnnnnnnnnnnnnnnnnnnnnnnnnnnnnnnnnnnnnnnnnnnnnnnnnnnnnnnnnnnnnnnnnnnnnnnnnnnnnnnnnnnnnnnnnnnnnnnnnnnnnnnnnnnnnnnnnnnnnnnnnnnnnnnnnnnnnnnnnnnnnnnnnnnnnnnnnnnnnnnnnnnnnnnnnnnnnnnnnnnnnnnnnnagatctgaaattgctcaactcagtcaagaaaaaaggtatacctatgataaattgggaaagtacagagaagaaatga

SEQ ID NO: 26352 - DNA, 84 bp, Macaca Mulatta
  misc_feature (1)...(84): n = A,T,C or G
nggacatcctctttgatgcgaatacacacaaagtgaagaagtttgttctacacaccaattaccctgggcattataatttcaaca

SEQ ID NO: 26353 - DNA, 340 bp, Macaca Mulatta
  misc_feature (1)...(340): n = A,T,C or G
gggacaacctgagtgctcagtcgtaaagaggaaaggcagaatttttccttgctatggctggaacaaaggcacttttgatgctggaaaacttcatagatggaaaatttttaccttgtagctcatacatagattcttacgacccatcaacgggggaagtgtattgcagagtgccaaatagtggaaaagannagatcgaagccgcggtcaaggccgccagagaagcctttcccggctggtcatcccgcagcccccaggagcgctcgcgggtcctgaaccaggtggcggatttgctggagcagtccctggaggagtttgcccaggccgagtctaaagaccaagg

SEQ ID NO: 26354 - DNA, 1752 bp, Macaca Mulatta
  misc_feature (1)...(1752): n = A,T,C or G
caggtccggcgggcggtggcctctgtggtaggcggctggctgctgcgtctgcgcgaccgctactccttcttccacaagctcatccctctgctgctcagcagcctcagcgatgaggtgcccgaggtcagnnnnnnnnnnnnnnnnnnnnnnnnnnnnnnnnnnnnnnnnnnnnnnnnnnnnnnnnnnnnnnnnnnnnnnnnnnnnnnnnnnnnnnnnnnnnnnnnnnnnnnnnnnnnnnnnnnnnnnnnnnnnnnnnnnnnnnnnnnnnnnnnnnnnnnnnnnnnnnnnnnnnnnnnnnnnnnnnnnnnnnnnnnnnnnnnnnnnnnnnnnnnnnnnnnnnnnnnnnnnnnnnnnnnnnnnnnnnnnnnnnnnnnnnnnnnnnnnnnnnnnnnnnnnnnnnnnnnnnnnnnnnnnnnnnnnnnnnnnnnnnnnnnnnnnnnnnnnnnnnnnnnnnnnnnnnnnnnnnnnnnnnnnnnnnnnnnnnnnnnnnnnnnnnnnnnnnnnnnnnnnnnnnnnnnnnnnnnnnnnnnnnnnnnnnnnnnnnnnnnnnnnnnnnnnnnnnnnnnnnnnnnnnnnnnnnnnnnnnnnnnnnnnnnnnnnnnnnnnnnnnnnnnnnnnnnnnnnnnnnnnnnnnnnnnnnnnnnnnnnnnnnnnnnnnnnnnnnnnnnnnnnnnnnnnnnnnnnnnnnnnnnnnnnnnnnnnnnnnnnnnnnnnnnnnnnnnnnnnnnnnnnnnnnnnnnnnnnnnnnnnnnnnnnnnnnnnnnnnnnnnnnnnnnnnnnnnnnnnnnnnnnnnnnnnnnnnnnnnnnnnnnnnnnnnnnnnnnnnnnnnnnnnnnnnnnnnnnnnnnnnnnnnnnnnnnnnnnnnnnnnnnnnnnnnnnnnnnnnnnnnnnnnnnnnnnnnnnnnnnnnnnnnnnnnnnnnnnnnnnnnnnnnnnnnnnnnnnnnnnnnnnnnnnnnnnnnnnnnnnnnnnnnnnnnnnnnnnnnnnnnnnnnnnnnnnnnnnnnnnnnnnnnnnnnnnnnnnnnnnnnnnnnnnnnnnnnnnnnnnnnnnnnnnnnnnnnnnnnnnnnnnnnnnnnnnnnnnnnnnnnnnnnnnnnnnnnnnnnnnnnnnnnnnnnnnnnnnnnnnnnnnnnnnnnnnnnnnnnnnnnnnnnnnnnnnnnnnnnnnnnnnnnnnnnnnnnnnnnnnnnnnnnnnnnnnnnnnnnnnnnnnnnnnnnnnnnnnnnnnnnnnnnnnnnnnnnnnnnnnnnnnnnnnnnnnnnnnnnnnnnnnnnnnnnnnnnnnnnnnnnnnnnnnnnnngcagatacaggacgtgcaggaaacactgatgcctcaggtcctgacctccctggaggannnnnnnnnnnnnnnnnnnnnnnnnnnnnnnnnnnnnnnnnnnnnnnnnnnnnnnnnnnnnnnnnnnnnnnnnnnnnnnnnnnnnnnnnnnnnnnnnnnnnnnnnnnnnnnnnnnnnnnnnnnnnnnnnnnnnnnnnnnnnnnnnnnnnnnnnnnnnnnnnnnnnnnnnnnnnnnnnnnnnnnnnnnnnnnnnnnnnnnnnnnnnnnnnnnnnnnnnnnnnnnnnnnnnnnnnnnnnnnnnnnnnnnnnnnnnnnnnnnnnnnnnnnnnnnnnnnnnnnnnnnnnnnnnnnnnagatgtgcctgcttccccttcaccttctgccatgactggaagtttcctgaggcctccccacccatgcagaattgtgagtcaattaaacctcttttcttcata

SEQ ID NO: 26355 - DNA, 1655 bp, Macaca Mulatta
  misc_feature (1)...(1655): n = A,T,C or G
cgccagttcctccgaccccctgctgctcggccgcggctgcccgcgcccccatccccggctcctcgcccggatgcctctccccgggggactgtggtggcttctctgctgccgtcgaggcttcactcttctgcaccgggactacggggacggcgagcttagcggggacggggacgaggacgaggacgaggaaacctttgagctacggaccccgagtccagcgggcggcgggaggnnnnnnnnnnnnnnnnnnnnnnnnnnnnnnnnnnnnnnnnnnnnnnnnnnnnnnnnnnnnnnnnnnnnnnnnnnnnnnnnnnnnnnnnnnnnnnnnnnnnnnnnnnnnnnnnnnnnnnnnnnnnnnnnnnnnnnnnnnnnnnnnnnnnnnnnnnnnnnnnnnnnnnnnnnnnnnnnnnnnnnnnnnnnnnnnnnnnnnnnnnnnnnnnnnnnnnnnnnnnnnnnnnnnnnnnnnnnnnnnnnnnnnnnnnnnnnnnnnnnnnnnnnnnnnnnnnnnnnnnnnnnnnnnnnnnnnnnnnnnnnnnnnnnnnnnnnnnnnnnnnnnnnnnnnnnnnnnnnnnnnnnnnnnnnnnnnnnnnnnnnnnnnnnnnnnnnnnnnnnnnnnnnnnnnnnnnnnnnnnnnnnnnnnnnnnnnnnnnnnnnnnnnnnnnnnnnnnnnnnnnnnnnnnnnnnnnnnnnnnnnnnnnnnnnnnnnnnnnnnnnnnnnnnnnnnnnnnnnnnnnnnnnnnnnnnnnnnnnnnnnnnnnnnnnnnnnnnnnnnnnnnnnnnnnnnnnnnnnnnnnnnnnnnnnnnnnnnnnnnnnnnnnnnnnnnnnnnnnnnnnnaggtccgggctatgcacccctgcgcgaggaggcggtgcggctgttcttggcgctgcaggcgctggagggggcgcgtcgccccgggcccttgatgcagggtgtgctccaaacctgccgggacttgcccgcgctccgggatgaactcttcctgcagctggctaagcagacctcgggccctgcaggcccccccgggctcccggctacccaagaccctgcgaccctgcggtactggcaactcctcacctgcatgagctgcaccttccggcctgggggagctgtgcgggggcacctcctggggcacttggagaggnnnnnnnnnnnnnnnnnnnnnnnnnnnnnnnnnnnnnnnnnnnnnnnnnnnnnnnnnnnnnnnnnnnnnnnnnnnnnnnnnnnnnnnnnnnnnnnnnnnnnnnnnnnnnnnnnnnnnnnnnnnnnnnnnnnnnnnnnnnnnnnnnnnnnnnnnnnnnnnnnnnnnnnnnnnnnnnnnnnnnnnnnnnnnnnnnnnnnnnnnnnnnnnnnnnnnnnnnnnnnnnnnnnnnnnnnnnnnnnnnnnnnnnnnnnnnnnnnnnnnnnnnnnnnnnnnnnnnnnnnnnnnnnnnnnnnnnnnnnnnnnnnnnnnnnnnnnnnnnnnnnnnnnnnnnnnnnnnnnnnnnnnnnnnnnnnnnnnnnnnnnnnnnnnnnnnnnnnnnnnnnnnnnnnnnnnnnnnnnnnnnnnnnnnnnnnnnnnnnnnnnnnnnnnnnnnnnnnnnggactgagcctgccaagaggtcacgacttccctcctgcctccagcctgggccaggactgctccgagatttg

SEQ ID NO: 26356 - DNA, 881 bp, Macaca Mulatta
  misc_feature (1)...(881): n = A,T,C or G
acatgatcagccaacgctcagcgggtggccgccctggctctggcccacaactgggcactggccgagggaccctgcggctccgatcccggggccctgccacggtggaggatctgnnnnnnnnnnnnnnnnnnnnnnnnnnnnnnnnnnnnnnnnnnnnnnnnnnnnnnnnnnnnnnnnnnnnnnnnnnnnnnnnngcggccaccatggtggagctgggaaaggacaaaaggaacccggatgagctggccgaggccctggacgaacggctgggtgactttgccttccctgacgaattcgtctttgacgtctggggcgccatcggggacgccaaggtcggccgctactaggactccccccggaccctgcgatgatgacccgggcccaacctggtgggggcccccagcagggacactgacatcaggactcaagcctccagcctgagcctagctcagcagcccaaggatgatggggaggggaggtggggccgggccccctgccccgctccaatcggtaccatcccctccccggttcccaatctgtccggggtccccggcccccctgtgccctgttccccacctacctcagccgggtcaggcacggggaagggagggatcggccaaattgggcggccacccccgcctccaccactttccaccatcagctgccaaactggtccctccgtctccctggggccttgggttctgctcgggggtcatgaccttcctagtttcctgacgcagggaatataggggagagggttgtccctccccccagcaaatgcaataatgccctcgcccctcctgagaggagcaaggtccccgtggagcctgttacctccgcatttgacatgaataggctgtgaaccccccaacctcctcccc

SEQ ID NO: 26357 - DNA, 1929 bp, Macaca Mulatta
  misc_feature (1)...(1929): n = A,T,C or G
cgacgatggggtcatggcgccccgaaccctcctcctgctgctctcggggaccttggccctgaccgagaccaaggcgggtgagtgcggggtcaggaaggaaacagcctctgcgggaggagagaggagcaaggcgccctctgggcaggggcgcaggacctggggagtcgcgcggggaggagggtcggagggtctcagcctctccgcgcccccaggctcccactccttgaggtatttcagcaccgcccatgtcccggcccggccacggggagccccgcttcatcgccgtgggctacgtggacgacacccagttcgtgcggtttgacagtgacgccgcgagtccgaggatggagccgcgggagtggtgggtggagcaggaggggcctggagtattgggagctggagacactgggcgccagggacaaggcacagactttctgagtgaacctgagagacgctgctcggatactacaaccagagcgaggccggtgagtgaccccagcccggggcgcatgtcacttactcctggcttcatgcctcacggacggtgttggttcccttgagtctcagggtccaagattaaccccgaggctgtgggacctgcagagatcctcgacccggcagagtcccaggctcctttacccggtttcgttttcagtttaggccaaaatccctgcgggttggcggcgacaggggcggggctcggtgggcgggactgactagcaggcggggccaggggtctcataccctccagtggatgcatggctgcgacctggggccggacgggcgcttcctccgcgggtatgaacagttcgcctacgacggcaaggattatctcaccctgaatgaggacctgcgctcctggtccgcggtggacacggcggctcaaatctccgagcaaaagtcaaatgatggctctgaggctgagcaccagagagcctacctggaagacacatgcgtggagtggctccacagatacctggagaatgggaaggagacgctgcagcgctcagaacccccaaagacacacgtggcccaccaccccgtctctgatcatgaggccaccctgaggtgctgggccctgggcttctatcctgcggagatcacagtgacctggcagcgggatggggaggaccagacccaggacacggagcttgtggagaccaggcctgcaggggatggaactttccagaagtgggcagctgtggtggtaccttctggagaggagcagagatacacgtgccatgtgcagcatgaggggctacccgagcccctcaccctgagatgggagccgtcttcccagtccaccatccccatcgtgggcatcattgctggcctggttctccttggagctgtggtcactggagctgtgattgttgctgtgatgtggaggaggaagagctcaggtagaaaaggagggagctactctcaggcttcgtgtagcgacagtacccaggcatctgatgagtctctcacagcttgtaaagataccttttctctcctatggccctttaacagcatcttgcttcattcccctcaccttctcaagctgagctgaagaaactttgaagtaaataacagctgtgttgggttcaaaaaaaaaaaannnnnnncgcttncccagaatcggtaaacgagcacgagggtctngcgaagtcnagccaactangagcgacgcaagaagaaaatatgtttgtgctactaagaagaccaagaaatgttcgtttgcgtttggacccaaaacttccggcgcgacgcggtagagtggagagtaaggacaagacagagcagacagagagaaggagacacagacaacagagaagagacgaggtaaaagaaaagacnnnnnnnnnnnnnnnnnnnnnnncaaacactgaagcagagaagagagaaggaacagcaacgacgaagaagagagagaggaaagcaaag

SEQ ID NO: 26358 - DNA, 708 bp, Macaca Mulatta
  misc_feature (1)...(708): n = A,T,C or G
ctcactataggccgatttggtaccgnnnnnnnnnnnnnnnnnnnnnnnnnnnnnnnnnnnnnaaaaacggcatattctttattttgcatactttaatttcagaacaaaatgaagaaaataaaataaaccactacacacaacatccaatcctgctgtcagagtagagagggaatggggcttgacacccttggtttcctgccttcaacacaaggacaggagaggaaaaacaacactagacatcagcagggggagccaggtgggacaggggcacttgaggctgcagtgggagccacggggacactatacaagggcacaagttttccaactatgaacttctaatcgacttcttccatgcgagacgcatcctcatcgccctcaagagggggaatctcatcaggaactgcagcactgggttcttctgctgccacttcatcttcatcaatacctaaagtaaaattaagccatgtaagacttgattaaatagcattaagtcaaatccagacaggagcctagttgcacaaactccttgccacatcaagtaccaaagctgcttacctagacctagcttgatcatgcggtagatgcggttggagtgggtctggggatcctcaagggcaaagcctgaagagagcagggcggtttcaaacagcagcaccaccaggtcccttaactgccttatcatcttgtcggcctcagccttctgccgca

SEQ ID NO: 26359 - DNA, 367 bp, Macaca Mulatta
  misc_feature (1)...(367): n = A,T,C or G
cacatcctgtctctgtgtgtgccggctggcctgagtctctcagcctcacctgccagacaacgccncctccttcctcaccctgtctcctgtattctcctganaccttgatccacacaatgcctcccaacctcactggctactactgctttgtctcacagaagnnnnnnnnnnnnnnnnnnnnnnnnnnnnacatcagcttggctgtgcggaagatcgcgctgctactgaagccggacaaggagatcgaccaccagggcaaccacatgacggtgaggacgctcagcaccttccgaaaatacactgtgcagttcgatgtgggagtggagtttgaggaggaaatcaggagtgtggacggacggaaatgcca

SEQ ID NO: 26360 - DNA, 2366 bp, Macaca Mulatta
  misc_feature (1)...(2366): n = A,T,C or G
ttcttcaaagcaaggtatgtagaatatttcattgagcaagtggtaagctggcaaaaataaattaaacatggcagactcggtcatcttcacctgggatggaagtccaggcgaacttggtctcacctggaaagcatttttgtctgttcaggaagatattcgaatccagcttgtgaaagatgctagaagatttgatggggtggatgctgaatttaaggtttgtcaaagacaggttgtatgctattctagcaaagttttgnnnnnnnnnnnnnnnnnnnnnnnnnnnnnnnnnnnnnnnnnnnnnnnnnnnnnnnnnnnnnnnnnnnnnnnnnnnnnnnnnnnnnnnnnnnnnnnnnnnnnnnnnnnnnnnnnnnnnnnnnnnnnnnnnnnnnnnnnnnnnnnnnnnnnnnnnnnnnnnnnnnnnnnnnnnnnnnnnnnnnnnnnnnnnnnnnnnnnnnnnnnnnnnnnnnnnnnnnnnnnnnnnnnnnnnnnnnnnnnnnnnnnnnnnnnnnnnnnnnnnnnnnnnnnnnnnnnnnnnnnnnnnnnnnnnnnnnnnnnnnnnnnnnnnnnnnnnnnnnnnnnnnnnnnnnnnnnnnnnnnnnnnnnnnnnnnnnnnnnnnnnnnnnnnnnnnnnnnnnnnnnnnnnnnnnnnnnnnnnnnnnnnnnnnnnnnnnnnnnnnnnnnnnnnnnnnnnnnnnnnnnnnnnnnncagctgaatacactgattacacttttgctgggagaacttccacctggagacagacagaagatcatgacaatttgtaccatagatgtccatgccagagacgtggtggcaaaacttatttctcagaaggcaagttgtttnnnnnnnnnnnnnnnnnnnnnnnnnnnnnnnnnnnnnnnnnnnnnnnnnnnnnnnnnnnnnnnnnnnnnnnnnnnnnnnnnnnnnnnnnnnnnnnnnnnnnnnnnnnnnnnnnnnnnnnnnnnnnnnnnnnnnnnnnnnnnnnnnnnnnnnnnnnnnnnnnnnnnnnnnnnnnnnnnnnnnnnnnnnnnnnnnnnnnnnnnnnnnnnnnnnnnnnnnnnnnnnnnnnnnnnnnnnnnnnnnnnnnnnnnnnnnnnnnnnnnnnnnnnnnnnnnnnnnnnnnnnnnnnnnnnnnnnnnnnnnnnnnnnnnnnnnnnnnnnnnnnnnnnnnnnnnnnnnnnnnnnnnnnnnnnnnnnnnnnnnnnnnnnnnnnnnnnnnnnnnnnnnnnnnnnnnnnnnnnnnnnnnnnnnnnnnnnnnnnnnnnnnnnnnnnnnnnnnnnnnnnnnnnnnnnnnnagatttgtatttcttggggaagctatcgcactgaagccatcagttggaatatttattactatgaacccgggttatgctggtcgaaccgaattaccggaaaatctcaaagctcttttcaggcaagtnnnnnnnnnnnnnnnnnnnnnnnnnnnnnnnnnnnnnnnnnnnnnnnnnnnnnnnnnnnnnnnnnnnnnnnnnnnnnnnnnnnnnnnnnnnnnnnnnnnnnnnnnnnnnnnnnnnnnnnnnnnnnnnnnnnnnnnnnnnnnnnnnnnnnnnnnnnnnnnnnnnnnnnnnnnnnnnnnnnnnnnnnnnnnnnnnnnnnnnnnnnnnnnnnnnnnnnnnnnnnnnnnnnnnnnnnnnnnnnnnnnnnnnnnnnnnnnnnnnnnnnnnnnnnnnnnnnnnnnnnnnnnnnnnnnnnnnnnnnnnnnnnnnnnnnnnnnnnnnnnnnnnnnnnnnnnnnnnnnnnnnnnnnnnnnnnnnnnnnnnnnnnnnnnnnnnnnnnnnnnnnnnnnnnnnnnnnnnnnnnnnnnnnnnnnnnnnnnnnnnnnnnnnnnnnnnnnnnnnnnnnnnnnnnnnnnnnnnnnnnnnnnnnnnnnnnnnnnnnnnnnnnnnnnnnnnnnnnnnnnnnnnnnnnnnnnnnnnnnnnnnnnnnnnnnnnnnnnnnnnnnnnnnnnnnnnnnnnnnnnnnnnnnnnnnnnnnnnnnnnnnnnnnnnnnnnnnnnnnnnnnnnnnnnnnnnnnnnnnnnnnnnnnnnnnnnnnnnnnnnnnnnnnnnnnnnnnnnnnnnnnnnnnnnnnnnnnnnnnnnnnnnnnnnnnnnnnnnnnnnnnnnnnnnnnnnnnnnnnnnnnnnnnnnnnnnnnnnnnnnnnnnnnnnnnnnnnnnnnnnnnnnnnnnnnnnnnnnnnnnnnnnnnnnnnaggtgctgaccctcgccagcaatgagcgcatcaccctcactcccttcatgaggcttctgtttgagatacatcacttaaggagcgcaaccccggccactgtttccagagctggtattctgtatgtgaacccacaagatctgggctggaatccgt

SEQ ID NO: 26361 - DNA, 986 bp, Macaca Mulatta
  misc_feature (1)...(986): n = A,T,C or G
gggctctctttccttgcctaacgcagccatggctcgtggtcccaagaagcatctgaagcgggtagcagctccaaagcattggatgctggataaattgaccggtgtgtttgctcctcgtccatccaccggtccccacaagttgagagagtgtctccccctcatcatcttcctaaggaacagacttaagtatgccctgacaggagatgaagtaaagaagatttgcatgcagcggttcattaagatcgatggcaaggtccgaactgatataacctaccctgctggattcatggatgtcatcagcattgacaagacgggagagaatttccgtctgatctatgacaccaagggtcgctttgctgtacatcgtattacacctgaggaggtccaatacaggttatgcaaagtgagaaagatctttgtgggcacaaaaaagaatccctccatctggtgaactcatgaatgccccgcaaccaactcgtctacccccgattccacctccataaaggtggaaatgaatactctttctagaatttggattttgggaaaaacttggtcaaaaattaagcaggaatattaccctccatgttgttcggaaaccctggagtaaaacacttagatgtatttagggagacacttgagaaggtctggcataaacaccttggtgaaataagaaattatggttgtaggtataccacacaacacaaagcactgaaagaggctataactcacgggaaattgatattctggacanatggggctttctaaccgataataacaacatatgcccaacaatgtggactatacataggttgtttatacaaaagctacataaaatcaatagacaaaagaagtatatatagtttaagcagggggcaaaagaggggctantaataagaaccacgttggtaaattgttaatacctctatactcccccaaggatagagaaggggtatatttcgggtctcttaggataaaacataatcgag

SEQ ID NO: 26362 - DNA, 146 bp, Macaca Mulatta
aggatttaaaaacttgcctcttgaggaccaaattaccctaatccagtattcttggatgtgtctatcatcatttgccttgagctggagatcgtacaaacatacgaacagccaatttctctattttgcaccagacctagtctttaatg

SEQ ID NO: 26363 - DNA, 465 bp, Macaca Mulatta
ggggcctcaggcctcagtcaaagccatgccagtcgctgtgctctgagtcatattccagctcggcgcccacgcacttgacaccgtccagcagcatgggcgtgccgtggtgtcggtactctcacccatgacgcgggcctgcaccgtcacgcgcacacaggtgccggtgccaccttcgcaggctagcagtatctcctctttgaggacgccctctttgtgtgctgagtactcgcacttgacactataaccttcagggacgggcaccacactgaggagcttgaggtgcaggctggggacaggtgcctcacggacgtccttgctcagcctgtgcactgggggcagagtgaaggtaatctcatacctgtgcaggatcttcaggaagccaaccttgaccagtaagctgctgtcactctcctgggtgaccatgaccaccgagtcatgcagcttgtctatcaaagtggacgtggc

SEQ ID NO: 26364 - DNA, 867 bp, Macaca Mulatta
gggactggcgcgggtggctgagttgcccttggtctcggggtccctgttggcactgaggctgcagctatcatggtgaacttacttcagattgtgcgggaccactgggttcatgttcttgtccctatgggatttgtcattggatgttatttagacagaaagaatgatgaacggctaactgccttccggaacaagagtgcgttatttaaaagggaattgcgacccaatgaagaagttacctggaagtgaagagtctggctgaactatcgaatgctcacattttaaacttctgagagaaataaaaacgtgaagaatccgaaaatcgctttccacacactcctattcataaatcttgttgggcccgcctcgggccctccaaaaagcttttcaaacccattccgtttgggcgcccggggcccccgtatggtaaatgaaccatggcccttaccctgttttcctaaggaaatccttgggcctgcaatagggctttggactccccaccccatcaaaaaaccccccgggcgggcaaaaccgaggggttcttgaaacaaaatccccgatgggagtttcctgaagggccctttgacggggaatttaatccaacggggaattcccacgcgaggccccccaatttttaaattttatgcttccccggctcctggcccaccttcaatgggaaattaacccgcgtgttgcaattcttcgataaaacgatttttttggtccaaaatttgggaaagctccttttcccaataccgtgcccgtttattgaaaacccgcgaacctcctcccgcgaggacctttacaccctccacttgtttcgccctttgggccaaaatataactctccccccccccggagggagaaaat

SEQ ID NO: 26365 - DNA, 698 bp, Macaca Mulatta
  misc_feature (1)...(698): n = A,T,C or G
gggcaaatccagacagaacctttgacttggtgttgaaagtggaatgtcatgcctctgaaaatgaagnnnnnnnnnnnnnnnnnnnnnnnnnnnnnnnnnnnnnnnnnnnnnnnnnnnnnnnnnnnnnnnnnnnnnnnnnnnnnnnnnnnnnnnnnnnnnnnnnnnnnnnnnnnnnnnnnnnnnnnnnnnnnnnnnnnnnnnnnnnnnnnnnnnnnnnnnnnnnnnnnnnnnnnnnnnnnnnnnnnnnnnnnnnnnnnnnnnnnnnnnnnnnnnnnnnnnnnnnnnnnnnnnnnnnnnnnnnnnnnnnnnnnnnnnnnnnnnnnnnnnnnnnnnnnnnnnnnnnnnnnnnnnnnnnnnnnnnnnnnnnnnnnnnnnnnnnnnnnnnnnnnnnnnnnnnnnnnnnnnnnnnnnnnnnnnnnnnnnnnnnnnnnnnnnnnnnnnnnnnnnnnnnnnnnnnnnnnnnnnnnnnnnnnnnnnnnnnnnnnnnnnnnnnnnnnnnnnnnnnnnnnnnnnnnnnnnnnnnnnnnnnnnnnnnnnnnnnnnnnnnnnnnnnnnnnnnngaaaatgatttgaatgaaactctcaaatcactgtataaccacccagtaccaaaggcaaatactcctgtaaatttgagtgtgngcattcctacttcattgctcctgatgtaactggactcccaacaatacctgagagtn

SEQ ID NO: 26366 - DNA, 653 bp, Macaca Mulatta
cggcacgagacggaggtaggtcggagccgctgccgtcgccatgacccgcggtaaccagcgtgagctcgcccgccagaagaatatgaaaaagcagagcgactcggttaagggaaagcgccgagatgacgggctttctgctgccgggccgcaagcagagggactcggagatcatgcagcagaagcagaaaaaggcaaacgagaagaaggaggaacccaagtagctttgtggcttcgtgtccaaccctcttgcccttcgcctgtgtgcctggagccagtcccaccacgctcgcgtttcctcctgtagtgctcacaggtcccagcaccgatggcattccctttgccctgagtctgcagcgggtcccttttgtgcttccttcccctcaggtagcctctctccccctgggccactcccgggggtgagggggttaccccttcccagtgttttttattcctgtggggctcaccccaaagtattaaaagtagctttgtaattccttgagcgcctggtttgactggggacttggggggatggggttggaggaatgactgccctttcccaccaaaaagggagaactctttagactcagattgtggatacaggcttaataagtgaaacatcacagaagccttttattatgcaatgacaaccaaac

SEQ ID NO: 26367 - DNA, 680 bp, Macaca Mulatta
  misc_feature (1)...(680): n = A,T,C or G
nnnnnnnnnnnnnnnnnnnnnnnnnnnnnnnnnnnnnnnnnnnnnnnnnnnnnnnnnnnnnnnnnnnnnnnnnnnnnnnnnnnnnnnnnnnnnnnnnnnnnnnnnnnnnnnnnnnnnnnnnnnnnnnnnnnnnnnnnnnnnnnnnnnnnnnnnnnnnnnnnnnnnnnnnnnnnnnnnnnnnnnnnnnnnnnnnnnnnnnnnnnnnnnnnnnnnnnnnnnnnnnnnnnnnnnnnnnnnnnnnnnnnnnnnnnnnnnnnnnnnnnnnnnnnnnnnnnnnnnnnnnnnnnnnnnnnnnnnnnnnnnnnnnnnnnnnnnnnnnnnnnnnnnnnnnnnnnnnnnnnnnnnnnnnnnnnnnnnnnnnnnnnnnnnnnnnnnnnnnnnnnnnnnnnnnnnnnnnnnnnnnnnnnnnnnnnnnnnnnnnnnnnnnnnnnnnnnnnnnnnnnnnnnnnnnnnnnnnnnnnnnnnnnnnnnnnnnnnnnnnnnnnnnnnnnnnnnnnnnnnnnnnnnnnnnnnnnnnnnnnnnnngaaagaattttatttgtgagtaaaacatgttacactggagaaaggacattcaggacctgtcctcccaagtcnggtgtccatatatgcaactatatttcatgttgtaatacaaaggattaaactacaaaagtgaaattaagtcattgcatatgtgg

SEQ ID NO: 26368 - DNA, 740 bp, Macaca Mulatta
ggcaatatttcagggaacattgccagagaggacacctgtgagatggttttgtacctggcctgtcccgtggagggcctggaaatggtcagcatggacaggggccagaggggagcctgggtcactcaacgctgtgcccctgctgtggctcggagccacgggtcctgcatggaactctcagagcaggcaggatctgccctgacctcagcccatggggaaagcagccactgcctgcggagagggtggcactggggcaggacggttggggtgagtggggcgtaggggcagtcaggaaggcttccaggggtgtcagggtcgtccccacttcctgcagctgagaccacagcagtgtaacaggtttcggggctcatggggtgagccagcattggctggacacgtggaatgacctggagacagcaacggcctctgggaagacgggctccgagtcccccttttgctgagcatgacctgtccccttcaggacccgtttgagtactaccagctggcactggcagccgccgtggacctgggcaacaagaaggcacagctgaagatctacacgcggccggccaccgtctcccacaacttcctcctggaccgtgagaagtcgctcctcttctaccagaaagtcaggaccttcgccacagagctcaacgtccgcggggtcaacctgcctcctctgccactctgcgggtgggcccccctggttgggcccccagcaaccctcgctgaggacagcatcc

SEQ ID NO: 26369 - DNA, 256 bp, Macaca Mulatta
tcggaatcaatctttctgtaataagatctagaagcctgggcctttgcttgttttgactcaagcagtaaaaagtctctatcattctatttggctcatttcatatgtagttccttccccagtcaacaactgaccacgtctgcctctgcctgagcattacgatgttcaaacatcctatctttcttcttctattcaagcttttatccattcttctctgacctatcttccctgctccaactctatctctcaatattcctga

SEQ ID NO: 26370 - DNA, 186 bp, Macaca Mulatta
aggccctccggcagcagtgaattcagcccaagcctgctcggcccacagtgcaggggtccccaggctctccatccccacttccagtcggctacccctgatgaagggaccacctgaggtggctcagagtaatagccagacccagccagtgaacaggcagatggatgctgctggctttgacttctcact

SEQ ID NO: 26371 - DNA, 869 bp, Macaca Mulatta
ggacataaatgcctttttacagcttaatcattttggtcttctgtttagtgttgtatttcaattgtggagcctcattttaagtgttcattcttgtaagatttaatgcttgctttttctttttatagctaatagtgaaatctacaaaccaaaacaagaacttttaaatcggggatataaattaaagatcatatgcacaattcaatttatgttcttgtaataagcttattaaaaattggtgtttgtgataacagtttgcttgagttactagagatgcgtctagtagaccttaatctagcgtaggttgaacctgtgaatatggggaagatgtgtattcccagattctttcctgaatagatttgagtgttattgttatttgggagctccagggtgagttgattgactacccgaaactgtattttgccgatacagatgcatagtgatgctttaattattgagagaaaaagaatagaagtgaaggaccttaaaaaccaagttccaagtgaaaggtgggcaccctcttaaaaaaacgttgggtccagagattgccaccaaagatcctaaatgtgggtaagtgatggtattgttggttggttaggggaagggaaaatgatttaaagataaaccccaatccttggcaaggaacggaagagccacaaagaagtggctcccttcgtggttggatcgtaaagaatgaatttagttttgggaaaaaagagactttcctagggtggtaacaaggaacagcgaaattagaggtgccaacctgagagtatggccctgccccaagtaagagtttccatttgggttgttaacattgggtcccttttggggaagacgagggttgtaggggctcgaatggagaagtttga

SEQ ID NO: 26372 - DNA, 1065 bp, Macaca Mulatta
  misc_feature (1)...(1065): n = A,T,C or G
gtgtgctgtgccggactctgcaaggccacggccactgggtgaacaccatggccctcagcactgactatgccctgcgcaccggggcctttgaacctgctgaggcctcagttaatgcccaagacctccaaggatcctntgcaggagttgaaggagagggctctgagccgatacaacctcgtgcgggnnnnnnnnnnnnnnnnnnnnnnnnnnnnnnnnnnnnnnnnnnnnnnnnnnnnnnnnnnnnnnnnnnnnnnnnnnnnnnnnnnnnnnnnnnnnnnnnnnnnnnnnnnnnnnnnnnnnnnnnnnnnnnnnnnnnnnnnnnnnnnnnnnnnnnnnnnnnnnnnnnnnnnnnnnnnnnnnnnnnnnnnnnnnnnnnnnnnnnnnnntacctgggttccctacgcggccacgtggctgccgtgtaccagattgcatggtcagctgacagccggctcctggtcagcggcagcagtgacagcacactgaaggtgtgggatgtgaaggcccagaagctggccatggacctgcccggccacgcagatgnnnnnnnnnnnnnnnnnnnnnnnnnnnnnnnnnnnnnnnnnnnnnnnnnnnnnnnnnnnnnnnnnnnnnnnnnatggaggagatgagaaggcctgcagttctctctgacccccacctggactcggcctctgccagccgcctttcctgccagagaacaaagactcgggtggcagcgcacacacccttcccaccagtggggacctgagaatgcgcgtggcctgctgtcctcgacagacccgagtggggtcttcccacagatcccctgcttgtggcacaccccagagccagaaatcgaaggtcacaggaagttgtcaccgaacttggcctgtgtctgctactctataccttactggtacagacgggggtggtgggcggccaggctctgtgagtgggccgctagtgtcaactctgtacagggtcagaccccaggttctatgaccaaataaataacttatgttttgtgtgttagggtctaattccttgtcctagaatccccagaactcaataaaggactgtgctaaa

SEQ ID NO: 26373 - DNA, 334 bp, Macaca Mulatta
  misc_feature (1)...(334): n = A,T,C or G
gagtgcaaggggtgtgattgagtgtttgaagattgtcacacgagccaagtctcagcggattgcaaagttcgcctttgactatgccaccaagaaaggacggagcaaggtcactgctgtccacaaggccaacatcatgngaaacttggggatgggttgttcctgcagtgctgcgaggaagttgctgaactgtaccccaaaatcaaatttgagacaatgatcatagacaactgctgcatgcagnagctggtgcagaatccttaccagtttgatgtgctcgtgatgcccaatctctatgggaacattattgacaatctggctgctggcctggttgggg

SEQ ID NO: 26374 - DNA, 177 bp, Macaca Mulatta
  misc_feature (1)...(177): n = A,T,C or G
tctttgggtccagtttatcatgaagagctcaacgcacccatccggagaaacaaagaagagcccaaggcccgncccttgagagtaggcgacacggagaagccagagcctgagcgtgagtgcaacaaaggccccggggctgcctggagtgctcagctctgtgggggcccatggaggcag

SEQ ID NO: 26375 - DNA, 1277 bp, Macaca Mulatta
  misc_feature (1)...(1277): n = A,T,C or G
ggggatgatgccagtgctcctcgcctaatggttcttcgtcagccagggggaccagataactcaatggggttgggtgcagaaaggaagatccgtcaagctggtgtcattgactaaccacatccacaaagcacatcattaatccaatatgatcaagttggggggaatcgggtgaagggttctgaatatctccttcttcatccctcccgaaatctgaaatacttattgtattgagctattacaccagttttgacaccttcctcgtgttannnnnnnnnnnnnnnnnnnnnttaagaaaaccattttaaaataatgcacagttgcagcctggaaaacttaaggtggcgccttatagtatcaattttaggagctttatttggtgcatttaacgcaactggtaattgcaaaatccacttcgcctgtgttaagtggaaaatatagactgttatcttgttggccctatgaaattctgcacttttcattatatactctaccttcattaattacttctggcaagatgttctgccttggcactcagttgcgttctttttctttttcttcctgttcattatgctttaattctgaggaccatatgggggtagaatatattgtcttttaaaaattgcaaggatttggttaataggcaaacgcatttctcttaaagtgtgaatggccaaaatttttaaaaagtgttttttttttcattatcgtttttataaattctttgttcaccaatccactttaaaagaaagtttggtttataattttcaagtgaaaaaaattaatccttaaccggaagtnnnnnnnnnnnnnnnnnnnnnnccttgggggnnnnnnnnnnnnnnnnnnctttttaccctaaccaatttaagtaaaaagnnnnnnnnnnnnnnnnnnnnnnnnnnnnnnnnnaaggggggccnnnnnnnnnnnnnnnnnnnnnnnnnnnngtgttgnnnnnnnnnnnnnnnnnnnnnnnnnnnnnnnnnnnnnnnnnnnnnnnnnnnnnnccttttttttataaaaaaaacaccannnnnnnnnnnnnnnnnnnnnnnnnccnnnnnnnnnnnnnnnnnnnctgtcaaaataaaaataagaacactgatcgccccgttcacctaattgtacatcacccatcgcgaaaaacattcatacccaagcaattcataagttacaaaatgagactccctattttttcatacaactctaatgaaaatactatatatcattcctattcccttgcttcctcccnngcgccgcacggaacatcttcttaa

SEQ ID NO: 26376 - DNA, 412 bp, Macaca Mulatta
tgttttaatgtgctttatcataaataaatatcctgacaaaatggtattgaaaaaaatctgagatcgtgtgaacatgtaatacaatgttgattttcttctggtgtattttgcacagacaagcatctgccttaaaatatatacacttgtacaaaaaggaagtttggagtaagtggctccgttttggtttcttgctttttttcactctgttaacatatggtgccttttacaaatgtatattaaagattagctgtgctatattgtaaggcaaacctgcaatgatataaattttcattctattgttcaaaagttctttttactacttttaaccattaaaaagttatattatcaaatctcttttggatttatagtatatctattagtttgaaggcaaatataactaaatgaatatgct

SEQ ID NO: 26377 - DNA, 1309 bp, Macaca Mulatta
  misc_feature (1)...(1309): n = A,T,C or G
ggaaccgtgattggagataccacaaagaagaacgagtatggattaccagggcaccaggcatggagccaacaatgaaaaccaatacctatgagaggggaacatattacttctttgactgtcttaactggaggaaagtagctaaggagttccatctggaatatgacaaattagaagaacggcctcacctgccatccaccttcaactacaaccctgctcagcaagccttctaaaaaaaaagacttcccttttcttggggtatggctgtctcagcacaatactcaacataactgcagaactgatgtggctcaggcaccctggttttaattccttgaggatctggcaattggcttacgcaaagggtcaccatttgaggtcctgccttactaattatgtgctgcccaacaactaaatttgtaatttgtttttctctagtttgagcagggtctgaattttttcatttatttccttttttttgccagcagacagacttgagtctgtaaagacaagcaaatacactgacagaagtttaccataagtttctaaaatgtaaaaaaagaaaacccacaaaaggactcaacaaatttttagacacaaattttgccattggttcattggtagcacttattgggtaataaaaataaccaaatgttttgtggcatttttttatgtgaaggattccttccccggaaatttcaaatttgggaaaaatgaaccaaagggtctgcgccttccctttcatttttactttccccccttttgggttttttgaaaaagggaatttttcccccaaggcannnnnnnnnnncccccaccgtttttttttttagttggggnnnnnnnnnnnnnnnnnncttcccccgcgccggcgggtgtgttcttaaaaacnnnnnnnnnnnnnnnnnngatagttttatttttgtgtttgtcgccccacaaaacataatatccttgtgtgggggggggagggaggggtggttttttttctcccccgcnnnnnnnnnnnnnnnnnnnnnnnnnnnatttaaaccgggggacggggcgcggctcctctcttctccttcctcctccggggcggggaggagggggcggagagcaaaaatctttcctcgctcggggggtgtgccctgantntgattgtttgttgctttttcgacagacataattttcctcggtgcccacgggacaaacacgaacaacccgggtgcgggggcggtccaccaacgcaacccttcttcctttctttccataaaaaagtagcggggggcggggcgccccngccccttgcataaacagacagagagaggggggc

SEQ ID NO: 26378 - DNA, 263 bp, Macaca Mulatta
tagtatcagggaagcaaactgccttttacaagttagaaaaatgctgtttgaatctagttgaaccagggaatacagagcgagcaatatgtagcttgaattacatttaaaagcagattttttacaaacaaaatggcgaaagcactgattgtcatttttagcagtcacttaaggcctatagaacttttttcaagtcggaaggtcctgttcttactatctcaaaaatgggcatcgaacaatcaatctaggagcgtggcagtgggtaa

SEQ ID NO: 26379 - DNA, 579 bp, Macaca Mulatta
ataaagaccataacgtgacaaagaagaaattggttacagagcataaagacagagaggattttagacaagacttccactcagagatgtctggcttttgtaaagctgctttgaacacttctgcagggaactcaaatccttatcttccgtattcctgtgaattgcctttatgttatttctcctcaaaatgtatgtgttcatccgggggacatgtggacagagcatcaaactcctctaaggatggtagaaatcatcataaaacaatggggcattataaccacaatgactctttgcagaaaacacagataaacacttttaagaactcagtggcctaccctggtgcgcaaaaggctattacgtcttcagaggcagttgacagatttatgcctaggacaacacaactgcaggagcgcaaaagaagaagagaagatgatcgtaaacttggaacttttcttgaaacaaactcaggtagtaatgaggttatgattggacctctgttaccagacatgtctaaagtggatatgcacgatgactcattgaatacaactgcgaatttaattcggaataaacttaaagaggtaa

SEQ ID NO: 26380 - DNA, 1338 bp, Macaca Mulatta
  misc_feature (1)...(1338): n = A,T,C or G
cctcccgttttgccttctccctggagttgggacccgggaagaaccatgaagtggctgctgctgctgggtctggtggcgctctctgagtgcatcatctacaaggtccccctcgtcagaaagaagtccttgaggcgcaacctgtccgagcatggcctgctgaaggacttcctgaagaagcacaaccgcaacccagccagcaagtacttcccccagacggaggcgcccaccctgatagacgaacagcccctggagaactacctggatgtggagtacttcggcactatcggcatcggaacccctgcccaggatttcaccgtgatctttgacaccggatcctctaacctgtgggtgccttcagtctactgctccagtctcgcatgcaccaaccacaacctcttcaaccctcaggattcctccacctaccagtccaccagcgggacactctccatcacctacggcaccggcagcatgacaggcatcctcggatacgacactgtccaggttggaggcatctcggacaccaatcagatcttcggcttgagcgagaccgaacccggctccttcctgtattatgctcccttcgacggcatcctggggctggcctaccccagcatttcctcgtccggggccacacccgtctttgacaacatctgggaccagggcctggtttctcaggacctcttctctgtctacctgagcgccgatgaccagagtggcagcgtggtgatatttggtggcattgactcttcttactacactggaagtctgaactgggttcctgtttctgtcgagggttactggcagatctccgtggacagcatcaccatgaacggagaggccatcgcctgcgctgagggctgccaggccattgttgacaccggcacttctctgctgaccggcccaaccagccccattgccaacatccagagcgacatcggagccagcgagaactcagacggcgagatggtggtcagctgctcagccatcagcagcctgcccgacatcgtcttcaccatcaatggagtccagtaccctttgccacccagtgcctacatcctgcagagccagggcagctgcaccagcggcttccagggcatggacgtccccaccgaatctggagagctttggatcctgggtgatgtcttcatccgccagtactttaccgtcttcgacagggcaaacaaccaggtcggcctggctcccgtggcttaagcccaggtctttccagccacctcccaggaagatctgacctccgtcctgtgcccactttagatgtatctaattctccngactgtccttcccaggggagtgtggaggtcttggccctgttccctgtcc

SEQ ID NO: 26381 - DNA, 2503 bp, Macaca Mulatta
  misc_feature (1)...(2503): n = A,T,C or G
gtccatctattttgatgaaccaaatccagcacaagcaaaaggttcaagcccagagggattaccagcctgagtgctgggtgagctggagacaagtgannnnnnnnnnnnnnnnnnnnnnnnnnnnnnnnnnnnnnnnnnnnnnnnnnnnnnnnnnnnnnnnnnnnnnnnnnnnnnnnnnnnnnnnnnnnnnnnnnnnnnnnnnnnnnnnnnnnnnnnnnnnnnnnnnnnnnnnnnnnnnnnnnnnnnnnnnnnnnnnnnnnnnnnnnnnnnnnnnnnnnnnnnnnnnnnnnnnnnnnnnnnnnnnnnnnnnnnnnnnnnnctcgccttaatagttggaatcttggnnnnnnnnnnnnnnnnnnnnnnnnnnnnnnnnnnnnnnnnnnnnnnnnnnnnnnnnnnnnnnnnnnnnnnnnnnnnnnnnnnnnnnnnnnnnnnnnnnnnnnnnnnnnnnnnnnnnnnnnnnnnnnntggacatgaaaacaaaaatgatggaagctaaatttcatgaagaaaagcttaggctgcaacagaaacatgatgctgatgttcagaannnnnnnnnnnnnnnnnnnnnnnnnnnnnnnnnnnnnnnnnnnnnnnnnnnnnnnnnnnnnnnnnnnnnnnnnnnnnnnnnnnnnnnnnnnnnnnnnngttcagacactgatacgtgactgtcaagttatcagagagactaaagaagaccagattgcagaactaaaaaagatatgtgaacaaagcacagaatctctaaataatgactgggnnnnnnnnnnnnnnnnnnnnnnnnnnnnnnnnnnnnnnnnnnnnnnnnnnnnnnnnnnnnnnnnnnnnnnnnnnnnnnnnnnnnnnnnnnnnnnnnnnnnnnnnnnnnnnnnnnnnnnnnnnnnnnnnnnnnnnnnnnnnnnnnnnnnnnnnnnnnnnnnnnnnnnnnnnnnnnnnnnnnnnnnnnnnnnnnnnnnnnnnnnnnnnnnnnnnnnnnnnnnnnnnnnnnnnnnnnnnnnnnnnnnnnnnnnnnnnnnnnnnnnnnnnnnnnnnnnnnnnnnnnnnnnnnnnnnnnnnnnnnnnnnnnnnnnnnnnnnnnnnnnnnnnnnnnnnnnnnnnnnnnnnnnnnnnnnnnnnnnnnnnnnnnnnnnnnnnnnnnnnnnnnnnnnnnnnnnnnnnnnnnnnnnnnnnnnnnnnnnnnnnnnnnnnnnnnnnnnnnnnnnnnnnnnnnnnnnnnnnnnnnnnnnnnnnnnnnnnnnnnnnnnnnnnnnnnnnnnnnnnnnnnnnnnnnnnnnnnnnnnnnnnnnnnnnnnnnnnnnnnnnnnnnnnnnnnnnnnnnnnnnnnnnnnnnnnnnnnnnnnnnnnnnnnnnnnnnnnnnnnnnnnnnnnnnnnnnnnnnnnnnnnnnnnnnnnnnnnnnnnnnnnnnnnnnnnnnnnnnnnnnnnnnnnnnnnnnnnnnnnnnnnnnnnnnnnnnnnnnnnnnnnnnnnnnnnnnnnnnnnnnnnnnnnnnnnnnnnnnnnnnnnnnnnnnnnnnnnnnnnnnnnnnnnnnnnnnnnnnnnnnnnnnnnnnnnnnnnnnnnnnnngatggaaaaagtggaggcagatctaactagatccaaatctcttcgtgagaaacaatcaaaggagtttttatggcaactggaggacatcagacagcggtatgaacaacagnnnnnnnnnnnnnnnnnnnnnnnnnnnnnnnnnnnnnnnnnnnnnnnnnnnnnnnnnnnnnnnnnnnnnnnnnnnnnnnnnnnnnnnnnnnnnnnnnnnnnnnnnnnnnnnnnnnnnnnnnnnnnnnnnnnnnnnnnnnnnnnnnnnnnnnnnnnnnnnnnnnnnnnnnnnnnnnnnnnnnnnnnnnnnnnnnnnnnnnnnnnnnnnnnnnnnnnnnnnnnnnnnnnnnnnnnnnnnnnnnnnnnnnnnnnnnnnnnnnnnnnnnnnnnnnnnnnnnnnnnnnnnnnnnnnnnnnnnnnnnnnnnnnnnnnnnnnnnnnnnnnnnnnnnnnnnnnnnnnnnnnnnnnnnnnnnnnnnnnnnnnnnnnnnnnnnnnnnnnnnnnnnnnnnnnnnnnnnnnnnnnnnnnnnnnnnnnnnnnnnnnnnnnnnnnnnnnnnnnnnnnnnnnnnnnnnnnnnnnnnnnnnnnnnnnnnnnnnnnnnnnnnnnnnnnnnnnnnnnnnnnnnnnnnnnnnnnnnnnnnnnnnnnnnnnnnnnnnnnnnnnnnnnnnnnnnnnnnnnnnnnnnnnnnnnnnnnnnnnnnnnnnnnnnnnnnnnnnnnnnnnnnnnnnnnnnnnnnnnnnnnnnnnnnnnnnnnnnnnnnnnnnnnnnnnnnnnnnnnnnnnnnnnnnaggtaactgcacaagagaatgcaatggatacaatttccaggctgcgctgtggacttcttccagcaggtttgaagatttggatattgtaaactgtgagatcagtggcatttttaaaatccttaaatgtaattaagatcataaaaacatgcatcatt

SEQ ID NO: 26382 - DNA, 405 bp, Macaca Mulatta
catgtcatattcttaactttgatctaatgctttttactaggaaattttaatactgaaggactattttattatttttttctaaagatgtttgtcactagtttttcattattaaatgctgaggccaataccaagaagtttattttctatattatacaattatgaattacgtgctcagctatatatgtaataaaatactttggtctgtggaaatactgttaaatcaataaacaatagtaaataatgacaaaaccaaatgttcctcagaattaaactgaagtagtggttcatttaatctcatttaacattcctcaaaatgggcagcaaatctgacagagtttggagaagttacagtgagtgtatatcagaattttcttaaatgccatatcatattccacatcataaata

SEQ ID NO: 26383 - DNA, 585 bp, Macaca Mulatta
  misc_feature (1)...(585): n = A,T,C or G
gcggttccgtcggctgcagcgctacttttggtccggggtcggcagggaggccgcggctaccgcatcagagctgacgtggggactacgtggggccgctgccggcgccgggttgctgggcggcggcgccgctgctgagcggcggtcgggctcgccgtctccacctcctcgcgtccgtaatcagtgacgaggtccgctacgtaaatccctttgcggcggnnnnnnnnnnnnnnnnnnnnnnnnnnnnnnnnnnnnnnnnnnnnnnnnnnnnnnnnnnnnnnnnnnnnnnnnnnnnnnnnnnnnnnnnnnnnnnnnnnnnnnnnnnnnnnnnnnnnnnnnnnggtagcaacaattgcagagacagatgaatctgcagaatcagaaggtgtaattgattctcataaacgtagagaaatcctttcacgaagaccctcttataggntaggaaaatactgaatgaactgtcctctgatgtgcctggtgttcccaagattgaagaagaaaaatcagaggaagaaggaacaccgcctaacattgctaccatggcagtaccaactagcatatatcagactagcacggggcaataca

SEQ ID NO: 26384 - DNA, 2120 bp, Macaca Mulatta
  misc_feature (1)...(2120): n = A,T,C or G
gccctgaccgagacctgggccggctcccactccttgaggtatttccacaccgccgtgtcccggcccggccgctgggagccccgcttcatctccgtgggctacgtggacgacacgcagttcgtgcggttcgacagcgacgccgagagtccgaggatggagccgcgggcgccgtggatggagcaggaggggccggagtattgggaagagcagacacggatcgccaaggaggccgcacagactttccgagggaacctgcggaccctgcgcggctactacaaccagagcgagacggggtctcacaccctccagtggatgtacggctgcgacctgggacccgacgggcgcctcctccgcgggtatgaccagtccgcctacgacggcagggattacatcgtcctgaacgaggacctgcgctcctggacggccgcggacatggcggctcagaacacccagcgcaagtgggaggcggcccgggcggcggagcggcagagagcctacctggaggatcccccaaagacacacgtgacccaccaccccgtctctgatcatgaggccaccctgaaggtgctgggccctgggcttctaccctgcggagatcacagtgacctggcagcgggatggggaggaccagacccaggacacggagcttgtggagaccaggcctgcaggggatggaactttccagaagtgggcagctgtggtggtaccttctggagaggagcagagatacacgtgccatgtgcagcatgaggggctacccgagcccctcaccctgagatgggagccgtcttcccagtccaccatccccatcgtgggcatcattgctggcctggttctccttggagctgtggtcactggagctgtgattgttgctgtgatgtggaggaggaagagctcaggtagaaaaggagggagctactctcaggcttcgtgtagcgacagtacccagggatctgatgagtctctcacagcttgtaaagcctgagacagctgccttgtgtgcaactgagatgcaggatttcttcacgcctcccctttgtgtcttaagggactctggcttctctttttgcaagggcctctgaatctgtctttgtccctgttagcataatatgaggaggcagacaaacactccacctccatgtctaccatgacccccttcctcacactgacctgtgtgccttccctgttctacttttctattaaaaataagaaactgagcagtgcacggcggctcacannnnnnnnnnnnnnnnnnnnnnnnnnngcaagacaggcagatcacgaggtcaggaaatcaaaaccaacacggtgaaacctgtctcttatnnnnnnnnnnnnnnnnnnnnnnnncatggtggcaggcacctgtagtccccgctactcaggaggcnnnnnnnnnnnnnnnnatgtcatcccaggaggcagaggttgctgtgcgccgagattgtgccactgcactccggcctgagtgacagggtgagactctgtctcaaannnnnnnnnnnnnnnnnnnnnnnnnnnnncaggatctcaatttattttttcatattctgcagtgaaatggagttgaggaagctaaggtcatagttagaaatacagacagataattccacagcacatctctggcaaatttagcctattccttaccacctgtaatcttgaccatataccttggagttgaatattgttttcatactgctttggtttgaatgttccttccaacactcatgttgagacttaatccctaatgtggcaatactgaaaggtggagcctttgagatgtcattggatgataaggctctaccttcattcatgggttaatggattaatgggttatcacaggaatgggactggtggctttataagaagaggaaaagagaactgagctagcatgcccagcccacagagaccctccacttgagtaatgccaagtggaaatgtgaggtgcagctgccacagagagcccccaacagggaaatgtctagtgtctagtggatccaggccgcaggagagtgcattgtggagcggtgggagcaggaactgaacaccagcaggacaccagaactgtggagtcagtggcagcatgcaacgcccacttcgtgaaagcttcaggcaccagc

SEQ ID NO: 26385 - DNA, 158 bp, Macaca Mulatta
ttttgaagttgtaagggatgatttcaaatcaggcattcacaaactgcattctttaataggtttaggtatcaaaaataatgtctcttgccatgatagtgatgatgatattatgagaaatgatactgagtatgactcaggagatacagatgaaatcattg

SEQ ID NO: 26386 - DNA, 526 bp, Macaca Mulatta
  misc_feature (1)...(526): n = A,T,C or G
agatcgccaggattcaagaagccatagttcaagaagaagttctccagagtcagatcgacaggtccattcaagatctgggtcatttgatagcagagacaggcttcaagagcgagatcgatatgaacacgnnnnnnnnnnnnnnnnnnnnnnnnnnnnnnnnnnnnnnnnnnatgggaccgagatgctgataaagattggccacgcaacagggatcgagatagattgnnnnnnnnnnnnnnnnnnnnnnnnnnnnnnnnnnnnnnnnnnttggatagggaaagagagagactaatttctgattctgttgaaagggacagggacagagacagagacagaacttttgagagttctcaaatagagtctgtgaaacgctgtgaagcaaaactggaaggtgaacatgaaagggatctagaaagcacttcgcgagactctgtagccgtggataaagagagaatggataaagatctgggatctgtgcagggatttgaagacataaataaatccgagagaactgagagtctggaag

SEQ ID NO: 26387 - DNA, 747 bp, Macaca Mulatta
  misc_feature (1)...(747): n = A,T,C or G
ttgactccttcctggctttgcctgctgaactcagggtctccaggatcttaatgtttctatcaaacgggctgggatttctgggcctgctggtctctgggtttggcctggactgtttgagaattggagagggtcagagagatctcaagaggcgactgctgatcctgggaggagttctgtcctgggcctcgggaatcacagccctggttcctgtctcttgggttgcccacaagacggttcaggagttctgggatgagaacgtcccagactttgtccccaggtgggagtttggggaggccctctttctgggctggtttgctggactttctcttctactgggagggtgtctgctcaactgtgcagcctgttccagccacgctctcctagcttcgggccaccatgcagtggcgcaaatgcaagatcatcatcaactggagacaagaaacaccaacctgaaaaactaagccagaaaggacaagcgtctgctgctcaggagacgcttgctcaacactggattntggtaggaggtcctgctctagtcatctcactgtgcttctgattttcgaaaatgcattttttcctgtggctattaaactatagtttctttccaagactggtaaactatttttatcttctactctgagatcaaaaccaatcaagacttaatagtaatgacacccattactggtggatgagtgttctcaattttaaaacagtaattgcatagaagtggtaaataaaacgttaatc

SEQ ID NO: 26388 - DNA, 721 bp, Macaca Mulatta
tatttcaggcttgctgtcaaaataatccaaacagggaagaaacgtacaagtaaacaagaaaagccccatactcatctggctccctggagacagctactttttaggagtttcatttgccttcttcaagagagctttcttccactgacataaaatgccagcttgatcgtacagtatatctgtctatttacttgggtccagttctaggttctctcttctgtttcatcgacctctctgcctgccttggtaccaacctgcctctagtatttattgcagcctgaaaatgtgctataactttcatgtgctgaaacttgtgtacatcttttgaaaaacttttccagctagtctgtcatggaggttagcaatttgtttgtggtttaactatgcacttcacgggattaccggggttgttgaacatcttttctagatgtatgtcttctcttgtgacttcctgactgtgtccttagcaagggctgtctgtctgtcttgtctctatgtttctcttgatacccagttaagaaacgtgaccatcctaaaagctaatacatgatatggaaagaaagaattaatggggcttcaaatgcaatctgaatccaggcacctggaccgcggcctcagccccagctggagcttggagccgacctgtgttcttctaggagtggcaggcgaggaggagctgcaggggattcagcctgagaagtccgtgtcagtcacagctggagac

SEQ ID NO: 26389 - DNA, 654 bp, Macaca Mulatta
  misc_feature (1)...(654): n = A,T,C or G
ggagaatttcacggcgctgttcggggctcaggctgacccaccaccgcccccaaccgcactaggcttcggaccaggaaagcctccacccccgccaccgcctcctccgggcgggggacccggcacggctccgcctcccaccgcggccacggcccctcccggcgcggacaagtcaggagctggctgtggccctttttacctcatgagggaactgccaggtagcacagagctgacgggcagcacgaatctgatcacacactacaacttggaacaagcctataataaattctgtgggaagaaggtgaaggagaagctaagtaacttcctgcctgacctgccagggatgattgatttgcctggttcccatgataacagcagcctccgctctctcattgagaagccccctattctcagtagctcttttaatcctatcacagggaccatgctggccggcttccgcctccacactggcccgttgccagagcagtgtcgtctgatgcatattcagcctcccaagaagaagaataagcacaagcacaaacagagccgtacccaggatcctgtccccccagaaacaccatctgattcagatcnnnnnnnnnnnnnnnnnnnnnnnnnnnnnnatcctgaacggaaaaggaagaagaaagagaagaa

SEQ ID NO: 26390 - DNA, 488 bp, Macaca Mulatta
aaagccccctgtggaccataggctgtacaaaagggtgagtttagctgcctgctagccagtttctcttctcttccattttcagtattttgctttttgcttgcttgcatggggctgcagcctaggtatgccagtaagtttcacatccattttgaatgaaataaaatcaagtaaaaactaaccctgattactaacactgctattttacatgacaggagaacagtcacatacattagatgtacaaatgcatgagtgagtaaaagggagggccgttcgaaaccactgcagggcatgcctaggatgtggtggaggaagcctggggacgaaaacagggctggtaggccacgaacccggccaaatgaggctgtgttacatgaaaacactcagcaagtggctttctgtgattaagataatttgccacgtgaaattttctccatgactgttttgtcaaaatgtctaaagcaaggaggctcactaggaggtggtagtag

SEQ ID NO: 26391 - DNA, 774 bp, Macaca Mulatta
ggattgatgaggaaacttatctaagctcatttaaacctcacttaatggatgtagtatatacctgggcaactggagctacatttgcccatatctgcaaaatgacagatgtctttgaaggcagcataattcgttgtatgaggcgcctagaagaattgcttcgacaaatgtgtcaagcagcaaaagccattggaaacactgagctggaaaataaatttgcagaaggaatcaccaaaatcaagagagatattgtgtttgctgccagcctctacttgtagagtcagctaaaggaatgtgagattttaaattattcaccacctgtttgattacagttgactacaaatgcctgcaagtgtggatttggttgtcccatacattttaatatgtgtatttaaatcagacatcattcatagaaagcatattacatacatgtttatacataagcattacattttttaataaaaatgtatacaggtggggcactgttttggtggaaggcttggagttttttaaatgaatttagagctattagataaccactgtgttaaaggtaactatgtacacacaaagtgggcatccaagaggcatagcagcagtagcagtcttttaaggcttatacactggggagaaaagatgcatccctcttgccatgggggcaatcccttttccctttagaaaacaggccaaccttcacctggggcaaccccggctgccctttcaagggctgggggaattgctcctgaaagtggatttcccccgcttggtggatggtttcat

SEQ ID NO: 26392 - DNA, 220 bp, Macaca Mulatta
  misc_feature (1)...(220): n = A,T,C or G
aggagaaaagccttacagatgctcgtgggaagggtgtgagtggcgttttgcaagaagtgatgagttaaccaggcacttccgaaagcacaccggggccaagccttttaaatgctcccactgtgacaggtncaggtgtttttccaggtctgaccacctggccctgcacatgaagaggcacctctgagggagcagagaggtggatcctgtaggctaaaaggct

SEQ ID NO: 26393 - DNA, 1875 bp, Macaca Mulatta
  misc_feature (1)...(1875): n = A,T,C or G
aggtcccagcaatccttgccaagatgatccttgtgaagataattcattatgtgttgagctgcataatacacgtttttgcctgtgtttagaagggtattactacaactcttctacgtgtaagaaagnnnnnnnnnnnnnnnnnnnnnnnnnnnnnnnnnnnnnnnnnnnnnnnnnnnnnnnnnnnnnnnnnnnnnnnnnnnnnnnnnnnnnnnnnnnnnnnnnnnnnnnnnnnnnnnnnnnnnnnnnnnnnnnnnnnnnnnnnnnnnnnnnnnnnnnnnnnnnnnnnnnnnnnnnnnnnnnnnnnnnnnnnnnnnnnnnnnnnnnnnnnnnnnnnnnnnnnnnnnnnnnnnnnnnnnnnnnnnnnnnnnnnnnnnnnnnnnnnnnnnnnnnnnnnnnnnnnnnnnnnnnnnnnnnnnnnnnnnnnnnnnnnnnnnnnnnnnnnnnnnnnnnnnnnnnnnnnnnnnnnnnnnnnnnnnnnnnnnnnnnnnnnnnnnnnnnnnnnnnnnnnnnnnnnnnnnnnnnnnnnnnnnnnnnnnnnnnnnnnnnnnnnnnnnnnnnnnnnnnnnnnnnnnnnnnnnnnnnnnnnnnnnnnnnnnnnnnnnnnnnnnnnnnnnnnnnnnnnnnnnnnnnnnnnnnnnnnnnnnnnnnnnnnnnnnnnnnnnnnnnnnnnnnnnnnnnnnnnnnnnnnnnnnnnnnnnnnnnnnnnnnnnnnnnnnnnnnnnnnnnnnnnnnnnnnnnnaatttcagctgatcctcactattgtgggcaccatcgctggcgttgtcattctcagcatgataattgcattgatcatcacagcaannnnnnnnnnnnnnnnnnnnnnnnnnnnnnnnnnnnnnnnnnnnnnnnnnnnnnnnnnnnnnnnnnnnnnnnnnnnnnnnnnnnnnnnnnnnnnnnnnnnnnnnnnnnnnnnnnnnnnnnnnnnnnnnnnnnnnnnnnnnnnnnnnnnnnnnnnnnnnnnnnnnnnnnnnnnnnnnnnnnnnnnnnnnnnnnnnnnnnnnnnnnnnnnnnnnnnnnnnnnnnnnnnnnnnnnnnnnnnnnnnnnnnnnnnnnnnnnnnnnnnnnnnnnnnnnnnnnnnnnnnnnnnnnnnnnnnnnnnnnnnnnnnnnnnnnnnnnnnnnnnnnnnnnnnnnnnnnnnnnnnnntctctgaatggaagtggtggatgtttgcaatgaatccagctcgcttgcaaaatgagagtctatgacactaaatgtagtagatgctattagatgcttgtcagagaggtggttttcttcgatcagtacaaagtactgagacaatggttagggttgttttttaaattttctttcctggtagggcaacaagaatcatttccaacgtagatgaaagctccccagcattgcttgctgaacattgctcttgagttgaaataaatgacctaattcccctgggaaacatatgcatcaactgtggaggtccgaggagatgagaagagatactcaccatctttcaagggtcacaagctcactctctgacccatcagaatagggatactgcttctattggagggattttggcaacctttgaacagctcagagcttgcaacctagcctcacccaagaagcctggaaggagacatatctctcagctttttcaggaggcgactgggaatccaggaactttctgatgctaattagaaggcctagactaaaaatgcccactatggggtacactctacagtttttgaaatgctaagaggcagaaggggcagagcgtaaaaaaacatgacggggtagaaggaagagaggcaaaggaaactgggcggggaggatgaattagagaggaggcacctgagatccaccttcttccttagatcccctcctcca

SEQ ID NO: 26394 - DNA, 594 bp, Macaca Mulatta
atgccacatcctctagagctgtcagaactcgagagcttctcggtgtttgaggacattaggcttcacatcagggaagtgggagctcaattggtcaagaaagtcaatgccatctttcagctggacatcaccaaagatgggaagatcattctgcagtggaccattgatctgaagaatggttctggggacatgtatccgggacctgccaggctcccagcagacactgtctttacaatcccggagcccgtctttatggagctggttttgggcaaaatgaacccacagaaggctttccttgctggcaagttcaaagtgagtggcaaggttctgcttagccagaagctggaaagggttttcaaagactgggctaaattttaagcatgcaaaaataccaaggaagaacttctcttcgatgataatgtcgagtggaaatcatgcttaatctgaagattaaagtaaaaagtatccaatatttttactcaaattcttcctattcaagtttaattgattttcctgcagatgggtaaattttcagggagggttctgaagcagtaaaaagtgttgcagtgcatcaattagaatctttgtctttttctt

SEQ ID NO: 26395 - DNA, 210 bp, Macaca Mulatta
ttggtggagctctaacggctgttttgactggcagccggagccggcgaagtgaggcgggcgttgctcgcgcgtcaagtagttgctgggatagcgaaatggaggggtgtgtgtctaacctaatggtctgcaacctggcctacagcgggaagctggaagagttgaaggagagtattctggccgataaatccctggctactagaactgaccagg

SEQ ID NO: 26396 - DNA, 481 bp, Macaca Mulatta
aaaggtgacattgccagaaacttaccattaacttgcactactacggtagggaggacttagggatgtttcctgtgtcgtatgtgcttttctttctttcatatgatcaattctgttggtattttcagtatctcatttctcaaagctaaagagatatacattctggatacttgggaggggaataaattaaaattttcacactgtgtactgtgttttactgattggttggatattgcttatgaaaattccatagtggtattttttgggattcttaatgtgtaacttaaacatactttgaagcggaggagagtcataagacagaacatttggcaggaattgtccttatgaaccaagaaaaagaaaatgaaaagtattattaagcttctgtgtttgtctaaaaatgtggcatatggatggcatttaaaactttgaatgaattatacctaaatctgggaaagggaagtgaagtggaacaggttaccag

SEQ ID NO: 26397 - DNA, 216 bp, Macaca Mulatta
aggacagttttggcatgtgactgacttacacttagaccctacttaccacatcacagatgaccacacaaaagtgtgtgcttcatctaaaggtgcaaatgcctccaaccctggcccttttggagatgtgctatgtgattctccatatcaacttattttgtcagcatttgattttattaaaaattctggacaagaagcgtctttcatgatatggacagg

SEQ ID NO: 26398 - DNA, 1145 bp, Macaca Mulatta
  misc_feature (1)...(1145): n = A,T,C or G
ctcccctatgtgaactttccctccttgctgtccaatgctcacatgtccatgttgcaaatggatataagatatctggcaaggaagccccatatttctacaatgacactgtgacattcaagtgttttaatggatttactttgaagggcagtagtcagattcgttgcaaagctaataacacctgggatcctgaaataccagtttgtgaaaaagnagaaacatgccagcctgtgagagaggatcttcaagaacttccagttggttcacgtgtggagctagttaatacatcctgccaagatgggnnnngttgactggacatacttaccacaagtgtaaagatgatgaaaatggaatttggttcaaaaagattccactttgtaaannnnnnnnnnnnnnnnnnnnnnnnnnnnnnnnnnnnnnnnnnnnnnnnnnnnnnnnnnnnnnnnnnnnnnnnnnnnnnnnnnnnnnnnnnnnnnnnnnnnnnnnnnnnnnnnnnnnnnnnnnnnnnnnnnnnnnnnnnnnnnnnnnnnnnnnnnnnnnnnnnnnnnnnnnnnnnnnnnnnnnnnnnnnnnnnnnnnnnnnnnnnnnnnnnnnnnnnnnnnnnnnnnnnnnnnnnnnnnnnnnnnnnnnnnnnnnnnnnnnnnnnnnnnnnnnnnnnnnnnnnnnnnnnnnnnnnnnnnnnnnnnnnnnnnnnnnnnnnnnnnnnnnnnnnnnnnnnnnnnnnnnnnnnnnnnnnnnnnnnnnnnnnnnnnnnnnnnnnnnnnnnnnnnnnnnnnnnnnnnnnnnnnnnnnnnnnnnnnnnnnnnnnnnnnnnnnnnnnnnnnnnnnnnnnnnnnnnnnnnnnnnnnnnnnnnnnnnnnnnnnnnnnnnnnnnnnnnnnnnnnnnnnnnnnnnnnnnnnnnnnnnnnnnnnnnnnnnnnnnnnnnnnnnnnnnnnnnnnnnnnnnnnnnnnnnnnnnnagaggtaaactgtagctcaccagcagatatggatggaatccagaaggggctggaaccgaggaaaatgtatcagtatggagctgttgtaactctggagtgtgaagatggatatatgctggaaggcagttcccagagccagtgccaggcagatcaccaatggaaccctcccctggcggtttgcagatcccg

SEQ ID NO: 26399 - DNA, 1423 bp, Macaca Mulatta
  misc_feature (1)...(1423): n = A,T,C or G
ggaggtgggctactgcagggacctgagccacattgcagccttgttcctcctttatctgtctgaggaggatgcattctgggcactggtgcagctgctggccagtgagaggcactcattgcagggnnnnnnnnnnnnnnnnnnnnnnnnnnnnnnnnnnnnnnnnnnnnnnnnnnnnnnnnnnnnnnnnnnnnnnnnnnnnnnnnnnnnnnnnnnnnnnnnnnnnnnnnnnnnnnnnnnnnnnnnnnnnnnnnnnnnnnnnnnnnnnnnnnnnnnnnnnnnnnnntctctcttgggctcatcctgcgcctgtgggacgtgtacttgctggaaggagaacaggtgttgatgccgatgacaagcattgtctttaaagttcnnnnnnnnnnnnnnnnnnnnnnnnnnnnnnnnnnnnnnnnnnnnnnnnnnnnnnnnnnnnnnnnnnnnnnnnnnnnnnnnnnnnnnnnnnnnnnnnnnnnnnnnnnnnnnnnnnnnnnnnnnnnnnnnnnnnnnnnnnnnnnnnnnnnnnnnnnnnnnnncaaatccgagcaagggtcctcaacacccaggcctgtgctggcttcacatggcaggatgatcctctgcaagggggacagacaggcccctccaggcccaccagtccggttccagcggcccatttggctagtttccccaccatgggcacactcgttcttccacatcctgtcctggtggggctgtgccggaaagacacctaccctgtggacactcagggtgtgcccatcccggccccggctcagggaagacctcagggttcctggagattcctggagtggaactcgatgccccggctcccgacggacttggatatagggggcccttggttcccccattatgatttcgaacagagctgttgggtgcgtgnnnatcccaggaagaccagctggccacctgctggcaggcggaacaccctgcggagggggtgagattggctttcactgcacntgcacccagcactgattccaaccaggacacccccgtcgcagctagggacgagcagcagtgcgctcccacctcagggccttgcctctgcctcctctacctggaaaattctcagttcnnnnnnnnnnnnnnnnnnnnnnnnnnnnnnnnnnnnnnnnnnnnnnnnnnnnnnnnnnnnacaacccgagccagcttcacattctcattttattttttgttaaacttatgaaaatttattaagaaagtgtgcacctcgaaagacattcacggatggaacacactagtccccagatcacaaagtcaaccatgtccagcccctcccagcacccccagtcctgccaccagcattctgaattccaacaacaccgtgagcctacctttgtactctacccttatggaaggataacccccttcatgttttaaaataaatgttttctgtttaaat

SEQ ID NO: 26400 - DNA, 650 bp, Macaca Mulatta
taatgtgtcaaagagatgaggaaataagacttttagtggtttgcaaacaaaatgatgggcaagtggaacaatgcgtcagttgtaggactaaataatgatcttccaaatattagccaaagaggcattcagcaattaaagacatataaaatagttttctaaatgtttctttttcttttttgagtgtgcaatatctaacatgtctaaaattaggggcatttttcttggatctttttgcagaccagctaattagctcttgcctcaggctttttccagttttctttttctctcttgtagataatttggctcacatcatctaatagtgactttcatttcttattaaccaaattaacctttcaggaaagtatctctagtctgtgttgataatagtaatggttctagaaggataaacagtcctcccttcaactgtatactgtgtgctccagtgttttcttgtgttattttctctgatcacaacttttctgcgacctggttttcattattttcccacaattcttttgaaagatggtaatcttttctgaggtctagcattttaagtcctgtgatgggatcattatttcatgactggtgcattcctaaactctgaaatcagccctgcgcaagtacttgagaataaatgagcgttttttaaa

SEQ ID NO: 26401 - DNA, 1078 bp, Macaca Mulatta
gggggcagttcggcggtcccgcgagtctgtctcttgcttcaacagtgtttggacggaacagatccggggactctttcttccagcctccgaccgccctccgatttcctctccacttgcaacctccgggaccatcttctcggccatctcctgcttctgggacctgccagcaccgtttttgtggttagctccgtcttgccgaccaaccatgagctcccagattcgtcagaattattccaccgacgtggaggcagccgtcaacagcctggtcaatatgtacctgcaggcctcctacacctacctctcttctgggcttctatttcgaccgcgatgatgtggctccggaaggcgtgagccacttcttccgcgaattggccagagaaaaaacgcgaagggcatacaagcgatctccttgaaaatagcaaaacctagcttggtcggcccgcgtcttcttttttcccagaacctacatgaataacccataccttgaaaaaaaggaactgtggggggtaaaaaacccgccctgcaaagtcaccattataatactccccggtccataggtgtctcctctttgtcaaagacaaagataaaaaactctgcgaaaatctatcttagagaacacatattctgtttttggagcacagttccacagaacacgcagtggggcaccaacgatgagattcagatttatctctggacactcatatatgaaacaccactagatatattctctccgcaataaacctctttacatgcttagcaaagcattttaattcttagaaggagcacaaccactaccaacaatttccccactatcgaaaaatgacagaaggacaaatattttgaaaactagtcattcctatctcctacgtgtgaacctatatagggagtgatcgacacacccagcaccaccttaaatacccatctcatccttgcggcacgctctaggatcgagagagtcccatgagcccatataatgaatgaaccttcgagtaactcagaggggacaaaagactatactcctccactattagaataaaaagacgtctaaaatgcctgtttaaaaactatcgctttactt

SEQ ID NO: 26402 - DNA, 137 bp, Macaca Mulatta
aaggtcaagtaacctggtttggttatgaaagtcctcgtagtttctgggactatatcagagtggcttgccggaaagtttcacagaattgtatctgcagcattgaaaatatggaaaatgtcagttcttctagagctaag

SEQ ID NO: 26403 - DNA, 2141 bp, Macaca Mulatta
  misc_feature (1)...(2141): n = A,T,C or G
caatttaattcaggagatgaattctgatgacccagttgtgcaacagaacgctgtcctggagacagaaaagagactactgcttatggaggaagaccaggaggaggatgaatgcaggaccaccttgaataagactgtgatcagtcctccacaaactgctgtgaagnnnnnnnnnnnnnnnnnnnnnnnnnnnnnnnnnnnnnnnnnnnnnnnnnnnnnnnnnnnnnnnnnnnnnnnnnnnnnnnnnnnnnnnnnnnnnnnnnnnnnnnnnaaagacaaagggaatgaagcaggtgctgaaggcaattatnnnnnnnnnnnnnnnnnnnnnnnnnnnnnnnnnnnnnnnnnnnnnnnnnnnnnnnnnnnnnnnnnnnnnnnnnncaggcttatatgaaacttaagaactatgagaaggccctggtggattgtgaatgggctcnnnnnnnnnnnnnnnnnnnnnnnnnnnnnnnnnnnnnnnnnnnnnnnnnnnnnnnnnnnnnnnnnnnnnnnnnnngtctagagagtgttataagaagatcttagaaataaaccccaagctgcaaacccaggtgaaannnnnnnnnnnnnnnnnnnnnnnnnnnnnnnnnnnnnnnnnnnnnnnnnnnnnnnnnnnnnnnnnnnnnnnnnnnnnnnnnnnnnnnnnnnnnnnnnnnnnnnnnnnnnnnnnnnnnnnnnnnnnnnnnnnnnnnnnnnnnnnnnnnnnnnnnnnnnnnnnnnnnnnnnnnnnnnnnnnnnnnnnnnnnnnnnnnnnnnnnnnnnnnnnnnnnnnnnnnnnnnnnnnnnnnnnnnnnnnnnnnnnnnnnnnnnnnnnnnnnnnnnnnnnnnnnnnnnnnnnnnnnnnnnnnnnnnnnnnnnnnnnnnnnnnnnnnnnnnnnnnnnnnnnnnnnnnnnnnnnnnnnnnnnnnnnnnnnnnnnnnnnnnnnnnnnnnnnnnnnnnnnnnnnnnnnnnnnnnnnnnnnnnnnnnnnnnnnnnnnnnnnnnnnnnnnnnnnnnnnnnnnnnnnnnnnnnnnnnnnnnnnnnnnnnnnnnnnnnnnnnnnnnnnnnnnnnnnnnnnnnnnnnnnnnnnnnnnnnnnnnnnnnnnnnnnnnnnnnnnnnnnnnnnnnnnnnnnnnnnnnnnnnnnnnnnnnnnnnnnnnnnnnnnnnnnnnnnnnnnnnnnnnnnnnnnnnnnnnnnnnnnnnnnnnnnnnnnnnnnnnnnnnnnnnnnnnnnnnnnnnnnnnnnnnnnnnnnnnnnnnnnnnnnnnnnnnnnnnnnnnnnnnnnnnnnnnnnnnnnnnnnnnnnnnnnnnnnnnnnnnnnnnnnnnnnnnnnnnnnnnnnnnnnnnnnnnnnnnnnnnnnnnnnnnnnnnnnnnnnnnnnnnnnnnnnnnnnnnnnnnnnnnnnnnnnnnnnnnnnnnnnnnnnnnnnnnnnnnnnnnnnnnnnnnnnnnnnnnnnnnnnnnnnnnnnnnnnnnnnnnnnnnnnnnnnnnnnnnnnnnnnnnnnnnnnnnnnnnnnnnnnnnnnnnnnnnnnnnnnnnnnnnnnnnnnnnnnagagctgctggtgttctgagccggaccctttcttcctctctgaaaattgttgaggaggccttgcaagcaggagtggtaaagaaaatgatgaaattcctgaagnnnnnnnnnnnnnnnnnnnnnnnnnnnnnnnnnnnnnnnnnnnnnnnnnnnnnnnnnnnnnnnnnnnnnnnnnnnnnnnnnnnnnnnnnnnnnnnnnnnnnnnnnnnnnnnnnnnnnnnnnnnnnnnnnnnnnnnnnnnnnnnnnnnnnnnnnnnnnnnnnnnnnnnnnnnnnnnnnnnnnnnnnnnnnnnnnnnnnnnnnnnnnnnnnnnnnnnnnnnnnnnnnnnnnnnnnnnnnnnnnnnnnnnnnnnnnnnnnnnnnnnnnnnnnnnnnnnnnnnnnnnnnnnnnnnnnnnnnnnnnnnnnnnnnnnnnnnnnnnnnnnnnnnttgctgctcaactgagaaagcttcatggcctagaaattctcaactctacaatgaaatacatcagtgattcttgagagatacggtgtctgtgtgcatttagggaacacacaaatgcacactatgggttgttcctatgctaataaagacctttgatatatcc

SEQ ID NO: 26404 - DNA, 2694 bp, Macaca Mulatta
  misc_feature (1)...(2694): n = A,T,C or G
ggccaccatactatttacatcggagtccatgtgccgaagagttacaggagaaggagacgtcacaagagaaaggcaggccacaaagaaaagaaggaaaaggagagaatctctgagaactactctgannnnnnnnnnnnnnnnnnnnnnnnnnnnnnnnnnnnnnnnnnnnnnnnnnnnnnnnnnnnnnnnnnnnnnnnnnnnnnnnnnnnnnnnnnnnnnnnnnnnnnnnnnnnnnnnnnnnnnnnnnnnnnnnnnnnnnnnnnnnnnnnnnnnnnnnnnnnnnnnnnnnnnnnnnnnnnnnnnnnnnnnnnnnnnnnnnnnnnnnnnnnnnnnnnnnnnnnnnnnnnnnnnnnnnnnnnnnnnnnnnnnnnnnnnnnnnnnnnnnnnnnnnnnnnnnnnnnnnnnnnnnnnnnnnnnnnnnnnnnnnnnnnnnnnnnnnnnnnnnnnnnnnnnnnnnnnnnnnnnnnnnnnnnnnnnnnnnnnnnnnnnnnnnnnnnnnnnnnnnnnnnnnnnnnnnnnnnnnnnnnnnnnnnnnnnnnnnnnnnnnnnnnnnnnnnnnnnnnnnnnnnnnnnnnnnnnnnnnnnnnnnnnnnnnnnnnnnnnnnnnnnnnnnnnnnnnnnnnnnnnnnnnnnnnnnnnnnnnnnnnnnnnnnnnnnnnnnnnnnnnnnnnnnnnnnnnnnnnnnnnnnnnnnnnnnnnnnnnnnnnnnnnnnnnnnnnnnnnnnnnnnnnnnnnnnnnnnnnnnnnnnnnnnnnnnnnnnnnnnnnnnnnnnnnnnnnnnnnnnnnnnnnnnnnnnnnnnnnnnnnnnnnnnnnnnnnnnnnnnnnnnnnnnnnnnnnnnnnnnnnnnnnnnnnnnnnnnnnnnnnnnnnnnnnnnnnnnnnnnnnnnnnnnnnnnnnnnnnnnnnnnnnnnnnnnnnnnnnnnnnnnnnnnnnnnnnnnnnnnnnnnnnnnnnnnnnnnnnnnnnnnnnnnnnnnnnnnnnnnnnnnnnnnnnnnnnnnnnnnnnnnnnnnnnnnnnnnnnnnnnnnnnnnnnnnnnnnnnnnnnnnnnnnnnnnnnnnnnnnnnnnnnnnnnnnnnnnnnnnnnnnnnnnnnnnnnnnnnnnnnnnnnnnnnnnnnnnnnnnnnnnnnnnnnnnnnnnnnnnnnnnnnnnnnnnnnnnnnnnnnnnnnnnnnnnnnnnnnnnnnnnnnnnnnnnnnnnnnnnnnnnnnnnnnnnnnnnnnnnnnnnnnnnnnnnnnnnnnnnnnnnggttctgtggtggactaattaaagacataaagaggaaagcgccattttttgccagtgatttttatgatgctttaaatattcaagctctttcggcaattctcttcatttatctggcaactgtaactaatgctatcacttttggaggactgcttggggatgccactgacaacatgcagnnnnnnnnnnnnnnnnnnnnnnnnnnnnnnnnnnnnnnnnnnnnnnnnnnnnnnnnnnnnnnnnnnnnnnnnnnnnnnnnnnnnnnnnnnnnnnnnnnnnnnnnnnnnnnnnnnnnnnnnnnnnnnnnnnnnnnnnnnnnnnnnnnnnnnnnnnnnnnnnnnnnnnnnnnnnnnnnnnnnnnnnnnnnnnnnnnnnnnnnnnnnnnnnnnnnnnnnnnnnnnnnnnnnnnnnnnnnnnnnnnnnnnnnnnnnnnnnnnnnnnnnnnnnnnnnnnnnnnnnnnnnnnnnnnnnnnnnnnnnnnnnnnnnnnnnnnnnnnnnnnnnnnnnnnnnnnnnnnnnnnnnnnnnnnnnnnnnnnnnnnnnnnnnnnnnnnnnnnnnnnnnnnnnnnnnnnnnnnnnnnnnnnnnnnnnnnnnnnnnnnnnnnnnnnnnnnnnnnnnnnnnnnnnnnnnnnnnnnnnnnnnnnnnnnnnnnnnnnnnnnnnnnnnnnnnnnnnnnnnnnnnnnnnnnnnnnnnnnnnnnnnnnnnnnnnnnnnnnnnnnnnnnnnnnnnnnnnnnnnnnnnnnnnnnnnnnnnnnnnnnnnnnnnnnnnnnnnnnnnnnnnnnnnnnnnnnnnnnnnnnnnnnnnnnnnnnnnnnnnnnnnnnnnnnnnnnnnnnnnnnnnnnnnnnnnnnnnnnnnnnnnnnnnnnnnnnnnnnnnnnnnnnnnnnnnnnnnnnnnnnnnnnnnnnnnnnnnnnnnnnnnnnnnnnnnnnnnnnnnnnnnnnnnnnnnnnnnnnnnnnnnnnnnnnnnnnnnnnnnnnnnnnnnnnnnnnnnnnnnnnnnnnnnnnnnnnnnnnnnnnnnnnnnnnnnnnnnnnnnnnnnnnnnnnnnnnnnnnnnnnnnnnnnnnnnnnnnnnnnnnnnnnnnnnnnnnnnnnnnnnnnnnnnnnnnnnnnnnnnnnnnnnnnnnnnnnnnnnnnnnnnnnnnnnnnnnnnnnnnnnnnnnnnnnnnnnnnnnnnnnnnnnnnnnnnnnnnnnnnnnnnnnnnnnnnnnnnnnnnnnnnnnnnnnnnnnnnnnnnnnnnnnnnnnnnnnnnnnnnnnnnnnnnnnnnnnnnnnnnnnnnnnnnnnnnnnnnnnnnnnnnnnnnnnnnnnnnnnnnnnnnnnnnnnnnnnnnnnnnnnnnnnnnnnnnnnnnnnnnnnnnnngatcttggcacttgtagctgtcagaaaaggcatggactacctcttctcccagcacgacctcagcttcctcgatgatgtcattc

SEQ ID NO: 26405 - DNA, 938 bp, Macaca Mulatta
  misc_feature (1)...(938): n = A,T,C or G
agtactgtgaagcatggtttctgcacaccttgaatgattggaaccccaaagactcaagaaggagctaaagatcttgaagtagacatgaataaaacannnnnnnnnnnnnnnnnnnnnnnnnnnnnnnnnnnnnnnnnnnnnnnnnnnnnnnnnnnnnnnnnnnnnnnnnnnnnnnnnnnnnnnnnnnnnnnnnnnnnnnnnnnnnnnnnnnnnnnnnnnnnnnnnnnnnnnnnnnnnnnnnnnnnnnnnnnnnnnnnnnnnnnnnnnnnnnnnnnnnnnnnnnnnnnnnnnnnnnnnnnnnnnnnnnnnnnnnnnnnnnnnnnnnnnnagctgggcttggagcgtttccacggagttggcatcctggggtttaactctgcggagtggtttatcactgctgttggcgccatcctagnnnnnnnnnnnnnnnnnnnnnnnnnnnnnnnnnnnnnnnnnnnnnnnnnnnnnnnnnnnnnnnnnnnnnnnnnnnnnnnnnnnnnnnnnnnnnnnnnnnnnnnnnnnnnnnnnnnnnnnnnnnnnnnnnnnnnnnnnnnnnnnnnnnnnnnnnnnnnnnnnnnnnnnnnnnnnnnnnnnnnnnnnnnnnnnnnnnnnnnnnnnnnnnnnnnnnnnnnnnnnnnnnnnnnnnnnnnnnnnnnnnnnnnnnnnnnnnnnnnnnnnnnnnnnnnnnnnnnnnnnnnnnnnnnnnnnnnnnnnnnnnnnnnnnnnnnnnnnnnnnnnnnnnnnnnnnnnnnnnnnnnnnnnnnnnnnnnatcacgtggatggcaggagcagtggcacaggactttaaactgacagaaaagcatgagacggtggtcagctacctcccactcagccacattgcagcacagatgatggacatctgggtacccataaagattggggcgctcacatactttgctcaagcagatgctctcaag

SEQ ID NO: 26406 - DNA, 1800 bp, Macaca Mulatta
  misc_feature (1)...(1800): n = A,T,C or G
agggtcactggactaggatgggggatgggcctgtgacaggaggtaccctgggtgtcctctttcggccccatggagtcctcacccatcccccagtcatcagggaactcttcgactttggggagggtccctcaaaccccaggtccctctactgccagtggggtcccggaggtggggctgcgggatgtcgcttcggaatctgtggccctcttcttcatgctccctgctggacttgactgctgtggctggcaatgccgctgtgatggccgtgattgccaagacgcccgccctccgaaaatttgtctttgtcttccacctctgcctggtggacctgctggctgccctgaccctcatgcccctggccatgctctccagctccgccctctttgaccacgccctctttggggaggtggcctgccgcctctacttgttnnnnnnnnnnnnnnnnnnnnnnnnnnnnnnnnnnnnnnnnnnnnnnnnnnnnnnnnnnnnnnnnnnnnnnnnnnnnnnnnnnnnnnnnnnnnnnnnnnnnnnnnnnnnnnnnnnnnnnnnnnnnnnnnnnnnnnnnnnnnnnnnnnnnnnnnnnnnnnnnnnnnnnnnnnnnnnnnnnnnnnnnnnnnnnnnnnnnnnnnnnnnnnnnnnnnnnnnnnnnnnnnnnnnnnnnnnnnnnnnnnnnnnnnnnnnnnnnnnnnnnnnnnnnnnnnnnnnnnnnnnnnnnnnnnnnnnnnnnnnnnnnnnnnnnnnnnnnnnnnnnnnnnnnnnnnnnnnnnnnnnnnnnnnnnnnnnnnnnnnnnnnnnnnnnnnnnnnnnnnnnnnnnnnnnnnnnnnnnnnnnnnnnnnnnnnnnnnnnnnnnnnnnnnnnnnnnnnnnnnnnnnnnnnnnnnnnnnnnnnnnnnnnnnnnnnnnnnnnnnnnnnnnnnnnnnnnnnnnnnnnnnnnnnnnnnnnnnnnnnnnnnnnnnnnnnnnnnnnnnnnnnnnnnnnnnnnnnnnnnnnnnnnnnnnnnnnnnnnnnnnnnnnnnnnnnnnnnnnnnnnnnnnnnnnnnnnnnnnnnnnnnnnnnnnnnnnnnnnnnnnnnnnnnnnnnnnnnnnnnnnnnnnnnnnnnnnnnnnnnnnnnnnnnnnnnnnnnnnnnnnnnnnnnnnnnnnnnnnnnnnnnnnnnnnnnnnnnnnnnnnnnnnnnnnnnnnnnnnnnnnnnnnnnnnnnnnnnnnnnnnnnnnnnnnnnnnnnnnnnnnnnnnnnnnnnnnnnnnnnnnnnnnnnnnnnnnnnnnnnnnnnnnnnnnnnnnnnnnnnnnnnnnnnnnnnnnnnnnnnnnnnnnnnnnnnnnnnnnnnnnnnnnnnnnnnnnnnnnnnnnnnnnnnnnnnnnnnnnnnnnnnnnnnnnnnnnnnnnnnnnnnnnnnnnnnnnnnnnnnnnnnnnnnnnnnnnnnnnnnnnnnnnnnnnnnnnnnnnnnnnnnnnnnnnnnnnnnnnnnnnnnnnnnnnnnnnnnnnnnnnnnnnnnnnnnnnnnnnnnnnnnnnnnnnnnnnnnnnnnnnnnnnnnnnnnnnnnnnnnnnnnnnnnnnnnnnnnnnnnnnnnnnnnnnnnnnnnnnnnnnnnnnnnnnnnnnnnnnnnnnnnnnnnnnnnnnnnnnnnnnnnnnnnnnnnnnnnnnnnnnnnnnnnnnnnnnnnnnnnnnnnnnnnnnnnnnnnngactggcttccctgatctctctcctcatggcagcgacccacctccagtcccgtggacaatcgggtacaagagacttaaggttgggcatgggaagggtggggtttccatgatcca

SEQ ID NO: 26407 - DNA, 767 bp, Macaca Mulatta
aaccttctcccagaaatcacccctcattattcattatcgagttcacacaggggagaaaccctatgagtgtaccgagtgtgggagggccttttccctgaagtcacatctcattctacatcagagaggtcatactggagagaaaccctatgaatgtagtgaatgtggaaaggccttctgtgggaagtctccactcatacatcagaaaacccatcctagggagaaaccccctgaatgtgctgagtctgggatgacttttttccggaaatcacagatgattacatatcagagaagacacactggggagaaaccctccagatgcagtgactgtgggaaggccttctgctagcatgtatacttcactgggcatcagaatccatatagtaaagacaccttgtatatgtgctgattgtgggaaggtctattcccagaagtcagtcctcactgtgcatgggaaaactcacattgaacagaaatagtgacaacttctcagctgtagaatagactcatatgttccccagtatatatgattacccttccacagaatgatctggttaggccctcagaatattttcaacaccacaaatatggaatcgatttgctcaccctcaaaactatcttggcccccttcacaggataaatgtatctggaagaattagcactactttgatgttgtctggtcctaacatactttatagaattctcttgtgaatttatttgggcatggcgcattatttgaaagggatctctttgtcatctttctctatttc

SEQ ID NO: 26408 - DNA, 628 bp, Macaca Mulatta
ctccggaggatcgaaatcgccacttacctgaacctgtcggagaagcaggtgaaaatctggtttcagaaccgccgagtgaagcacaagaaggaggggaaaggcacgcagaggaacagtcacgcaggctgcaagtgcgtcgggagccaggtgcactacgcgcgctccgaggatgaggactccctgtcgccggcctctgccaacgatgacaaggagatttcccccttatgaggaagagcctcctccctcacatccccggctcctggcagaccaggcaacgccaaccttggggtacccaggggcccaaatccttgctcattgcagtggtcccatctggagaataaacgaacctagatgttctggaatggacaagctgggcctgaaccttcgtgtctccttcttgacctgtttatctggggctccaattagaagttatagattgttttataaaaatgtaaataacttataattcaactcattctcatcatataacagaggaaaaacaggttttgtttaagtttaacactgtatggggtttttgaaagcttatgtcatttccccatccctactctctttcagaacccgataagaatacagggtttattgattattttctgttgtcgttttcaac

SEQ ID NO: 26409 - DNA, 1066 bp, Macaca Mulatta
  misc_feature (1)...(1066): n = A,T,C or G
ctttcctccccagccctgaaagcgttaaccctggagttttctgcacaccccccgacgggtcaaaaccaagcttcctaaaaaagaaaggtgcaaagtttggtccaggatagaaaaannnnnnnnnnnnnnnnnnnnnnnnnnnnnnnnnnnnnnnnnnnnnnnnnnnnnnnnnnnnnnnnnnnnnnnnnnnnnnnnnnnnnnnnnnnnnnnnnnnnnnnnnnnnnnnnnnnnnnnnnnnnnnnnnnnnnnnnnnnnnnnnnnnnnnnnnnnnnnnnnnnnnnnnnnnnnnnnnnnnnnnnnnnnnnnnnnnnnnnnnnnnnnnnnnnnnnnnnnnnnnnnnnnnnnnnnnnnnnnnnnnnnnnnnnnnnnnnnnnnnnnnnnnnnnnnnnnnnnnnnnnnnnnnnnnnnnnnnnnnnnnnnnnnnnnnnnnnnnnnnnnnnnnnnnnnnnnnnnnnnnnnnnnnnnnnnnnnnnnnnnnnnnnnnnnnnnnnnnnnnnnnnnnnnnnnnnnnnnnnnnnnnnnnnnnnnnnnnnnnnnnnnnnnnnnnnnnnnnnnnnnnnnnnnnnnnnnnnnnnnnnnnnnnnnnnnnnnnnnnnnnnnnnnnnnnnnnnnnnnnnnnnnnnnnnnnnnnnnnnnnnnnnnnnnnnnnnnnnnnnnnnnnnnnnnnnnnnnnnnnnnnnnnnnnnnnnnnnnnnnnnnnnnnnnnnnnnnnnnnnnnnnnnnnnnnnnnnnnnnnnnnnnnnnnnnnnnnnnnnnnnnnnnnnnnnnnnnnnnnnnnnnnnnnnnnnnnnnnnnnnnnnnnnnnnnnnnnnnnnnnnnnnnnnnnnnnnnnnnnnnnntagatgttaccctgtgtgaggaggcattcttcaggtttgctgttcctacaaagtttacacctaactggcttagtgtcttggtagacaatttgcctggcaccaaagtaaatgcagagagtgtagagaggataaaacggcgacacagctcacaggaacagactttccagctgctgaagttatggaaacatcaaaacaaagaccaagatatagtcaagaagatcatccaa

SEQ ID NO: 26410 - DNA, 789 bp, Macaca Mulatta
gcctccccgaggagccaccattcaaccattgaaaaagctgaaaatcaatgtgtttaaggtccacaagtgtgccgtgtgtggcttcaccaccgaaaacctgctgcagttccacgaacacatccctcagcacaaatccgatggttcttcctaccagtgccgggagtgtggcctctgctacacgtctcacgtctctttatccaggcacctcttcatcgtacacaagttaaaggaacctcagccagtgtccaagcagaatggggctggggaagataaccaacaggagaacaaacccagccacgaggatgaatcccccgatggcgccgtgtcagacagaaagtgcaaagtgtgcgcaaaaacttttgaaactgaagctgccttaaatactcacatgcggacacacggcatggccttcatcaaatccaaaaggatgagctcagccgagaaatagccacagatgctccatgaggaaaatccctgtccacattggaataaaaaagacatttttgttacaaaaggtttgcagtataatagagttaacagtactgtctaggctgttgcaatatattctctttcaacgtaccttccttcacctcgtcgtatgtatcctcgataagtattaaaacagtatttgagtttcaaagagtttgtatatatttaaatgaataactttttatactctactctttgttacatgtttgtatcagtatttagtggaaaaccatttgagttgttttgggttagaatttttctttttgtactgtttctttaaaacagagttcttagtaacag

SEQ ID NO: 26411 - DNA, 1408 bp, Macaca Mulatta
tgcagagaagaccagaaaccaacatgagcacagcaggaaaagtaatcaaatgcaaagcagctgtgctatgggaggtaatgaaacccttttccattgaggatgtggaggttgcacctcctaaggcttatgaagttcgcattaagatggtgactgtaggaatctgtggcacagatgaccacgtggttagtggtaccatggtgaccccacttcctgtgattttaggccatgaggcagccggcattgtggagagtgttggagaaggggtgactacagtcgaaccaggtgataaagtcatcccactcgctcttcctcagtgtggaaaatgcagaatttgtaaaaccccggaaaggaactactgcttgaaaaacgatgtgagcaatcctcgggggaccctgcaggatggcaccagcaggttcacctgcagggggaagcccatccaccacttcctcggtgtcagcaccttctcccaatacacggtggtggatgagaatgcagtagccaaaattgacgcagcctcacccatggagaaagtctgccttattggctgtggattttcaactggttatgggtctgcagtcaaagttgccaaggtcaccccaggctctacctgtgctgtgtttggcctgggaggggtcggcctatctgctgttatgggctgtaaagcagctggagcagccagaatcattgcggtggacatcaacaaggacaaatttgcaaaggccaaagagttgggtgccactgaatgcatcaaccctcaagactacaagaaacccatccaggaggtgctaaaggaaatgactgatggaggtgtggatttttcgtttgaagtcatcggtcggcttgataccatgatggcttccctgttatgttgtcatgaggcatgtggcacaagcgtcatcgtaggggtacctcctgattcccagaacctctcaataaaccctatgctgctactgactggacgcacctggaagggggctgtttatggtggctttaagagtaaagaagatatcccaaaacttgtggctgattttatggctaagaagttttcactggatgctttaataacccatgttttaccttttgaaaaaataaatgaaggctttgacctgcttcgctctgggaaaagtatccgtaccatcctgaccttttgaaacactagagatgccttcccttgtacgcagtcttcaggcctcctctaccctacatgatctggagcaacagctgggaaatatcattaattctgctcttcagagatgttttcaataaattacatgtgggggctttccaaagaaattgcaaattgatgggaaattatttttcaagcaaatgtttaaaattcaagtgagaattaaataaagtgttgaacatcagctggggaattgaagccaataaactgttcttctcaacc

SEQ ID NO: 26412 - DNA, 739 bp, Macaca Mulatta
cacctttgtatattcaggaaacttatttaaatccagtgcgccgaaacgtatttaattccaggcctccgcttctcctggggcagccagttttaaccccagcctgtcaccgtgagcgccccagaagagcgcggcgcccctaaccatctttatacagccatgtaaatcctcctgtacaagcgaacacggaatatatacgtatataactcaataaacagaatcattagtgcgcgtttttttccccctctcccctcgcggcgaggtcagctcagcaaccccaaagaacgaaaaggaattaggcatttatagcatttccttcctaactgcaccaactttggggtgctggggccagggttgaggccaaaccggtgttcttgctgcgcttgtgtgctaaggcccccaggagtgagggcgagcaggcctacgtcggcctacagcaggtgccaagtttttatttggtgactgttcagacgcttgggattctgggtgttgccttatttgggtaagcaaattcaaagaaaagggttaaaagcgactgggtgttagggagcagcttttgggaacgtccttgagcaaagcgccacgccccgtgagggtaagtggtctacgccctaccccaccggagcgcttctgggcacgtccccttctcccggagacctaaggagggcaaccaccgctcccaatctcccgtggcggcaagaactggagggtaagggtgccacagcccagccagagcctcggg

SEQ ID NO: 26413 - DNA, 4174 bp, Macaca Mulatta
  misc_feature (1)...(4174): n = A,T,C or G
acctactcgggcctcttctgtgtcaccgtcaacccctacaagtggctgccggtgtacaatgccgaggtggtagctgcctaccggggcaagaagaggagcgaggccccgccccacatcttctccatctctgacaatgcctatcagtacatgctgacannnnnnnnnnnnnnnnnnnnnnnnnnnnnnnnnnnnnnnnnnnnnnnnnnnnnnnnnnnnnnnnnnnnnnnnnnnnnnnnnnnnnnnnnnnnnnnnnnnnnnnnnnnnnnnnnnnnnnnnnnnnnnnnnnnnnnnnnnnnnnnnnnnnnnnnnnnnnnnnnnnnnnnnnnnnnnnnnnnnnnnnnnnnnnnnnnnnnnnnnnnnnnnnnnnnnnnnnnnnnnnnnnnnnnnnnnnnnnnnnnnnnnnnnnnnnnnnnnnnnnnnnnnnnnnnnnnnnnnnnnnnnnnnnnnnnnnnnnnnnnnnnnnnnnnnnnnnnnnnnnnnnnnnnnnnnnnnnnnnnnnnnnnnnnnnnnnnnnnnnnnnnnnnnnnnnnnnnnnnnnnnnnnnnnnnnnnnnnnnnnnnnnnnnnnnnnnnnnnnnnnnnnnnnnnnnnnnnnnnnnnnnnnnnnnnnnnnnnnnnnnnnnnnnnnnnnnnnnnnnnnnnnnnnnnnnnnnnnnnnnnnnnnnnnnnnnnnnnnnnnnnnnnnnnnnnnnnnnnnnnnnnnnnnnnnnnnnnnnnnnnnnnnnnnnnnnnnnnnnnnnnnnnnnnnnnnnnnnnnnnnnnnnnnnnnnnnnnnnnnnnnnnnnnnnnnnnnnnnnnnnnnnnnnnnnnnnnnnnnnnnnnnnnnnnnnnnnnnnnnnnnnnnnnnnnnnnnnnnnnnnnnnnnnnnnnnnnnnnnnnnnnnnnnnnnnnnnnnnnnnnnnnnnnnnnnnnnnnnnnnnnnnnnnnnnnnnnnnnnnnnnnnnnnnnnnnnnnnnnnnnnnnnnnnnnnnnnnnnnnnnnnnnnnnnnnnnnnnnnnnnnnnnnnnnnnnnnnnnnnnnnnnnnnnnnnnnnnnnnnnnnnnnnnnnnnnnnnnnnnnnnnnnnnnnnnnnnnnnnnnnnnnnnnnnnnnnnnnnnnnnnnnnnnnnnnnnnnnnnnnnnnnnnnnnnnnnnnnnnnnnnnnnnnnnnnnnnnnnnnnnnnnnnnnnnnnnnnnnnnnnnnnnnnnnnnnnnnnnnnnnnnnnnnnnnnnnnnnnnnnnnnnnnnnnnnnnnnnnnnnnnnnnnnnnnnnnnnnnnnnnnnnnnnnnnnnnnnnnnnnnnnnnnnnnnnnnnnnnnnnnnnnnnnnnnnnnnnnnnnnnnnnnnnnnnnnnnnnnnnnnnnnnnnnnnnnnnnnnnnnnnnnnnnnnnnnnnnnnnnnnnnnnnnnnnnnnnnnnnnnnnnnnnnnnnnnnnnnnnnnnnnnnnnnnnnnnnnnnnnnnnnnnnnnnnnnnnnnnnnnnnnnnnnnnnnnnnnnnnnnnnnnnnnnnnnnnnnnnnnnnnnnnnnnnnnnnnnnnnnnnnnnnnnnnnnnnnnnnnnnnnnnnnnnnnnnnnnnnnnnnnnnnnnnnnnnnnnnnnnnnnnnnnnnnnnnnnnnnnnnnnnnnnnnnnnnnnnnnnnnnnnnnnnnnnnnnnnnnnnnnnnnnnnnnnnnnnnnnnnnnnnnnnnnnnnnnnnnnnnnnnnnnnnnnnnnnnnnnnnnnnnnnnnnnnnnnnnnnnnnnnnnnnnnnnnnnnnnnnnnnnnnnnnnnnnnnnnnnnnnnnnnnnnnnnnnnnnnnnnnnnnnnnnnnnnnnnnnnnnnnnnnnnnnnnnnnnnnnnnnnnnnnnnnnnnnnnnnnnnnnnnnnnnnnnnnnnnnnnnnnnnnnnnnnnnnnnnnnnnnnnnnnnnnnnnnnnnnnnnnnnnnnnnnnnnnnnnnnnnnnnnnnnnnnnnnnnnnnnnnnnnnnnnnnnnnnnnnnnnnnnnnnnnnnnnnnnnnnnnnnnnnnnnnnnnnnnnnnnnnnnnnnnnnnnnnnnnnnnnnnnnnnnnnnnnnnnnnnnnnnnnnnnnnnnnnnnnnnnnnnnnnnnnnnnnnnnnnnnnnnnnnnnnnnnnnnnnnnnnnnnnnnnnnnnnnnnnnnnnnnnnnnnnnnnnnnnnnnnnnnnnnnnnnnnnnnnnnnnnnnnnnnnnnnnnnnnnnnnnnnnnnnnnnnnnnnnnnnnnnnnnnnnnnnnnnnnnnnnnnnnnnnnnnnnnnnnnnnnnnnnnnnnnnnnnnnnnnnnnnnnnnnnnnnnnnnnnnnnnnnnnnnnnnnnnnnnnnnnnnnnnnnnnnnnnnnnnnnnnnnnnnnnnnnnnnnnnnnnnnnnnnnnnnnnnnnnnnnnnnnnnnnnnnnnnnnnnnnnnnnnnnnnnnnnnnnnnnnnnnnnnnnnnnnnnnnnnnnnnnnnnnnnnnnnnnnnnnnnnnnnnnnnnnnnnnnnnnnnnnnnnnnnnnnnnnnnnnnnnnnnnnnnnnnnnnnnnnnnnnnnnnnnnnnnnnnnnnnnnnnnnnnnnnnnnnnnnnnnnnnnnnnnnnnnnnnnnnnnnnnnnnnnnnnnnnnnnnnnnnnnnnnnnnnnnnnnnnnnnnnnnnnnnnnnnnnnnnnnnnnnnnnnnnnnnnnnnnnnnnnnnnnnnnnnnnnnnnnnnnnnnnnnnnnnnnnnnnnnnnnnnnnnnnnnnnnnnnnnnnnnnnnnnnnnnnnnnnnnnnnnnnnnnnnnnnnnnnnnnnnnnnnnnnnnnnnnnnnnnnnnnnnnnnnnnnnnnnnnnnnnnnnnnnnnnnnnnnnnnnnnnnnnnnnnnnnnnnnnnnnnnnnnnnnnnnnnnnnnnnnnnnnnnnnnnnnnnnnnnnnnnnnnnnnnnnnnnnnnnnnnnnnnnnnnnnnnnnnnnnnnaagactttgagctgaatgctctcaacgcaaggattgaggatgaacaggccctcggcagccagctgcagaagaagctcaaggagcttcaggnnnnnnnnnnnnnnnnnnnnnnnnnnnnnnnnnnnnnnnnnnnnnnnnnnnnnnnnnnnnnnnnnnnnnnnnnnnnnnnnnnnnnnnnnnnnnnnnnnnnnnnnnnnnnnnnnnnnnnnnnnnnnnnnnnnnnnnnnnnnnnnnnnnnnnnnnnnnnnnnnnnnnnnnnnnnnnnnnnnnnnnnnnnnnnnnnnnnnnnnnnnnnnnnnnnnnnnnnnnnnnnnnnnnnnnnnnnnnnnnnnnnnnnnnnnnnnnnnnnnnnnnnnnnnnnnnnnnnnnnnnnnnnnnnnnnnnnnnnnnnnnnnnnnnnnnnnnnnnnnnnnnnnnnnnnnnnnnnnnnnnnnnnnnnnnnnnnnnnnnnnnnnnnnnnnnnnnnnnnnnnnnnnnnnnnnnnnnnnnnnnnnnnnnnnnnnnnnnnnnnnnnnnnnnnnnnnnnnnnnnnnnnnnnnnnnnnnnnnnnnnnnnnnnnnnnnnnnnnnnnnnnnnnnnnnnnnnnnnnnnnnnnnnnnnnnnnnnnnnnnnnnnnnnnnnnnnnnnnnnnnnnnnnnnnnnnnnnnnnnnnnnnnnnnnnnnnnnnnnnnnnnnnnnnnnnnnnnnnnnnnnnnnnnnnnnnnnnnnnnnnnnnnnnnnnnnnnnggcgaagaacgccctggcccacgcactgcagtcagcccggcatgactgtgacctgctgcgggagcagtatgaggaggagacggaggccaaggctgagctgcagcgcgtcctgtccaaggccaactcagaggtggcccagtggaggaccaagtatgagacagatgccattcagcggactgannnnnnnnnnnnnnnnnnnnnnnnnnnnnnnnnnnnnnnnnnnnnnnnnnnnnnnnnnnnnnnnnnnnnnnnnnnnnnnnnnnnnnnnnnnnnnnnnnnnnnnnnnnnnnnnnnnnnnnnnnnnnnnnnnnnnnnnnnnnnnnnnnnnnnnnnnnnnnnnnnnnnnnnnnnnnnnnnnnnnnnnnnnnnnnnnnnnnnnnnagatcctggccgagtggaaacagaagtatgaggagtcacagtcggagctggagtcctcacagaaggaggctcgctccctcagcacagagctcttcaagctcaagaacgcctatgaggagtccctggagcatctggagaccttcaagcgggagaacaagaaccttcag

SEQ ID NO: 26414 - DNA, 280 bp, Macaca Mulatta
cactaagtaagggataaaccaggaaataaaaagacagatatgtggacaccctatttcagtctgtatatcggaagtctcctaagtgcaaaaacagaggggttctgtccatgtggagctctatgcatctaggaggatgtccttagtagggtgaaactttcagagatctacctggggcacggtgtccacccactcttcttactctgtgctactcaattgcagtccgtgccttcacaaaattcagggtgtacatatcctttgagttagatgcaaggccctattt

SEQ ID NO: 26415 - DNA, 402 bp, Macaca Mulatta
tctcaataaacttttaccacaaattgaaatacatatatttttttcaactgccaatcaaggctaggaggctcgaccacctcaacattggagacatcacttgccaatgtacataccttgttatatgcagacatgtatttcttatgtacactgtacttctgtgtgcaattgtaaacagaaattgcaatatggatgtttctttgtattataaaatttttccgctcttaatgaaaaattactgtttaattgacatactcaggataacagagaatggtggtattcagtggtccaggattctgtaatgctttacacaggcagttttgaaatgaaaatcaatttacctttttcttatgatggagttggttttgatactcatttttttctttatcacatggctgctacggc

SEQ ID NO: 26416 - DNA, 551 bp, Macaca Mulatta
acaaagtgttatcagttcctattgagttcataatttgagaaaggtcttgttagcaccagacttcaggcaaaggcagctttctaaaaatgttcccatcctaacaaaaataatcatctttttatttactgtaatttatttactcttatgcctgagccccagtttttgaaattgaatgtatgaactaaaatatttgtaactatagagaattctttccacttctgaatcttataggtatcattcctatccatgggggaccaagaatcacccaaccaaaagatgaaaatgctgcattttgagtagacttggttttctcagtgaagttcaagttctggacttcagccactattgcaagatgcccaaggattgggtgctgctggagggtgtggaaaagcccaagatgccgtggggcctgcaggacttctttctgggggtcctgtgctggagtatatgacagctgcagtgcctgagggcttcattgccagaacgcattatatacaggatggcagagctgtcagtgtgctgctgggaggaaatgttgcaaaattcatctt

SEQ ID NO: 26417 - DNA, 530 bp, Macaca Mulatta
gataaactaccttcccaaaagagaacatcagaggttttcattgctgaaaagaaaattgtaaaaacagaaaatgtcataggaataagaaaattatcttttcatatctgcaagattttttcatcaataaaaagtatccttgaaacaagtgagcttttgtttttggggggagatggtttattataaaattaacatgagtacatgagtaagatttacaggatttaacttaaaggatgaaaggaatggatgatgtgacactgagacaagaggtataaatgaaaatttagggtcttgaataggaatttttagtttcttctaagagtaagtgaaaagtgcagttgtaacaaacaaagctgtaacagcatctttttctgccaataacggaagtttggcatgccatgcatatgaaggtgtttggaaatattattggataagaatcactcaattatcatcccagataaatggatgaagctataatcgttttggggaaaagattctcaaatgtataaagtcttagaacaaacgaattcttt

SEQ ID NO: 26418 - DNA, 1633 bp, Macaca Mulatta
  misc_feature (1)...(1633): n = A,T,C or G
cccccccttcacccaaaccttcttccaccctgttgtccgggagaacaacaagcccgtcctgccacatgggcagggtcagcgccacagacagagactcaggcaccaacgcgcaagtcacctactcgctattggcgccccaggaccccgcacctgcccctcccctccctggtctccatcagcgcagacaacggccacctgttcgccctcaggtcgctggactacgaggccttgcaggagttcgagttccgcgtgggcgccacagaccgcgggtccccggagctgagcagcgaggcgctggtgcgcgtgctggtgctggacgccaacgacaactcgcccttcgtgctgtacccgctgcaaaacggctccgcgccctgcaccgagctggtgccccggacggccgagccgggctacctggtgaccaaggtggtggcggtggacggcgactcgggccagaacgcctggctgtcgtaccagctgctcaaggccacggaacccgggctgttcggtgtgtgggcgcacaatggcgaggtgcgcacctccaggttgctgagtgagcgcgacgcggccaagcacaggctggtggtgctggtcaaggacaatggcgagcctccgcgctcggccaccgccacgctgcacttgctcctagtggacggcttctcccagccctacctgcttctcccggaggcggccccggcccaggcccaggccgactggctcaccgtctacctggtggtggcattggcctcggtgtcgtcgctcttcctcttgtcggtgctcctgttcgtggcggtgcggctgtgcaagaggagcagggcggcctcggtgggtcgctgctcggtgcccgagggcccctttccaggacatctggtggacgtgagtggcaccaggaccctgtcccagagctaccagtacgaggtgtgtctgatgggaggctcaggaacaaatgagttcaagttcctgaagccgattatccccaacttccctcctcagggcactgagagagaaatggaagaaacccccnnnnnnnnnnnnnnnnnnnnnnnnnnnnnagtgtgggattattttactaaatcttacttatgtttgaagatctcttttaacttaaagttacatgttctgtttctttttaatttacctctattctttaggttgaaattttatataaagtaagatactgggtgtcttagtatttcctgttcatgcttaggagtttattacttcacttgagggtacttgacaatatgaacacaaagcaaatttttatttgcataattttaaacttttgaaattaaattatctattcttnnnnnnnnnnnnnnnnngtattgttaatccttaagtaagattgtatttctagctattggtaagagttgtttcactattgctatgtaggaccgtgtttaaaatgtgagtatttcatattatttaatcctccagtgtctcattttgcagtaactcctacagtgtgtaacactaaaaataagaactaatgatggctaaacactaaagtagccattcatacttatgcatattttagtatctcatgatagtcaatccaaaatttttgtgactatagactttactgaagtgtcatcacattagtttgtgagcctcatgtaagaacatgatggtc

SEQ ID NO: 26419 - DNA, 1093 bp, Macaca Mulatta
  misc_feature (1)...(1093): n = A,T,C or G
gggctctctttccttgcctaacgcagcctaggctcgtggtcccaataagcatctgaagcgggtagcagctccaaagcattggatgctggataaattgaccggtgtgtttgctcctcgtccatccaccggtccccacaagttgagagagtgtctccccctcatcatcttcctaaggaacagacttaagtatgccctgacaggagatgaagtaaagaagatttgcatgcagcggttcattaagatcgatggcaaggtccgaactgatataacctaccctgctggattcatggatgtcatcagcattgacaagacaggagagaatttccgtctgatctatgacaccaagggatcgctttgctgtacatcgaaattaccacctgaagaaagccaaagttacaagtaattagcaaatgagaagaaagaatcttctgaggggacacagaatagggaactccccttcattcaatggtgaacatcaagtggaagggcccggcaagacgatccaaggctgaaccactcagaataccaccctgacagttcaagaggggttggaatatggtaataaacaacgaactatcggaacaaatactcgggaattattccgggcgaaagcgaaatcatggggacacccaaaatgaaacctccgtaaacgctagagagaaattttttttcgcgtgttggtaaacaaataggtgttcttgcaagaaaaccaaccactgtatggctcataaaaaactccacttagggcaggtatagtgcctgaggtaagaaaacgactgtgccctaaaagaattcgaaccactataaactcaccatcgaggcagaaaaaggtaaaaaaatttgaggaaagggggtggagatctagcaatcacccacgtgcagtgaagaataaatgaggggtctcattacacaagagcggaatatacaccatcacttatgagagacgtatagattgatttcaaacagnactagaaaaataaggaaaacgccccgattatttgggactagacacgcacgctatgttttgtgcgcacctcttacccaaaaccgttgtatgtaaacccaatgtctttctcggagataaatgatgcgt

SEQ ID NO: 26420 - DNA, 3042 bp, Macaca Mulatta
  misc_feature (1)...(3042): n = A,T,C or G
agctggacagacttgaggaaaaacagaaagaaacctaccggcgcatgctagagcagctgttgctggccgaaaagtgtcacaggcgcaccgtgtacgagttagagaacgagaagcataaacacactgactacatgaacaagagcgacgacttcaccaacctgctggagcaggagcgggagaggnnnnnnnnnnnnnnnnnnnnnnnnnnnnnnnnnnnnnnnnnnnnnnnnnnnnnnnnnnnnnnnnnnnnnnnnnnnnnnnnnnnnnnnnnnnnnnnnnnnnnnnnnnnnnnnnnnnnnnnnnnnnnnnnnnnnnnnnnnnnnnnnnnnnnnnnnnnnnnnnnnnnnnnnnnnnnnnnnnnnnnnnnnnnnnnnnnnnnnnnnnnnnnnnnnnnnnnnnnnnnnnnnnnnnnnnnnnnnnnnnnnnnnnnnnnnnnnnnnnnnnnnnnnnnnnnnnnnnnnnnnnnnnnnnnnnnnnnnnnnnnnnnnnnnnnnnnnnnnnnnnnnnnnnnnnnnnnnnnnnnnnnnnnnnnnnnnnnnnnnnnnnnnnnnnnnnnnnnnnnnnnnnnnnnnnnnnnnnnnnnnnnnnnnnnnnnnnnnnnnnnnnnnnnnnnnnnnnnnnnnnnnnnnnnnnnnnnnnnnnnnnnnnnnnnnnnnnnnnnnnnnnnnnnnnnnnnnnnnnnnnnnnnnnnnnnnnnnnnnnnnnnnnnnnnnnnnnnnnnnnnnnnnnnnnnnnnnnnnnnnnnnnnnnnnnnnnnnnnnnnnnnnnnnnnnnnnnnnnnnnnnnnnnnnnnnnnnnnnnnnnnnnnnnnnnnnnnnnnnnnnnnnnnnnnnnnnnnnnnnnnnnnnnnnnnnnnnnnnnnnnnnnnnnnnnnnnnnnnnnnnnnnnnnnnnnnnnnnnnnnnnnnnnnnnnnnnnnnnnnnnnnnnnnnnnnnnnnnnnnnnnnnnnnnnnnnnnnnnnnnnnnnnnnnnnnnnnnnnnnnnnnnnnnnnnnnnnnnnnnnnnnnnnnnnnnnnnnnnnnnnnnnnnnnnnnnnnnnnnnnnnnnnnnnnnnnnnnnnnnnnnnnnnnnnnnnnnnnnnnnnnnnnnnnnnnnnnnnnnnnnnnnnnnnnnnnnnnnnnnnnnnnnnnnnnnnnnnnnnnnnnnnnnnnnnnnnnnnnnnnnnnnnnnnnnnnnnnnnnnnnnnnnnnnnnnnnnnnnnnnnnnnnnnnnnnnnnnnnnnnnnnnnnnnnnnnnnnnnnnnnnnnnnnnnnnnnnnnnnnnnnnnnnnnnnnnnnnnnnnnnttgaaaagtgaagaagaaatatcctctgaattaagctgcagtgttgacttactaaagaagagacttgatggtatagaggaagtggaaagagaaataacaagaggaaggtcacgaaaagggtctgagctcacctgcccggatgataataagattaaggaactaacacttgaaattgagagactgaagaaacgtctccaacaattggaagtggtcgaaggggatttgatgaagacagaagatgagtatgatcagctggaacagaaatttagaactgagcaggataaggcgaacttcctctctcaacaactagaggagatcaagcaccaaattgccaagaataaagcaatcgagaagggtgaggttgtgagccaggaagctgaactgagacacagatttcggttggaagaagctaaaagtcgagacttaaaagctgaagtacaagctcttaaagagaagattcacgaattaatgaacaaagaagatcagctttctcagctccaggtagattattctgtacttcaacaaagatttatggaagaagaaaataagaacaaaaacatggggcaggaggtcctcaatctgactaaagagttggagctttccaagcgctacagcagagctcttaggcccagtgtgaatggaagaagaatggtggatgttcctgtgacatcaactggagtccagactgatgcagtcagcagtgaagcaacagaggaagaaacaccagctgtattcatacggaaatccttccaggaagaaaatcatattatgagtaatcttcggcaggtgggattgaagaaacccatggaaagatcctctgttctagacaggtatcctccagcagcaaatgagctcactatgagaaagtcttggattccatggatgagaaagagggaaaatggtccctcaatcacnnnnnnnnnnnnnnnnnnnnnnnnnnnnnnnnnnnnnnnnnnnnnnnnnnnnnnnnnnnnnnnnnnnnnnnnnnnnnnnnnnnnnnnnnnnnnnnnnnnnnnnnnnnnnnnnnnnnnnnnnnnnnnnnnnnnnnnnnnnnnnnnnnnnnnnnnnnnnnnnnnnnnnnnnnnnnnnnnnnnnnnnnnnnnnnnnnnnnnnnnnnnnnnnnnnnnnnnnnnnnnnnnnnnnnnnnnnnnnnnnnnnnnnnnnnnnnnnnnnnnnnnnnnnnnnnnnnnnnnnnnnnnnnnnnnnnnnnnnnnnnnnnnnnnnnnnnnnnnnnnnnnnnnnnnnnnnnnnnnnnnnnnnnnnnnnnnnnnnnnnnnnnnnnnnnnnnnnnnnnnnnnnnnnnnnnnnnnnnnnnnnnnnnnnnnnnnnnnnnnnnnnnnnnnnnnnnnnnnnnnnnnnnnnnnnnnnnnnnnnnnnnnnnnnnnnnnnnnnnnnnnnnnnnnnnnnnnnnnnntacggaaatacaactccaatgccaatatcataaccacagaggacaataaaattcacattcacttagggtctcagtntaaacggtcccctgngacttcaggtgaatgagtcagttcccgttattactgtccgaccagtaaacgtgacagccgaaaaggaggtttccaccggcactgtccttcgctctcccaggaaccacctctcctcacggcctggtgcgagcaaggtgacgagcactatcaccataacaccagtcacaacgtcatctgctcgaggaacccagtnnntcaggacaagacgggtcatcccagcggcctacacccacccgcattcctatgtcaaaag

SEQ ID NO: 26421 - DNA, 4015 bp, Macaca Mulatta
  misc_feature (1)...(4015): n = A,T,C or G
gagctgatgcagacggaggtgcaccacgtgcggactctcaagatcatgctgaaggtgtactccagggccctgcaggaggagctgcagttcagcagcaaggctattggccgcctcttcccatgtgctgatgacctgctggagacgcacagccatttcctcgctcggctcaaggagcgccgccaggagtccctggaggagggcagcgaccggaattatgtcatccagaaaatcggcgacctcctggttcagcannnnnnnnnnnnnnnnnnnnnnnnnnnnnnnnnnnnnnnnnnnnnnnnnnnnnnnnnnnnnnnnnnnnnnnnnnnnnnnnnnnnnnnnnnnnnnnnnnnnnnnnnnnnnnnnnnnnnnnnnnnnnnnnnnnnnnnnnnnnnnnnnnnnnnnnnnnnnnnnnnnnnnnnnnnnnnnnnnnnnnnnnnnnnnnnnnnnnnnnnnnnnnnnnnnnnnnnnnnnnnnnnnnnnnnnnnnnnnnnnnnnnnnnnnnnnnnnnnnnnnnnnnnnnnnnnnnnnnnnnnnnnnnnnnnnnnnnnnnnnnnnnnnnnnnnnnnnnnnnnnnnnnnnnnnnnnnnnnnnnnnnnnnnnnnnnnnnnnnnnnnnnnnnnnnnnnnnnnnnnnnnnnnnnnnnnnnnnnnnnnnnnnnnnnnnnnnnnnnnnnnnnnnnnnnnnnnnnnnnnnnnnnnnnnnnnnnnnnnnnnnnnnnnnnnnnnnnnnnnnnnnnnnnnnnnnnnnnnnnnnnnnnnnnnnnnnnnnnnnnnnnnnnnnnnnnnnnnnnnnnnnnnnnnnnnnnnnnnnnnnnnnnnnnnnnnnnnnnnnnnnnnnnnnnnnnnnnnnnnnnnnnnnnnnnnnnnnnnnnnnnnnnnnnnnnnnnnnnnnnnnnnnnnnnnnnnnnnnnnnnnnnnnnnnnnnnnnnnnnnnnnnnnnnnnnnnnnnnnnnnnnnnnnnnnnnnnnnnnnnnnnnnnnnnnnnnnnnnnnnnnnnnnnnnnnnnnnnnnnnnnnnnnnnnnnnnnnnnnnnnnnnnnnnnnnnnnnnnnnnnnnnnnnnnnnnnnnnnnnnnnnnnnnnnnnnnnnnnnnnnnnnnnnnnnnnnnnnnnnnnnnnnnnnnnnnnnnnnnnnnnnnnnnnnnnnnnnnnnnnnnnnnnnnnnnnnnnnnnnnnnnnnnnnnnnnnnnnnnnnnnnnnnnnnnnnnnnnnnnnnnnnnnnnnnnnnnnnnnnnnnnnnnnnnnnnnnnnnnnnnnnnnnnnnnnnnnnnnnnnnnnnnnnnnnnnnnnnnnnnnnnnnnnnnnnnnnnnnnnnnnnnnnnnnnnnnnnnnnnnnnnnnnnnnnnnnnnnnnnnnnnnnnnnnnnnnnnnnnnnnnnnnnnnnnnnnnnnnnnnnnnnnnnnnnnnnnnnnnnnnnnnnnnnnnnnnnnnnnnnnnnnnnnnnnnnnnnnnnnnnnnnnnnnnnnnnnnnnnnnnnnnnnnnnnnnnnnnnnnnnnnnnnnnnnnnnnnnnnnnnnnnnnnnnnnnnnnnnnnnnnnnnnnnnnnnnnnnnnnnnnnnnnnnnnnnnnnnnnnnnnnnnnnnnnnnnnnnnnnnnnnnnnnnnnnnnnnnnnnnnnnnnnnnnnnnnnnnnnnnnnnnnnnnnnnnnnnnnnnnnnnnnnnnnnnnnnnnnnnnnnnnnnnnnnnnnnnnnnnnnnnnnnnnnnnnnnnnnnnnnnnnnnnnnnnnnnnnnnnnnnnnnnnnnnnnnnnnnnnnnnnnnnnnnnnnnnnnnnnnnnnnnnnnnnnnnnnnnnnnnnnnnnnnnnnnnnnnnnnnnnnnnnnnnnnnnnnnnnnnnnnnnnnnnnnnnnnnnnnnnnnnnnnnnnnnnnnnnnnnnnnnnnnnnnnnnnnnnnnnnnnnnnnnnnnnnnnnnnnnnnnnnnnnnnnnnnnnnnnnnnnnnnnnnnnnnnnnnnnnnnnnnnnnnnnnnnnnnnnnnnnnnnnnnnnnnnnnnnnnnnnnnnnnnnnnnnnnnnnnnnnnnnnnnnnnnnnnnnnnnnnnnnnnnnnnnnnnnnnnnnnnnnnnnnnnnnnnnnnnnnnnnnnnnnnnnnnnnnnnnnnnnnnnnnnnnnnnnnnnnnnnnnnnnnnnnnnnnnnnnnnnnnnnnnnnnnnnnnnnnnnnnnnnnnnnnnnnnnnnnnnnnnnnnnnnnnnnnnnnnnnnnnnnnnnnnnnnnnnnnnnnnnnnnnnnnnnnnnnnnnnnnccgggacagcgcccccactgagagccggctggccaagagcgatgtgcccatccagctgctcagcgccaccaaccagttccagaggcaggcggccgtgcagcagcagatccccaccaagctggcggcctccaccaagggtggcaaggacaagggcggcaagagcaggggctctcagcgctgggagagctcannnnnnnnnnnnnnnnnnnnnnnnnnnnnnnnnnnnnnnnnnnnnnnnnnnnnnnnnnnnnnnnnnnnnnnnnnnnnnnnnnnnnnnnnnnnnnnnnnnnnnnnnnnnnnnnnnnnnnnnnnnnnnnnnnnnnnnnnnnnnnnnnnnnnnnnnnnnnnnnnnnnnnnnnnnnnnnnnnnnnnnnnnnnnnnnnnnnnnnnnnnnnnnnnnnnnnnnnnnnnnnnnnnnnnnnnnnnnnnnnnnnnnnnnnnnnnnnnnnnnnnnnnnnnnnnnnnnnnnnnnnnnnnnnnnnnnnnnnnnnnnnnnnnnnnnnnnnnnnnnnnnnnnnnnnnnnnnnnnnnnnnnnnnnnnnnnnnnnnnnnnnnnnnnnnnnnnnnnnnnnnnnnnnnnnnnnnnnnnnnnnnnnnnnnnnnnnnnnnnnnnnnnnnnnnnnnnnnnnnnnnnnnnnnnnnnnnnnnnnnnnnnnnnnnnnnnnnnnnnnnnnnnnnnnnnnnnnnnnnnnnnnnnnnnnnnnnnnnnnnnnnnnnnnnnnnnnnnnnnnnnnnnnnnnnnnnnnnnnnnnnnnnnnnnnnnnnnnnnnnnnnnnnnnnnnnnnnnnnnnnnnnnnnnnnnnnnnnnnnnnnnnnnnnnnnnnnnnnnnnnnnnnnnnnnnnnnnnnnnnnnnnnnnnnnnnnnnnnnnnnnnnnnnnnnnnnnnnnnnnnnnnnnnnnnnnnnnnnnnnnnnnnnnnnnnnnnnnnnnnnnnnnnnnnnnnnnnnnnnnnnnnnnnnnnnnnnnnnnnnnnnnnnnnnnnnnnnnnnnnnnnnnnnnnnnnnnnnnnnnnnnnnnnnnnnnnnnnnnnnnnnnnnnnnnnnnnnnnnnnnnnnnnnnnnnnnnnnnnnnnnnnnnnnnnnnnnnnnnnnnnnnnnnnnnnnnnnnnnnnnnnnnnnnnnnnnnnnnnnnnnnnnnnnnnnnnnnnnnnnnnnnnnnnnnnnnnnnnnnnnnnnnnnnnnnnnnnnnnnnnnnnnnnnnnnnnnnnnnnnnnnnnnnnnnnnnnnnnnnnnnnnnnnnnnnnnnnnnnnnnnnnnnnnnnnnnnnnnnnnnnnnnnnnnnnnnnnnnnnnnnnnnnnnnnnnnnnnnnnnnnnnnnnnnnnnnnnnnnnnnnnnnnnnnnnnnnnnnnnnnnnnnnnnnnnnnnnnnnnnnnnggtgagatccagccatgatccagctctggtggagaacgggacacatttcaagccttgttctgcaccccaagcattagtggcaggactgggtcctggctggtcatccttgttcccagtggggtacacgtgagcccccgccagggccaagtccttctccggaacccagggtcctgggaaccgcagatcccggggggattcagcccttctcccactgtgctggcagaggcgctcctgtgaccctgaatacagtgaatagggacattcccgccactcggggacagacgggcacaggggatgggaaactccatcaggaagtgctcccctgggcagaggcgcccactgggtgctgtgggctcaggaggggacggggcaggagctggtgccaactaggaccagagccccac

SEQ ID NO: 26422 - DNA, 3025 bp, Macaca Mulatta
agaggggtactgatatctgaattctgagggcaggtgtcctgccaaggaatctttcctttaacagagcttcaatgctgctcctgttcctcctcttcgagggactctgctgtcctggggaaaatacagcaggtaagaagagtgcaggtggaaagttacctatggtagggcaccagaggacggagaagaagttctggggaggtcctgggggaagggagcagtactcctctaggatgcccttggagtatgactttcaggctagttccaggcagagaattcttgccctcagtctcagtttttgtctctgattttggggaaaggaagctggccccagaggaaaagcatacgtgcaaattgcctaactatctctcgtctctaagttcctttttttcctttggcatcacttttcccattcctttacattctctctacttgtcatttccctctctttcagctccccaggctctacaatcctaccgtccagcagcagaggaccccctgtccttccgcatgctccaaatttcctcctttgccaaccacagctgggcacacagtgagggctcaggatggctgggtgaccttcagactcatggctgggacactgtcacgggcaccatccgctttctgaagccctggtcccatggaaacttcagcaagcaggagctgaaaaacttacagtcactgttccagttatacttcaatggttttgtctggatagtgcaagcttctgctggtcaatttcagcttgaatgtaagttcgtcactctaagctgataatttgcctgggaacatcaactattttccaaagtggagatggtataaagactctgaccatcatttaaccttactaactttgttccccactctctggctcccactccctcctctgcttcacccttcctcaccaccctcactccactatatacacaaaagggcctgtgtgtaccgtatctcaacatgaatataccttcgtgtctggctctttggaatgactgtctcctctggatcttctgccctcattcctgccctcagactcagcctttctcaccccgctttctacccttctttatcttttgcctgagtgttgacctggactggcctgtcctaaccactttcacgtgaattattggtgaccaatctcctatctttctgatagccttcccatctaccactttcccattagttatttcaaagaatctttattatcttcacattttcttcccacaaattttcttcccctttgccactaaactctagtctccatatgatttcccagcaaatttttcttcccttgaatctctttactctctaaattgtttgtttttcttccttgtcattctttccatattgatctctcgtgcctgtctactctcagaccccttcgagatccagatattagctggctgtagaatgaatgccccacaaatcttcttaaatatggcatatcaaggatcagatttcctgagtttccaaggaatttcctgggagccatctccaggagcagggatccgggcccagaacgtctgtaaagtgctcagtcgctacctagatattaaggaaatactgcaaagccttcttggtcacacctgtcctcgatttcttgcggggctcatggaagcaggggagtcagaactgaaacgaaaaggtgagcccaactctctctctcccctcttgttcctagtactgtaactctcctatttgaatttgcctctcatcatcattttgaaagacaatgtgagagactagagaatgagatgtgtgggtttaggactgtttcttagaaaagagaaagaagtgattattaaatcactcttagtattactacttaggcacataagtgcctgagctctggcctggggtgcccctcaaaattccatttttttcttatcttcttctgtctagtgaagccagaagcctggctgtcccgtggccccagtcctggccctggccgtcggcagcttgtgtgccatgtctcaggattctacccaaagcccgtgtgggtgatgtggatgcggggtgaacaggagcagcggggcactcagcgaggggacatcctgcctaatgctgacgagacatggtatctccgagcaaccctggatgtggcaactggggaggcagctggcctgtcctgtcgggtgaaacacagcagtatagagggccatgatctaatcatccattggggtgagaaagagctgaggctctgctgggaaataatgaaaatagccctggggcttttgagggtgggggctgaggaaatgggtaggaacgctaggcacaagaagggtaaaactgggacaatgaaaataaaggatagagtatgacagtagttaaattttaagaaaatggaagtagggaattagacatactaacaaaaaaaggaggaggaactagtgatttagtgggagagtgctgggaggagatcacagacaaaggatcaggaggaattgaaatgagggctctggaaaacacagataaaactctaggaagataccacccttgcaaaatgggaaatctcagcttggtggaatagagtattttagggatgatattcttattctatccccaaccaggtggatattccatctttctcatcctgatctgtttaactgtgatagttaacctggtcatattggttgtagttcactcacggttaaaaaaacagaggtgagccttttcttgttctttgtttcttcaacctgtaatcaactcattctttttttcctctatcttctttttttctctctgcttttcccctttatttcctttctttgagattaatatcctcctcttttcccacagttcaaataagaacgctctttctccccgtgcacccagccctgtgtttcccatgggagccaacacccaggacaccaataattcaagacatcacttctgcttggcacaagtatcatggatcaaaaacagattcttgaagtggaagacacgcctaaaccaactctcgtgacatttgctttaccttatacataaaatccttgtctgcatcttcttaaacaccgctcgagatctg

SEQ ID NO: 26423 - DNA, 850 bp, Macaca Mulatta
  misc_feature (1)...(850): n = A,T,C or G
ggagtttcatccatatgggacatgacgcgacangnnnnnaccatttctagttttgtaggagcatggcttggagcacttcctattccgctggattgggaaagaccatggcaggtatggaccatctcctgtacgcttggagcgacctttggctacgtggctggccttgttatttcaccactctggatatactggaatagaaagcaacttacgtacaagaacaattaactggagcaaagggagatacttctttgtgcagattctgtaagggctgtgcagaaatgtgtatggtcaaagccaagcagttccatttacagcactgttttttatgtagttacaacctgatgtgattgtagctttttaaactatgaaacccctgagagattgtaccttctagttgaaataaagtttttattataggacacaannnnnnnnnnnnnnnnnngttnctttatttctttttttgttcccctatactctcntttttttttatggtgtattttgcccnntattttttgagtgtctgcatgtaggatattgcgttacttttttggttatnntattggtatgaatatctaagcgaaatatttttaattatttttacgtttttttataaataaaatatttttattttgtgttaatcctatcttctttttgttgtcttttctcccgtcgattttttcttctatttttgtttctggccttccgttatatttagacctccggagcgacggatttgnntttggcgtgttgtggttatgtgggtagatttatatttcggatttcgaatcgcgggccatatattgctacatatcttcaatcgtatatagattggttcctagctcgccactcc

SEQ ID NO: 26424 - DNA, 135 bp, Macaca Mulatta
tcatttgatccttcaaaaatcacaaggaagaaaagttttataacttattctccaacaactggaacttgtcaaatgagtctatttgcttctcccacaagctctgaagaacaaaagcacagaaatggactatcaaat

SEQ ID NO: 26425 - DNA, 910 bp, Macaca Mulatta
gaacattcaccgtggctgctctgcgctgccatacaatgtcagattgcactgaggccgccatgctgtaagaaaccccaagctgcctgcctgaaaagactggagagacacagcacccatcagcttttccagccttttgggtcctcccagctaaattacaggcattgtgaagcagagatgagaagagatgagacctcctgcgtgccctttccaaatcccggctcagcagaatcatcctacacaatagtaagtttttacttgaagccactaatttggggagtagttcttatgcagcaaaagataatcagaacactgcgccatggcaggagctgataaacctgctcactgttacgcgtgtatccaatgactactcacacacacatgacttgcttcactctactttctggctttccactcagcaaattttaagaaatgagaatgttattcatgagaaattaactcaagatgaatattgttatcgttaaactcttcgtaaatggtaaaatactacattattgctagtcatttttatttaaagaagtttggttctttaaatgaaagaagtttggggtcttttgtggatactctgcatatagatattctagacatgaaagaacgttgaagacaaagaatgttgaaggcatatagacatgaaggaattttgaagttgggttcttttgtggatactctgcatatagacattctagactggagtgatatgtcttgttcaagcttctatgtttttaaaatgataacttgacacacctacccaatgccaatttttaggacataaatctgtgtgaactaaggaaaattcaggaatgattaaacctacatattttcccaagagagactggataacataagtctttatatttttcacaacgttaagtttacagcatccaaatgagca

SEQ ID NO: 26426 - DNA, 758 bp, Macaca Mulatta
gggattccagcggcggacagcacccgggccgagatgtctcgctcagtggccttagccgtgctggcgctactctctctttctggcctggaggctatccagcgtactccaaagattcaggtttactcacgccatccaccagagaatggaaagccaaatttcctgaattgctatgtgtctggatttcatccatctgatattgaagttgacttactgaagaatggagagaaaatgggaaaagtggagcattcagacttgtctttcagcaaagactggtctttctatctcttgtactacactgaattcacccccaatgaaaaagatgagtatgcctgccgtgtgaaccatgtgactttgtcagggcccaggacagttaagtgggatcgagacatgtaagcagcatcatggaggtttgaagatgccgcatttggattggatgaattccaaattctgcttcgttgctttttgatattgatatgcttatacggtttatgcaagaaatggagaggtataatagtggtaacacaggcatgatcttctttataattctactttgagtggtagtctcccgtttgagggatgtggggagcctaggctgtagggggggtgggggcttaaaagggggggggaacaagggaattggtcgctgagggagcggccagggtgctggggcagaagcctgagagggcgtggggcaccggtgggcctggagggccgttagaaaagaagaaggcggaggggcgaaagaagaggagtgagga

SEQ ID NO: 26427 - DNA, 1040 bp, Macaca Mulatta
  misc_feature (1)...(1040): n = A,T,C or G
gtgggtgaagttttgtttcttgtttcctntcagacatttcaaccacagactgagaaaactaagcaaagttgtgtggaagagcagagnnnnnnnnnnnnnnnnnnnnnnnnnnnnnnnnnnnnnnnnnnnnnnnnnnnnnnnnnnnnnnnnnnnnnnnnnnnnnnnnnnnnnnnnnnnnnnnnnnnnnnnnnnnnnnnnnnnnnnnnnnnnnnnnnnnnnnnnnnnnnnnnnnnnnnnnnnnnnnnnnnnnnnnnnnnngagactgaataaagaatatagtatcagtaacaaagagaatattcacaatggcctgaggatgtcaatttatcctaagtcaactgggaataaacagtttgcggatggagatgatgctatcagcaaactacatgaccaagaagaatatggcgcagctctcatcagaaataacatgcaacatataatggggccagtgactgcaattaaactcctgggggaagaaaacaaacagagcaaacctaagagcgttctaaacaaaattccagcaagtatgaactatgctaaagcacactcgaaggataaaaagaagcctcaaagagattcccaagtccagaaagttccagtaaaaagcaaaagcacccatcgtactcaacacaacattgactacccaaaacatctatcaaaagtcaaaaaaatccccagtgattttgaaggcagcggttacacagatcttcaagagagaggggacaatgatatgtctcctttcagtggggacggccaaccttttaaggacattcctggtaaaggagaagctactggtcctgacctagaaggcaaagatattcaaacagggtttgcaggcccaagtgaagctgagagtactaatcttgacacaaaagagccaggttataatgagatcccagaaagagaagaaaatggcggaaataccattggaactggggatgaaactgcgaaagaggcagatgctgttgatgtcagtcttgtagagggcaacaacgatatcgtgggtagtaccaattttaaggaactccctggaagagaag

SEQ ID NO: 26428 - DNA, 697 bp, Macaca Mulatta
ccttaataaagagaggtgtaaacagccacctaaagtaggtggtttgaagagaatagatcatcagataacctcaagtcacgtgagaatcttagtccattgacattgccttggctagtagaagcctcttacctatgtatgtgtcttacctcatctcctaaaaggcagagtacaaagtaagccatgtatctcaagaaggtaacttcactttgtctatttgctgttgattgtaccaaggaatgaaaaaagtaaatataactcaggtagcactttatactcaggcagatctcagccctctactgagtcccttagccaagcagtttctttcaaagaagccagtgggcgaaaagcagggactgccactcccaattcagatcacactgttaaaagttgtgttttgaaattttatgtttagttgcacaaactgggccaaagaaacgttgccttgaggaagatatgattggagaatcaagagtgtagaagaataaatactgttttactgtccaaagacatgtttatagtgctctgtacatgttcctttcctttgtaatctctggcgagatgctttaggaagataaaagtttgaggagaacaaacaagaattctgaagtaagcacagagttgaagtttatacccatgtcacatggttttcaaaaatgtcgcaattacttagaagcaggaatggtgttttttaaaacta

SEQ ID NO: 26429 - DNA, 269 bp, Macaca Mulatta
cgtaggggagatgggcttgccaccagaacccatggggtactggagggcctgggctttacgccaccccagctgaattccaggcggtgggcccctcatccctgggctcggcttcagatccggaaaggtccagggtccggcctccaattggagcctgtcattggcttccccctcggcccgccccctgacctctgccctgccgccgagcctacggattggtcgaccctgtcccgccggcgccgcattggctcatcgcgctcgccctccatccc

SEQ ID NO: 26430 - DNA, 127 bp, Macaca Mulatta
gaaatcagctaaaaaactatttaataagctcgtcactgacttgccaaatgtacaacaagagatcgttaatatacacaacactctcagaagaggagtagttccaccagccagcaacatgctgaagatg

SEQ ID NO: 26431 - DNA, 329 bp, Macaca Mulatta
cgctcttcagttcgcgcgccacgggcgaagacaaagggaggaacagtttttatgaaaccagctccttccaccgaggcgacgtgctggaggtgccccggacccacctgacccactatggcatctacctaggggacaaccgtgttgcccacatgatgcctgacatcctgttggctctgacggacgacatggggcgtacgcagaaggtggtctccaataagcgtctcatcctgggcgtcattgtcagagtggccagcattcgcgtggacacagtggaggacttcgcctacggagctaacatcctggtcaatcacctggacgagtccctccag

SEQ ID NO: 26432 - DNA, 1720 bp, Macaca Mulatta
  misc_feature (1)...(1720): n = A,T,C or G
cagcccatggaccaagcttctctcaaaaacagcgatgttcttgtcctgacagggcttacccagatccccactgcaaacccagatggcatggtgggagaattctgcagcaacctannnnnnnnnnnnnnnnnnnnnnnnnnnnnnnnnnnnnnnnnnnnnnnnnnnnnnnnnnnnnnnnnnnnnnnnnnnnnnnnnnnnnnnnnnnnnnnnnnnnnnnnnnnnnnnnnnnnnnnnnnnnnnnnnnnnnnnnnnnnnnnnnnnnnnnnnnnnnnnnnnnnnnnnnnnnnnnnnnnnnnnnnnnnnnnnnnnnnnnnnnnnnnnnnnnnnnnnnnnnnnnnnnnnnnnnnnnnnnnngctcattcagaccaataagctgaagcactaccccagcatccacggagacttcagcaacgacttcagacagccctgtgtggtgttcaccgggcacccttccctccgcttcggggacgtggtccacttcatggagctctggggaaaatctagtctcaacaccgtcatattcacggnnnnnnnnnnnnnnnnnnnnnnnnnnnnnnnnnnnnnnnnnnnnnnnnnnnnnnnnnnnnnnnnnnnnnnnnnnnnnnnnnnnnnnnnnnnnnnnnnnnnnnnnnnnnnnnnnnnnnnnnnnagcccctgcatgtggtgtgtcccgagcagtacacccagccgcccccagcccagtcccacaggatggacctcatgatcgactgccagccccctgccatgtcctatcggcgggccgaggtcctcgccctgcccttcaaacgccggtacgagaagatcgagatcatgccagagnnnnnnnnnnnnnnnnnnnnnnnnnnnnnnnnnnnnnnnnnnnnnnnnnnnnnnnnnnnnnnnnnnnnnnnnnnnnnnnnnnnnnnnnnnnnnnnnnnnnnnnnnnnnnnnnnnnnnnnnnnnnnnnnnnnnnnnnnnnnnnnnnnnnnnnnnnnnnnnnnnnnnnnnnnnnnnnnnnnnnnnnnnnnnnnnnnnnnnnnnnnnnnnnnnnnnnnnnnnnnnnnnnnnnnggagcagcacggcttcagtgatattaaggtggaggacacagccaagggccatatcgtcctgctccaggaagctgagacgctcatccagattgaagaagactcgacccatatcatctgcgacaatgacgagatgctcagagtgcgactgcgggacctggtcctcaaattcttacagaagttctgagtgggccgcctgagccacttccctgaaatcctgcaggccctcactggctgccctcacaagccacctgacgagtggcatgagaggccgttaaccatgtctttgtggtgtcctctggcttaaggagtgaagaggtggctcttgagggaaatggtctggacttactcccagcactgtttcaggcaagaactttccctttcaacttcaggctaatttcttctcaactctggctctcccgaggagctgaagggtggcagaagtggaacggaagcagttttccaagaggctcatgggagccagggaggcggagatgaccggctggctgtctcacatgggtcccaggcctcgggcaggggagccagcctttggtttcgtttacttgcctacagtgctgcacccaataagatgatcccaaaatatggtaaagtgaacccatctatctgcattttctactctgagcacattggttaataaaaacttatttttatat

SEQ ID NO: 26433 - DNA, 172 bp, Macaca Mulatta
gatgaagaatgccgactacttctccaactatgtcacagaggactttaccacctacattaaccggaagcgaaaaaacaattgccatggcaaccacattgagatgcaggccatggcagagatgtacaaccgtcctgtggaggtgtaccagtacagcacaggtacttctgcagtg

SEQ ID NO: 26434 - DNA, 1560 bp, Macaca Mulatta
  misc_feature (1)...(1560): n = A,T,C or G
aattttattctttcaacttcaagaactttggaaatgcaaactttttgttattaccaactttttgtttctcattactgaagaaaattggaggaaaatcttcacactgaattcttctgttgcctttttcttacagaatgactgaaaatttgaaagaaaaacttataaaagtgcacatatgcaactgtgttctctgttttcctagaaaaccaaaatcaaactgagatttcaagtcctactatggaatacctttctgtttaattcccaaagtgacaccttctcacaggtagtatgttagtaaaattttgcaattcagtggtcacacagctcctggatgaagataacagttggtagaccaaaaagtgaccttgcttagtatattgaaaacacataccacacatcacacacagaactgaatcataccacatgctgcctatgggacttcagttactgtttcctgagttactgtttatccgctggcaatggtgtgatttgtctggatcagatccgcgctgttccccaacccacctccagataatgtgagaaaatagccatgtcagtatgtaggaactctgatggtgctcagatttgtgtgttcaatcaatgggcctaaatcagtaatccttatgcctaaggtaaatctgttcttaacaagggctataccactgcattttgacatgtaccttcagggggttatcnnnnnnnnnnncccgcctgttttaatgagcaaaatccataccaaaacaacaacaacagcgccctcttaaggaaccaccctttggtcaatcatcacatgctgtttaaagcagctgtttacaggatgtgtagtggtatgccccttgtcataaactcttagcatattttttctttggctttgcatggcttttcttcaggtactnnnnnnnnnnnnnnnnnnnnnnnnnnnnnnnnaatggtgacttcatttgtgctaacagtacaacagcagatttggatcaggcttaatctaagtgttaacttttttttcctggtgcttttttggattgatgactgtctcactttgactatatccatgttttgcatgcaatgactcatgcatggttttcttaactagctaatataaacaatttgttccatataaaaatggaattttgcaacatcctttaataaggtgagggaagcatgaacctcagacttctggcactattacatagtaagcacatgaagtagtttgataataaatagcagttctagtacttcacatttcacccgtgtgtgcaatgcctttttnnnnnnnnnnnnnnngagggaaaacctagtagtgaatgtgtagttggggaataaagaaaagcactaaatcctgccctttttgtgtggtttccttttgatacaactaggttattcataatgtatacctagaaaagtgaaattgaaaatgccaaaagatgtatcatttttatttgaattcgtcatgcagtgtacatttcagataatttccttcagtctccagataggagtgtatccaaacatctaattttgtgtgcactgtgtattttatatgaatgttttattttatataccaca

SEQ ID NO: 26435 - DNA, 376 bp, Macaca Mulatta
acctgaagggtaaactgaggcatctcaagactcagatccagaaattcaatgaccaaggagacagcgagggctctgtgtacttctgagtgcccctgcagatgggcagagggctgcatggggatgcaggccccttgcttttcttggtatctcctcagcctttcctcttgcagctccccctaccaggggtagctttctccaggattgcaaatgcctcttcattttggactcggcgctgacagctcctcctccaggaaggccttccaggtcttcctcctctgggccctctagctttgaccctatagggactccagatctcaacctgttccctggaagtagggcctgctctccatcccagtgaaataaacatgtattagac

SEQ ID NO: 26436 - DNA, 936 bp, Macaca Mulatta
  misc_feature (1)...(936): n = A,T,C or G
gaatcatcgttggggacatcgggcccaagatggactttgatcaaatggacaacggcttcctgcggctgaaccatgtgcgggtccccagggagaacatgctgagtcgctttgcacaggnnnnnnnnnnnnnnnnnnnnnnnnnnnnnnnnnnnnnnnnnnnnnnnnnnnnnnnnnnnnnnnnnnnnnnnnnnnnnnnnnnnnnnnnnnnnnnnnnnnnnnnnnnnnnnnnnnnnnnnnnnnnnnnnnnnnnnnnnnnnnnnnnnnnnnnnnnnnnnnnnnnnnnnnnnnnnnnnnnnnnnnnnnnnnnnnnnnnnnnnnnnnnnnnnnnnnnnnnnnnnnnnnnnnnnnnnnnnnnnnnnnnnnnnnnnnnnnnnnnnnnnnnnnnnnnnnnnnnnnnnnnnnnnnnnnnnnnnnnnnnnnnnnnnnnnnnnnnnnnnnnnnnnnnnnnnnnnnnnnnnnnnnnnnnnnnnnnnnnnnnnnnnnnnnnnnnnnnnnnnnnnnnnnnnnnnnnnnnnnnnnnnnnnnnnnnnnnnnnnnnnnnnnnnnnnnnnnnnnnnnnnnnnnnnnnnnnnnnnnnnnnnnnnnnnnnnnnnnnnnnnnnnnnnnnnnnnnnnnnnnnnnnnnnnnnnnnnnnnnnnnnnnnnnnnnnnnnnnnnnnnnnnnnnnnnnnnnnnnnnnnnnnnnnnnnnnnnnnnnnnnnnnnnnnnnnnnnnnnnnnnnnnnnnnnnnnnnnnnnnnnnnnnnnnnnnnnnnnnnnnnnnnnnnnnnnnnnnnnnnnnnnnnnnnnnnnnnnnnnnnnnnnnnnnnnnnnnnnnnnnnnnnnnnnnnnnnnataaaggactcagtgcaccatttacagaccctgacgcaatccggagctgaccagcacgaggcctggaaccagaccactgtcatacacctccaggctgctaaggt

SEQ ID NO: 26437 - DNA, 825 bp, Macaca Mulatta
  misc_feature (1)...(825): n = A,T,C or G
gggatttccttgctgttggttttacactgccttccacattgcaacagcaactcgatttgtcttgtgatgccagaatttgctaagaggaggagttgagcctatagcagcattgtcagtaccgaccagtggttctcaaactttaaaatgcctcagcatcacttgggagcttattgaaatgcagatcccagagtcagtaaatctgcctgtgaagtctgatagtctgcattcgtaatgagcattcaggtgattctgacgcaggggagctgggggcatacagggaggaacactgccctacactatccattgcattttttgcctctaaagagctacagaattttctagggttttaaattatgtaaaatgtttacttattctgagcttagaatggggagggtatttttaaattttattattttgtttctttaaatttttctttgctttaagattataggtattaggtttgtttttgtttgttcnnnnnnnnnnnnnnnnnnncacttatcttgagttcactttgatgttacatctattgctacttcatttgtaaaaccagcccaaaagtttctgggatgaaggtcaaggtttgacctttttaggagttactggtacattaaaaagcttccatcccaagaacccatcccaagtgcaccaggacagcaaaatggcaaaaaatgtacaacaaaggccaccaacttcttcccagaaccgttggggcttccctttttttccctttttcctccaagttgcccaacaccttccctccacccttgaaaaaagccctggcccttaattttttccccaatccccctctcccctttgggggga

SEQ ID NO: 26438 - DNA, 747 bp, Macaca Mulatta
  misc_feature (1)...(747): n = A,T,C or G
ggggaatctgtgtcatctttccaccgcatcttcaatcaacaagtcctcaatcaacaagtcctagtgactgcacctcgtacctcttaaatatctttatcagtccacaagtccttccaatgatatttcccaagtatatctagaacttatccacttatatccccactgctactatattagtttagggctacattctcttgaaaagtacagcgtccttacttccggccaatccccaaatcatcttccagagtaaaatgcaaatcccatcaggccacttggatgaaaacccttcaaggattactggatagagttcaggctttttattttcttcccccaatcatagctcacaaaccttcgttgctatttgttcctaagtaacaaatcatttttcctcctccctccccaaaccccaaagaactctcactcttgctcaagctgttctgtccccttaataccacccctgatacaaactgcctggttaatttccaaaattcttacaagattcagctcaaaagtcaacttctctcatgaatgttttgattccctgaagctacttcattttgctatggctgaaaaatcctagaatttctaaaaaaaaccctggtttgaatcctggttcctgaatatgggactggggaaaaaaaaactggggtcaagacaaattttaatcctcccctgaaggctggttttcctccgntcgggttaaaaggggggaaaaatttaacccggccccttttcccaaaaacaaaa

SEQ ID NO: 26439 - DNA, 966 bp, Macaca Mulatta
gcaagcttctcacactgcctgaggcagggcctggtttctcttccttgaaggcctttgacagatgtcagccttcactggcctccatgcacaacctcccactaccacccattctgcctgccactgcaaagtgcaggcaccctgggcctccctgaggatgcgggcaggggctacagggcatccaggatgtggtcgatcttggtgaccagctcctggcgctttcctgagatgagcttctcattctcaaatgtacgtgttctttcttggagcttgccaggccaccagggcgctaagccttccaccgccgaattcagcaccagctccttgacctgtgcatcccagcttctccatttcgctcactctttcacaaagatcagagccctctgttcttcagcctggactgcagcagtgcaatctcactggtcaaggccttgtgttcggtctccaggctcttcttgccactgttgagggtggagatgtcccgggattgcttgtacctattgacagtctcgtcaaagtgacggtaaaggcctattctcttgttgaccaaggtcaagacctgctctgtgatgcaggctaccttcatcctggcttctgcggccggatccttagtgatggagaagtccagtcgaacatagatgatgacggtgaagaacaggatgtagaaggccgccaccaccagcaggggctcctgcagcatgagcaccttgttgaacgtgtagtggaccacaatgtcctgaatgtgctgttccaccagatttttcttgtaggcaacaatcacagggcggccgaatgtgtccagataggtgtagtgcagctcatctggggcacggctgatttcatagggactatcaatttcaatgttcttggctccttcaggcaggatgatcttcacagtcagagaatctatcacttgttcatcaaacacatggtctacaaacctcatcttcagtgcatactggtcacccc

SEQ ID NO: 26440 - DNA, 597 bp, Macaca Mulatta
  misc_feature (1)...(597): n = A,T,C or G
gcagttggttgtgtgggagcctgatggtgccancggaggacggccaggaccagctccacctgctggggtgcagtgcggggcgcagggcgtccaggtccagctggtgcaggatgacccctccggcgaaggtgtcctgccctcaacccgcggcccagccgccttcctccccttcctcactgtggacctgcccgtctacgtcctccaggaggtgctcccctcatctggaggcccttctggaccggaggccacccagttcccaggaagcactatcaacctgcaggacctgcagtgatggcagccttggcctgggcaggcccaaggccacggtctaggactcaccttccctgagagtcagatgacatgagcctggggagacctcatttggtttccattcagaagaccagcatagcccttttgagacttttgggtacatttatcaaaatgttttccttttgttttaccaggaacgagttcgggctgtactctttgaaactgcctttgtgagcaaagtgctttggcaagacaagggtctccttcagcagggctgggtgcacaacagcccctttccccgtgtcccattgatctgagctgtgtagc

SEQ ID NO: 26441 - DNA, 764 bp, Macaca Mulatta
  misc_feature (1)...(764): n = A,T,C or G
ggnnnnnnnnnnnnnnnnnnnnaagctcaggcattccgcccannnnnnnnnnnnnnnnnnnnnnnnnnnnnnnnnnnnnnnnnnatacccagctggatttttcagattttaagatgtcttgccaggaagggcaggcttagcctcaccgaggtcatattatttataaattatttaccaactgttgaattctcatggtagtattcatcctgtagaatagaatattattaatacctgcagaagcctgggaaagtagaacagtttaattactgttggagttgatcaacatgtctcaaactgttctgccagtgaacaccagtgttcctgaagatgtttatagatttcttagaaaagtatcgtcttaaataaccttaggaaagtttgggtaaaacttaaacaggtttgtttattgtagggtggagnnnnnnnnnnnnnnnnnnnnnnnnnnnnnnntttgctcttgttgcccaggctggcgtgcaatggtgcnnnnnnnnnnnnnnnnnnnnaccgcctcccannnnnnnnnnnnnnnnnnnnnnnnnnnnngannnnnnnnnnnnnnnnnnnnncacggcaccacgcccaactannnnnnnnnnnnnnnnnnnnnnagggtggagtctttaatatactaacagctttaagaatggagttataatatgctatatttcccaaaacttgacatacgaactcatttccaaactttttacaaactcagcaattggggaaatgtttgtattgaggccctattgnaagtttgactc

SEQ ID NO: 26442 - DNA, 1742 bp, Macaca Mulatta
  misc_feature (1)...(1742): n = A,T,C or G
cagatcagaactacgatatcgtcaccatcggggcgccagcagcacactgccaaggttttaagtcaggaggtctccgcaaaaagctgcacaaatttgaagagaccaagaaacaacatcatctggctgccagtccataatctacataccgcaggacgttgtcagagccaaggagatcatcgcccagatcaacaccctgaaaacccaagtcagctactatgcagagcggctgtcaagggcagccaaggacaggtctgccactggccttgagaggacactcgccatcttggcagacaagnnnnnnnnnnnnnnnnnnnnnnnnnnnnnnnnnnnnnnnnnnnnnnnnnnnnnnnnnnnnnnnnnnnnnnnnnnnnnnnnnnnnnnnnnnnnnnnnnnnnnnnnnnnnnnnnnnnnnnnnnnnnnnnnnnnnnnnnnnnnnnnnnnnnnnnnnnnnnnnnnnnnnnnnnnnnnnnnnnnnnnnnnnnnnnnnnnnnnnnnnnnnnnnnnnnnnnnnnnnnnnnnnnnnnnnnnnnnnnnnnnnnnnnnnnnnnnnnnnnnnnnnnnnnnnnnnnnnnnnnnnnnnnnnnnnnnnnnnnnnnnnnnnnnnnnnnnnnnnnnnnnnnnnnnnnnnnnnnnnnnnnnnnnnnnnnnnnnnnnnnnnnnnnnnnnnnnnnnnnnnnnnnnnnnnnnnnnnnnnnnnnnnnnnnnnnnnnnnnnnnnnnnnnnnnnnnnnnnnnnnnnnnnnnnnnnnnnnnnnnnnnnnnnnnnnnnnnnnnnnnnnnnnnnnnnnnnnnnnnnnnnnnnnnnnnnnnnnnnnnnnnnnnnnnnnnnnnnnnnnnnnnnnnnnnnnnnnnnnnnnnnnnnnnnnnnnnnnnnnnnnnnnnnnnnnnnnnnnnnnnnnnnnnnnnnnnnnnnnnnnnnnnnnnnnnnnnnnnnnnnnnnnnnnnnnnnnnnnnnnnnnnnnnnnnnnnnnnnnnnnnnnnnngggaggagctggcaatgctggaggacatgagccttgggatcatggacttgaggaacgtgaccttcaaagtcactcaggccacttccagcgcctccgcagacatgctgcccgtcatcacaggaaatcgngcgacgggtttaacgtgcgggtccctctgccgnnnnnnnnnnnnnnnnnnnnnnnnnnnnnnnnnnnnnnnnnnnnnnnnnnnnnnnnnnnnnnnnnnnnnnnnnnnnnnnnnnnnnnnnnnnnnnnnnnnnnnnnnnnnnnnnnnnnnnnnnnnnnnnnnnnnnnnnnnnnnnnnnnnnnnnnnnnnnnnnnnnnnnnnnnnnnnnnnnnnnnnnnnnnnnnnnnnnnnnnnnnnnnnnnnnnnnnnnnnnnnnnnnnnnnnnnnnnnnnnnnnnnnnnnnnnnnnnnnnnnnnnnnnnnnnnnnnnnnnnnnnnnnnnnnnnnnnnnnnnnnnnnnnnnnnnnnnnnnnnnnnnnnnnnnnnnnnnnnnnnnnnnnnnnnnnnnnnnnnnnnnnnnnnnnnnnnnnnnnnnnnnnnnnnnnnnnnnnnnnnnnnnnnnnnnnnnnnnnnnnnnnnnnnnnnnnnnnnnnnnnnnnnnnnnnnnnnnnnnnnnnnnnnnnnnnnagcattggaacacgggaggnagtcacccagaagaacttgagcggcctggtgcccatccgagacttaaggctagaccccagcctcctctgctccattcctttattgactctgagccccaatttactga

SEQ ID NO: 26443 - DNA, 117 bp, Macaca Mulatta
gttccggaactttaagatcatctaccgccgctatgctggcctctacttctgcatctgtgtggatgtcaatgacaacaacctggcttacctggaggccattcacaacttcgtggaggt

SEQ ID NO: 26444 - DNA, 2107 bp, Macaca Mulatta
  misc_feature (1)...(2107): n = A,T,C or G
catggctgcttgctaatcccatagtccagaggaagcatccccaggactgcaggcaagggagccgggcaagccgcgggcagccttgaaccctccgcttgcctgccctccccggtgggggccaggatgctgaagaagacagtctgcagggcttgtgctgtggggcgctatcctctttgnnnnnnnnnnnnnnnnnnnnnnnnnnnnnnnnnnnnnnnnnnnnnnnnnnnnnnnnnnnnnnnnnnnnnnnnnnnnnnnnnnnnnnnnnnnnnnnnnnnnnnnnnnnnnnnnnnnnnnnnnnnnnnnnnnnnnnnnnnnnnnnnnnnnnnnnnnnnnnnnnnnnnnnnnnnnnnnnnnnnnnnnnnnnnnnnnnnnnnnnnnnnnnnnnnnnnnnnnnnnnnnnnnnnnnnnnnnnnnnnnnnnnnnnnnnnnnnnnnnnnnnnnnnnnnnnnnnnnnnnnnnnnnnnnnnnnnnnnnnnnnnnnnnnnnnnnnnnnnnnnnnnnnnnnnnnnnnnnnnnnnnnnnnnnnnnnnnnnnnnnnnnnnnnnnnnnnnnnnnnnnnnnnnnnnnnnnnnnnnnnnnnnnnnnnnnnnnnnnnnnnnnnnnnnnnnnnnnnnnnnnnnnnnnnnnnnnnnnnnnnnnnnnnnnnnnnnnnnnnnnnnnnnnnnnnnnnnnnnnnnnnnnnnnnnnnnnnnnnnnnnnnnnnnnnnnnnnnnnnnnnnnnnnnnnnnnnnnnnnnnnnnnnnnnnnnnnnnnnnnnnnnnnnnnnnnnnnnnnnnnnnnnnnnnnnnnnnnnnnnnnnnnnnnnnnnnnnnnnnnnnnnnnnnnnnnnnnnnnnnnnnnnnnnnnnnnnnnnnnnnnnnnnnnnnnnnnnnnnnnnnnnnnnnnnnnnnnnnnnnnnnnnnnnnnnnnnnnnnnnnnnnnnnnnnnnnnnnnnnnnnnnnnnnnnnnnnnnnnnnnnnnnnnnnnnnnnnnnnnnnnnnnnnnnnnnnnnnnnnnnnnnnnnnnnnnnnnnnnnnnnnnnnnnnnnnnnnnnnnnnnnnnnnnnnnnnnnnnnnnnnnnnnnnnnnnnnnnnnnnnnnnnnnnnnnnnnnnnnnnnnnnnnnnnnnnnnnnnnnnnnnnnnnnnnnnnnnnnnnnnnnnnnnnnnnnnnnnnnnnnnnnnnnnnnnnnnnnnnnnnnnnnnnnnnnnnnnnnnnnnnnnnnnnnnnnnnnnnnnnnnnnnnnnnnnnnnnnnnnnnnnnnnnnnnnnnnnnnnnnnnnnnnnnnnnnnnnnnnnnnnnnnnnnnnnnnnnnnnnnnnnnnnnnnnnnnnnnnnnnnnnnnnnnnnnnnnnnnnnnnnnnnnnnnnnnnnnnnnnnnnnnnnnnnnnnnnnnnnnnnnnnnnnnnnnnnnnnnnnnnnnnnnnnnnnnnnnnnnnnnnnnnnnnnnnnnnnnnnnnnnnnnnnnnnnnnnnnnnnnnnnnnnnnnnnnnnnnnnnnnnnnnnnnnnnnnnnnnnnnnnnnnnnnnnnnnnnnnnnnnnnnnnnnnnnnnnnnnnnnnnnnnnnnnnnnnnnnnnnnnnnnnnnnnnnnnnnnnnnnnnnnnnnnnnnnnnnnnnnnnnnnnnnnnnnnnnnnnnnnnnnnnnnnnnnnnnnnnnnnnnnnnnnnnnnnnnnnnnnnnnnnnnnnnnnnnnnnnnnnnnnnnnnnnnnnnnnnnnnnnnnnnnnnnnnnnnnnnnnnnnnnnnnnnnnnnnnnnnnnnnnnnnnnnnnnnnnnnnnnnnnnnnnnnnnnnnnnnnnnnnnnnnnnnnnnnnnnnnnnnnnnnnnnnnnnnnnnnnnnnnnnnnnnnnnnnnnnnnnnnnnnnnnnnnnnnnnnnnnnnnnnnnnnnnnnnnnnnnnnnnnnnnnnnnnnnnnnnnnnnnnnnnnnnnnnnnnnnnnnnnnnnnnnnnnnnnnnnnnnnnnnnnnnnnnnnnnnnnnnnnnnnnnnnnnnnnnnnnnnnnnnnnnnnnnnnncctcacaggccaggatgccatggcagggtggagaggacttggtggatttttgcttcttgcctgacctcagtttcatgaaagaaagtggaagctacagaattattttctaaaataaag

SEQ ID NO: 26445 - DNA, 151 bp, Macaca Mulatta
acgtgggcctggactgctgggcgggaaaccctagcgagcgtcgtggcaggtgggcggtgatgaagaaagggaggaagcccccgcttgagggtagacgccacggccttcgctcccgcgtgttggggccctgccttactgcgcttggaaactc

SEQ ID NO: 26446 - DNA, 170 bp, Macaca Mulatta
aatcttgcttgaagactgacaagatgtccctgtggactcccaaacatactccagaggggaggggtccttaacgccaagattttaaaagctccagtttcagagcgagagtcgaaaactcacgcttaaagttatagtaatttcagggttctgaaaagacgcggaacatgaag

SEQ ID NO: 26447 - DNA, 541 bp, Macaca Mulatta
tcctctgtggaagatgcccaggccaccatgggagctgtacaagttggttgaagtcgagtgggaagagcacctagcccagaatccccctaaagactagtgacagtggggatgctggtgatatggggaggcagaggcagcgcccaggagaaacagggcagcggaccaatggacagctccaccagctccacatctttggaagctagatttgtggggagagaaaaactctaccccagacttaatacccattgaaatttcaccttaggtgttgtgtcctatgtctggttaagtgtcccatggaagggggaggccttcacgtcagaacccagccctataccgtttacttcttaaatggtgctaaccacaggtgtcccagcgtgctctgtgccagttaagatttttaactttcaaggggcagggcatactgggaaatgtagtttcccaaactgccttatcacttgggtggacatatgtctccttttatgccttttggtttgagtaattaacagcatcctcttccacactcagaagtgttctggttggg

SEQ ID NO: 26448 - DNA, 2731 bp, Macaca Mulatta
  misc_feature (1)...(2731): n = A,T,C or G
agacacggcgaacaaggccctgctggcgctgttcacggcagagatgctcctgaagatgtacagcctgggcctgcaggcctacttcgtgtccctcttcaaccgctttgactgcttcgtcgtgtgtggcggcatcctggagaccatcctggtagagaccaagatcatgtccccactgggcatctccgtgctccgatgcgtccggttgctgaggatattcaagatcacgaggtaccgggcatctcctctcactttggagaggggactcagggagaagttcttccagagggcaagggaggtggcaaggcctgggtgggagcagggctgttcttcctcaaagggtgtctctgaannnnnnnnnnnnnnnnnnnnnnnnnnnnnnnnnnnnnnnnnnnnnnnnnnnnnnnnnnnnnnnnnnnnnnnnnnnnnnnnnnnnnnnnnnnnnnnnnnnnnnnnnnnnnnnnnnnnnnnnnnnnnnnnnnnnnnnnnnnnnnnnnnnnnnnnnnnnnnnnnnnnnnnnnnnnnnnnnnnnnnnnnnnnnnnnnnnnnnnnnnnnnnnnnnnnnnnnnnnnnnnnnnnnnnnnnnnnnnnnnnnnnnnnnnnnnnnnnnnnnnnnnnnnnnnnnnnnnnnnnnnnnnnnnnnnnnnnnnnnnnnnnnnnnnnnnnnnnnnnnnnnnnnnnnnnnnnnnnnnnnnnnnnnnnnnnnnnnnnnnnnnnnnnnnnnnnnnnnnnnnnnnnnnnnnnnnnnnnnnnnnnnnnnnnnnnnnnnnnnnnnnnnnnnnnnnnnnnnnnnnnnnnnnnnnnnnnnnnnnnnnnnnnnnnnnnnnnnnnnnnnnnnnnnnnnnnnnnnnnnnnnnnnnnnnnnnnnnnnnnnnnnnnnnnnnnnnnnnnnnnnnnnnnnnnnnnnnnnnnnnnnnnnnnnnnnnnnnnnnnnnnnnnnnnnnnnnnnnnnnnnnnnnnnnnnnnnnnnnnnnnnnnnnnnnnnnnnnnnnnnnnnnnnnnnnnnnnnnnnnnnnnnnnnnnnnnnnnnnnnnnnnnnnnnnnnnnnnnnnnnnnnnnnnnnnnnnnnnnnnnnnnnnnnnnnnnnnnnnnnnnnnnnnnnnnnnnnnnnnnnnnnnnnnnnnnnnnnnnnnnnnnnnnnnnnnnnnnnnnnnnnnnnnnnnnnnnnnnnnnnnnnnnnnnnnnnnnnnnnnnnnnnnnnnnnnnnnnnnnnnnnnnnnnnnnnnnnnnnnnnnnnnnnnnnnnnnnnnnnnnnnnnnnnnnnnnnnnnnnnnnnnnnnnnnnnnnnnnnnnnnnnnnnnnnnnnnnnnnnnnnnnnnnnnnnnnnnnnnnnnnnnnnnnnnnnnnnnnnnnnnnnnnnnnnnnnnnnnnnnnnnnnnnnnnnnnnnnnnnnnnnnnnnnnnnnnnnnnnnnnnnnnnnnnnnnnnnnnnnnnnnnnnnnnnnnnnnnnnnnnnnnnnnnnnnnnnnnnnnnnnnnnnnnnnnnnnnnnnnnnnnnnnnnnnnnnnnnnnnnnnnnnnnnnnnnnnnnnnnnnnnnnnnnnnnnnnnnnnnnnnnnnnnnnnnnnnnnnnnnnnnnnnnnnnnnnnnnnnnnnnnnnnnnnnnnnnnnnnnnnnnnnnnnnnnnnnnnnnnnnnnnnnnnnnnnnnnnnnnnnnnnnnnnnnnnnnnnnnnnnnnnnnnnnnnnnnnnnnnnnnnnnnnnnnnnnnnnnnnnnnnnnnnnnnnnnnnnnnnnnnnnnnnnnnnnnnnnnnnnnnnnnnnnnnnnnnnnnnnnnnnnnnnnnnnnnnnnnnnnnnnnnnnnnnnnnnnnnnnnnnnnnnnnnnnnnnnnnnnnnnnnnnnnnnnnnnnnnnnnnnnnnnnnnnnnnnnnnnnnnnnnnnnnnnnnnnnnnnnnnnnnnnnnnnnnnnnnnnnnnnnnnnnnnnnnnnnnnnnnnnnnnnnnnnnnnnnnnnnnnnnnnnnnnnnnnnnnnnnnnnnnnnnnnnnnnnnnnnnnnnnnnnnnnnnnnnnnnnnnnnnnnnnnnnnnnnnnnnnnnnnnnnnnnnnnnnnnnnnnnnnnnnnnnnnnnnnnnnnnnnnnnnnnnnnnnnnnnnnnnnnnnnnnnnnnnnnnnnnnnnnnnnnnnnnnnnnnnnnnnnnnnnnnnnnnnnnnnnnnnnnnnnnnnnnnnnnnnnnnnnnnnnnnnnnnnnnnnnnnnnnnnnnnnnnnnnnnnnnnnnnnnnnnnnnnnnnnnnnnnnnnnnnnnnnnnnnnnnnnnnnnnnnnnnnnnnnnnnnnnnnnnnnnnnnnnnnnnnnnnnnnnnnnnnnnnnnnnnnnnnnnnnnnnnnnnnnnnnnnnnnnnnnnnnnnnnnnnnnnnnnnnnnnnnnnnnnnnnnnnnnnnnnnnnnnnnnnnnnnnnnnnnnnnnnnnnnnnnnnnnnnnnnnnnnnnnnnnnnnnnnnnnnnnnnnnnnnnnnnnnnnnnnnnnnnnnnnnnnnnnnnnnnnnnnnnnnnnnnnnnnnnnnnnnnnnnnnnnnnnnnnnnnnnnnnnnnnnnnnnnnnnnnnnnnnnnnnnnnnnnnnnnnnnnnnnnnnnnnnnnnnnnnnnnnnnnnnnnnnnnnnnnnnnnnnnnnnnnnnnnnnnnnnnnnnnnnnnnnnnnnngggtcgtatcaaacacctggatgtggtgaccctcctccggcggattcagcccccactaggttttgggaagctgtgccctcaccgagtggcttgcaaa

SEQ ID NO: 26449 - DNA, 619 bp, Macaca Mulatta
aacactgaagggaaaaagtacattaagggaattatttttacttgggtttgtttcttataatcttaatgaacattaaataattctccaaatttaggtagtaatgcatccattttcacattggcagatttcctccattggctatatcatagagtttaatagcaggctgtccttaattcatatgttcatgcccccacttcctcctgcctcttaaaacgaaaaaagtgggactagctactttaaaagttattttataattttcctgctttcaggtcacccctggctcgacttgtgctgtctttggcctaggaggtgtgggtctttctgctgtaatgggttgtaaagctgcaggagcttccagaatcataggtattgacatcaacagtgagaagtttgcaaaggctaaagccctgggagccactgattgcctcaatcctagaaacctgcataaacccatccaggaggttatcattgaattgaccaagggaggtgtggattttgctcttgactgtgcaggtggatctgaaaccatggtatgtatatttttttcttggtttatgttttcaatttattctttggctgttaaataataggggaaagtggattatgtttattatggtaa

SEQ ID NO: 26450 - DNA, 134 bp, Macaca Mulatta
tcctctccttccccaaggacctccccccatttctggcagccaagccattaatctggagacagaaatgggtttgctatcgattctctggccactttttctttcattataatttgtactgtggttcttctcaccct

SEQ ID NO: 26451 - DNA, 106 bp, Macaca Mulatta
gtggaagaacgcattcagtgctgtcagacccggaaagtccgctacacagagagggtggattacctgatgcagttacctgtggccatggaggcggcaaccaacaagg

SEQ ID NO: 26452 - DNA, 815 bp, Macaca Mulatta
gggagttgcttcagcgtcttggtgctgctgtgccgtggaacgtttgcagccttttagccaagatgcctgaggaaacgcagacccaggaccaaccgatggaggaggaggaggttgagacgttcgcctttcaggcagaaattgcccagttgatgtcattgattatcaatactttttattcgaacaaagagatctttctaagagagctaatttcaaattcatcagatgcattggacaaaatccgctatgagagcttgacggatcccagtaaattatactctgggaaagagctgcatattaacctgataccaaataaacaagatcgaaccctcactattgtggatactggaattgggatgaccaaggctgacttgatcaataaccttggtactatcgccaagtctgggaccaaagcgttcatggaagctttgcaggctggtgcagatatctccatgattggccagttcggtgttggtttttattctgcttatttggttgctgagaaagtaactgtgatcaccaaacataacgatgatgagcagtacgcctgggagtcctcagcagggggatcatttactgtgaggacagacacaggtgaacctatgggtcgtgggacaaagtttatcctacaccctgtaaagaagacaaaacttgattactttggagggaacgaatgaataaagggagattggtgtaaaatacctttcctccagttgatttgagaatatccccattaacctccttttttggtgggaagaacagaaaccgttggaataaaaagaaagttccagcccgaatttcattggaagggccttgat

SEQ ID NO: 26453 - DNA, 146 bp, Macaca Mulatta
ggctctgtggctctgggccactccctcctggtgcagttgggagcccagcttctctccaatctgtgcccagacctgttgcgggcattgtggaggctgacaggcttattgagtttaatacccctgggaacttgctaggccttcagtgc

SEQ ID NO: 26454 - DNA, 586 bp, Macaca Mulatta
  misc_feature (1)...(586): n = A,T,C or G
gggactacgcatgtgtgtcaactctagggttgggtgctggggttgcggctttcggttaacaccgcagactggaacagcctgagatctgctggagacaacttaggaaattgtcatagtgaaaatactagcatggattgttgatcatctgatgctatgattctttcccaggcaccacacctgtttgtgttcagatggagcagcacactagtcatcctaacagaaaaagttcagcccaagaggaaagcttatgctgtgcctctttgtagaagcaaaaccctcccccagctatattaatcttcaagcaagttcccccaccgccccctttttggaacatccgaaaaaaaaactgcccccattgaatccaacccccagaaaagcctagaccccggaaagttttttgcccaaccccgttttaaacccannnnnnnnnnnnnnnnnnnnnnntggaaattttaggggtcctggaaaaatgggtccnnnnnnnnnnnnnnnnnnnnnnnnnnnnnnnnnnccnnnnnnnnnnnnnnnnnnnnnnnnnnaaaaatgtggggnnnnnnnnnnnnnnnnnnnnnnatttatctataca

SEQ ID NO: 26455 - DNA, 240 bp, Macaca Mulatta
  misc_feature (1)...(240): n = A,T,C or G
acatgtaatggtcagttgcgtaatgtatttatatgttaatttgttgtgtatatagatatgcaagtcttgtcagaattggcctcagtgtagttaaagggcggaaggggaagatactgactagtcatagaaatacctcattcgcctgtgggaagagcaagggaagcctcttcagggnntgagtgagtggcaaagcagttgcttcctggctcctccttcccctngtggtcttgcgaagtgtgg

SEQ ID NO: 26456 - DNA, 1002 bp, Macaca Mulatta
  misc_feature (1)...(1002): n = A,T,C or G
tcggcacgagcggaagcttatggacgccgtgccgttactcgtagtcaggcggcggcgcaggcggcggcggcggcacagcgcacagcgcgccttnnnnnnnnnnnnnnnnnnnnggggattccagcggcggacagcacccgggccgagatgtctccctcagtggccttagccgtgctggcgctactctctctttctggcctggaggctatccagcgtactccaaagattcaggtttactcacgccatccaccagagaatggaaagccaaatttcctgaattgctatgtgtctggatttcatccatctgatattgaagttgacttactgaagaatggagagaaaatgggaaaagtggagcattcagacttgtctttcagcaaagactggtctttctatctcttgtactacactgaattcacccccaatgaaaaagatgagtatgcctgccgtgtgaaccatgtgactttgtcagggcccaggacagttaagtgggatcgagacatgtaagcagcatcatggaggtttgaagatgccgcatttggattggatgaattccaaattctgcttccttgctttttaatattgatatgcttatacagtttatgcaaaaaatgcagagttataataatgttaacacaggcatgatcttctttataattctactttgagtgctatctccaccgtttgaggtatctgggcagctagcctttagggagggctgggcaacttaaaaggtgggggaagcagaagaaattcctcattatcccaacattcaacaatcttggggtcaagaatctggagcttccttcaatcctctttgcccctcgaaagccttggataaaaaaaagtttattgcgctatatataaggtttaagacttcccaaagtttaacattacctggctgggcttttaaaaattccgggaggcggaaaaaaatctttcgccaaaaatattaaatgtgggcattggggggtttcatattgggggacaattttctttttt

SEQ ID NO: 26457 - DNA, 120 bp, Macaca Mulatta
ggccaggctctcctgccgtagcctagaatgactcatcgtgcaaacatatctgtttaatgggtttgaacactgaatcactcatgaatgaaggctgtgtgtatctaaaggaaatctccaagg

SEQ ID NO: 26458 - DNA, 261 bp, Macaca Mulatta
  misc_feature (1)...(261): n = A,T,C or G
agccattgattcttcagaactttctgcagtttttgacttcatagattatgcnnnnnnnnnnnnnnnnnnntattgcataacagcagatgccaaaaacaaaaaaagcatctcactgcaagtcacataaaaatgcaacgctgtaatatggctgtatcagagggctttgaaaacatacactgagctgcttctgcgctgttgttgtccgtatttaaacaacagctcccctgtattcccccatctagccatttcggaagacaccga

SEQ ID NO: 26459 - DNA, 709 bp, Macaca Mulatta
ctgttctgttggtggtcatggcttatgaccactttgttgccatctgcaaccctgtccagtacaccatgatcctcactaataaaaccatcagtatcctagcttctgtggttgttggaagaaatttagttcttgtaaccccatttgtgttactcattctgcatctgccattctgtgggcataacatcatacctcacacatactgtgagcacatgggtctggcccggttggcctgtggacctatcaagatcaacataatctatgggctcatggtgatttcttatattattgtggatgtgatcctaatttcttcttcctatgtgcttatccttcgagctgtttttcgccttctttctcaagatgtccgactgaaggccttccatacctgtggttctcatgtctgtgttatgctgtgcttttacataccagcattttgttcttttatgacacatcgttttggccaaaacgttccccgctatacccatattcttttggctaacctgtatgtggttgtcccacctgaccttaacccagtcatttatggagtcaggaccaagcagatccgagagcaagttgtgaaaatatttgtacagaaagaataattatgcaatacagtttggataaatatatctatataccacccaaattatgatcatctgagcttcctttttaatcttctgtaactgttggtcatgcttgtcagattttttca

SEQ ID NO: 26460 - DNA, 1339 bp, Macaca Mulatta
  misc_feature (1)...(1339): n = A,T,C or G
ggcctgggaaccgcacgaggctggcggaggtgaggggcggcggcaccgggctgcggcgcgggcggtccctcctccccgacccgccggctctagccgtgcgggaagcgggaccgggacatacacaggctgcgaccccccgagggagagagaggggccagggccggccggaagctcccggacaccnnnnnnnnccagtcactgaggggtctacagtccagcttattgtcccctggaatgcagcggacgttcattcccatgggcacaaagacagccagacttgtattagggtcnnnnnnnnnnnnnnnnnnnnnnnnnnnnnnnnnnnnnnnnnnnnnnnnnnnnnnnnnnnnnnnnnnnnnnnnnnnnnnnnnnnnnnnnnnnnnnnnnnnnnnnnnnnnnnnnnnnnnnnnnnnnnnnnnnnnnnnnnnnnnnnnnnnnnnnnnnnnnnnnnnnnnnnnnnnnnnnnnnnnnnnnnnnnnnnnnnnnnnnnnnnnnnnnnnnnnnnnnnnnnnnnnnnnnnnnnnnnnnnnnnnnnnnnnnnnnnnnnnnnnnnnnnnnnnnnnnnnnnnnnnnnnnnnnnnnnnnnnnnnnnnnnnnnnnnnnnnnnnnnnnnnnnnnnnnnnnnnnnnnnnnnnnnnnnnnnnnnnnnnnnnnnnnnnnnnnnnnnnnnnnnnnnnnnnnnnnnnnnnnnnnnnnnnnnnnnnnnnnnnnnnnnnnnnnnnnnnnnnnnnnnnnnnnnnnnnnnnnnnnnnnnnnnnnnnnnnnnnnnnnnnnnnnnnnnnnnnnnnnnnnnnnnnnnnnnnnnnnnnnnnnnnnnnnnnnnnnnnnnnnnnnnnnnnnnnnnnnnnnnnnnnnnnnnnnnnnnnnnnnnnnnnnnnnnnnnnnnnnnnnnnnnnnnnnnnnnnnnnnnnnnnnnnnnnnnnnnnnnnnnnnnnnnnnnnnnnnnnnnnnnnnnnnnnnnnnnnnnnnnnnnnnnnnnnnnnnnnnnnnnnnnnnnnnnnnnnnnnnnnnnnnnnnnnnnnnnnnnnnnnnnnnnnnnnnnnnnnnnnnnnnnnnnnnnnnnnnnnnnnnnnnnnnnnnnnnnnnnnnnnnnnnnnnnnnnnnnnnnnnnnnnnnnnnnnnnnnnnnnnnnnnnnnnnnnnnnnnnnnnnnnnnnnnnnnnnnnnnnnnnnnnnnnnnnnnnnnnnnnnnnnnnnnnnnnnnnnnnnnnnnnnnnnnnnnnnnnnnnnnnnnnnnnnnnnnnnnnnnnnnnnnnnnnggcactgaggacaaggacaccttgggcctccttgaggagtggcagctcctagcccgcaatgctacggacatgcctgaccaa

SEQ ID NO: 26461 - DNA, 921 bp, Macaca Mulatta
gcccgtactgcacggaagagccggagagccccaaagagaagcagcgcagcctccccgcctcccaccggggcagcgccgaggctgggggcgaggtgcagacctccaagaagtcctacgtgtgtccgaactgtgggaaaatcttccgctggagggtcaacttcatccgacacctgcgaagccgcagggagcaggagaagccgcacgagtgctcagtgtgcggggagctattcagtgacagcgaggacctggatgggcacctggagagccacgaggcccagaagccttaccggtgtggtgcctgcgggaagagcttccgactcaactcccacctgctctcccaccggcggatacacctgcagccggacagactccagccggtggagaagagagagcaggaggcgtccgaggacgcggacgagggtcccaaagagccgctggaaaatggcaaggccaagctgagcttccaatgctgtgactgtgggaaggccttccagcggcacgaccacctggctcggcaccgcagccactttcacctgaaggacaaagcccggcccttccagtgccggtattgcgtcaagagcttctcgcagaactatgacctcctccgccacgagcgcctacacatgaagcgccgttccaagcaggctctgaactcctactgagcctgcccacctggggcggcctcaccctggccggtgctgccccctcacattggtactgatcagcgcccccacccaggacgccccttccccaggatagagagcacacctccctcctgtccttgctctcaggtagtgagccttcgggtggtgccgtgggagcactctccctcccccgggcattgaaagagtggccaagtgagtgttctgtttctgctgtgccaaaaaacgggggggatgtgccaccaccaggttggacatg

SEQ ID NO: 26462 - DNA, 463 bp, Macaca Mulatta
gcacctactatctgcagcccgagaggcgatgggttgctggacaactgtccttaacgttgccgtcactcaggttcatgactgacagcactggagagattctggtcagcttccccctctccagcatagttgagatcaagaaggagacttctcattttatcttcagctccatcaccatcctggagaagggccatgccaagcactggttcagctccctgcggccaagtcgaaatgtggtcttcagcatcattgagcatttctggagggagctgctgctgtctcagcctggagctgtggcagacgtgtctggccccaggacccggggcaaggagctgacgggactcatggccggatcccagaaacgcctggaggacacggcgagggtcctgcaccaccagggccagcagctggacagcgtcatgagaggcctggacaagatggagtcagacctagaggtggcggacag

SEQ ID NO: 26463 - DNA, 822 bp, Macaca Mulatta
  misc_feature (1)...(822): n = A,T,C or G
ggattcggtgagcacctgaaaactcatgccagcatgatcatatttgagcctgcaaatgcctttggggagtgctcaggctacatcgaacatgccagcaccagcacaggtggtgccaatcaagctgatgagaagtacttcaaatgtgacgtctgtgggcagctctttagtgaccgcctgtccctcgccagacaccagaatacccacactggctgagggcatggggtaaaggttagaaaaccttcacctaggacttgacccttaccaaaccacagagaattcaaaccaatccatgataatgtcagtaggagacttaaccttagtgtgttacacacctgacttaacatctccaaactcatattgaaaagagaatgaatgtggagattccagtcttaagctttccccttcagatgacagtgtctgcatgtgggaaagccacagcacacatcttacctttccaagtaaccagattgagaaaaccctatgagtattccgtactacaaaggttgcccaaaccaactgtaaatgacacttgtgtaatgtatatatagtgtttcctgaggtgtatataaaatagcaaattatggcagaacagtgatcacatagatttggatttaatatgatatacagttacagtttacagaggtaccttacctggtactctnnnnnnnnnnnnnnnnnnnnnngaggaaaagagcaacaaatttgaatatatttgtaagtgtcttagatcccaaagaaagatttattgggcattatttgaaacctgtcagtatcttttttcgagtaaatggtttggtttcttaacccttgaaaagtcttgtg

SEQ ID NO: 26464 - DNA, 281 bp, Macaca Mulatta
  misc_feature (1)...(281): n = A,T,C or G
tctggccctgagcgcaccattcccatcacccgtgaagagaagcctgctgtcaccgcagcccccaagaaatagatgccctttcttgaattgcattttntaaaacaagaaagtttccccgccagtgaatgaaagtcttgtgactagtgctgaagcttattaatgctaagggcaggcccaaattatcaagctaataaaatatcattcagcaacagataactgtcttgtgtttgaatattccacacacttttaaataaatgtacggataccacagatctatttat

SEQ ID NO: 26465 - DNA, 2331 bp, Macaca Mulatta
  misc_feature (1)...(2331): n = A,T,C or G
agacccaccgtgtggaggtcgtttgaattccaaagatgctggctatatcacctctcccggttacccccaggactacccctcccaccagaactgcgagtggattgtttacgcccccgaacccaaccagaagattgtcctcaacttcaaccctcactttgaaatcgagaagcatgactgcaagtannnnnnnnnnnnnnnnnnnnnnnnnnnnnnnnnnnnnnnnnnnnnnnnnnnnnnnnnnnnnnnnnnnnnnnnnnnnnnnnnnnnnnnnnnnnnnnnnnnnnnnnnnnnnnnnnnnnnnnnnnnnnnnnnnnnnnnnnnnnnnnnnnnnnnnnnnnnnnnnnnnnnnnnnnnnnnnnnnnnnnnnnnnnnnnnnnnnnnnnnnnnnnnnnnnnnnnnnnnnnnnnnnnnnnnnnnnnnnnnnnnnnnnnnnnnnnnnnnnnnnnnnnnnnnnnnnnnnnnnnnnnnnnnnnnnnnnnnnnnnnnnnnnnnnnnnnnnnnnnnnnnnnnnnnnnnnnnnnnnnnnnnnnnnnnnnnnnnnnnnnnnnnnnnnnnnnnnnnnnnnnnnnnnnnnnnnnnnnnnnnnnnnnnnnnnnnnnnnnnnnnnnnnnnnnnnnnnnnnnnnnnnnnnnnnnnnnnnnnnnnnnnnnnnnnnnnnnnnnnnnnnnnnnnnnnnnnnnnnnnnnnnnnnnnnnnnnnnnnnnnnnnnnnnnnnnnnnnnnnnnnnnnnnnnnnnnnnnnnnnnnnnnnnnnnnnnnnnnnnnnnnnnnnnnnnnnnnnnnnnnnnnnnnnnnnnnnnnnnnnnnnnnnnnnnnnnnnnnnnnnnnnnnnnnnnnnnnnnnnnnnnnnnnnnnnnnnnnnnnnnnnnnnnnnnnnnnnnnnnnnnnnnnnnnnnnnnnnnnnnnnnnnnnnnnnnnnnnnnnnnnnnnnnnnnnnnnnnnnnnnnnnnnnnnnnnnnnnnnnnnnnnnnnnnnnnnnnnnnnnnnnnnnnnnnnnnnnnnnnnnnnnnnnnnnnnnnnnnnnnnnnnnnnnnnnnnnnnnnnnnnnnnnnnnnnnnnnnnnnnnnnnnnnnnnnnnnnnnnnnnnnnnnnnnnnnnnnnnnnnnnnnnnnnnnnnnnnnnnnnnnnnnnnnnnnnnnnnnnnnnnnnnnnnnnnnnnnnnnnnnnnnnnnnnnnnnnnnnnnnnnnnnnnnnnnnnnnnnnnnnnnnnnnnnnnnnnnnnnnnnnnnnnnnnnnnnnnnnnnnnnnnnnnnnnnnnnnnnnnnnnnnnnnnnnnnnnnnnnnnnnnnnnnnnnnnnnnnnnnnnnnnnnnnnnnnnnnnnnnnnnnnnnnnnnnnnnnnnnnnnnnnnnnnnnnnnnnnnnnnnnnnnnnnnnnnnnnnnnnnnnnnnnnnnnnnnnnnnnnnnnnnnnnnnnnnnnnnnnnnnnnnnnnnnnnnnnnnnnnnnnnnnnnnnnnnnnnnnnnnnnnnnnnnnnnnnnnnnnnnnnnnnnnnnnnnnnnnnnnnnnnnnnnnnnnnnnnnnnnnnnnnnnnnnnnnnnnnnnnnnnnnnnnnnnnnnnnnnnnnnnnnagctgtttgaagggaacatgcactatgacacccctgacatccgaaggttcgaccccgttccggcgcagtatgtgcgggtatacccggagaggtggtcgccggcggggattgggatgcggctggaggtgctgggctgtgactggacannnnnnnnnnnnnnnnnnnnnnnnnnnnnnnnnnnnnnnnnnnnnnnnnnnnnnnnnnnnnnnnnnnnnnnnnnnnnnnnnnnnnnnnnnnnnnnnnnnnnnnnnnnnnnnnnnnnnnnnnnnnnnnnnnnnnnnnnnnnnnnnnnnnnnnnnnnnnnnnnnnnnnnnnnnnnnnnnnnnnnnnnnnnnnnnnnnnnnnnnnnnnnnnnnnnnnnnnnnnnnnnnnnnnnnnnnnnnnnnnnnnnnnnnnnnnnnnnnnnnnnnnnnnnnnnnnnnnnnnnnnnnnnnnnnnnnnnnnnnnnnnnnnnnnnnnnnnnnnnnnnnnnnnnnnnnnnnnnnnnnnnnnnnnnnnnnnnnnnnnnnnnnnnnnnnnnnnnnnnnnnnnnnnnnnnnnnnnnnnnnnnnnnnnnnnnnnnnnnnnnnnnnnnnnnnnnnnnnnnnnnnnnnnnnnnnnnnnnnnnnnnnnnnnnnnnnnnnnnnnnnnnnnnnnnnnnnnnnnnnnnnnnnnnnnnnnnnnnnagattgtgttcgagggagtgatagggaaaggacgttcgggagagattgccattgatgacattcggataagcactgatgtcccactggagaactgcatg

SEQ ID NO: 26466 - DNA, 641 bp, Macaca Mulatta
tctggaccattccagtctacaagcccatgcatgacttcctgaaatacgacttcttccagaccatgtcggtgatcgggggcttgctcctggtggtggcgctgggccctgggggtgtctccatggatgagaagaagaaggagtggtaacagtcacagatccctacctgcctggctaagacccgtggccgtcgaggactggtttggggtggagtcaacaaaactgccagcttttatgtatcctcttcccttcccctcccttggtaaaggcacagatgttttgagaactttatttgcagagacacctgagaattcatggctcggtctgctctggagccacagtctggcgtttgacccttcagtgctggccagcctggcagttggaggcctcccctatgccaaggctttggaaagaacagcccacttggctgtggcatctcagtcctatttttgagtttgttttgtggaggtgcaggagggccttcaggctgtgctgtgagcagacacattggtatcaccattcagagcaccctccctcttagttttaagtttacgtttttagcgaaaactactaaatgatgttgggtggttcagccagacctcaaagcggttaaacctccctgttgtaaaatcacaccagtggct

SEQ ID NO: 26467 - DNA, 1221 bp, Macaca Mulatta
ggatgatactttggggaggaaatgcttggtttgtgtacaaggagaccagcctacacagtccatcaaatacgtctgcccctcatagccaaggaggtattccacctcctaccggaatataattaaagggaaaaatacactgtatgaagtatatgttgataatatgacatgttgccaacatcttgagaagcattatttgtttctaataaaagtaatggctttgtcaatatattggtgggtttaaaattttgctgcttttttacataaagcctgtgcctttcctagaaagttaagatgtaaatgtgttctcacatgtaaatttgaaacttcaggggcctattattaaatgatacacattttgaaatgaaccataatttttttcactaagctgtttgccttccaaagtgtttacaccttaagccttaacatgtatcttcattcagaaagcagttatattgtcataccatagtaggaagaaaaatctttatttggaatatacactactgtaagtttgtacagatcatatacctaagacccgtctttgcttaaaaagccttgattacataaatatgtaggaaaaacatattgagttcaaaatttatatctaacattgtttatgttacgatgattttaattgcaaagactaggtggatatttttttttctgtttttctaaatgaccccgtggtacttaataggtgtactaaaattgttgttgggagcagggatttggaaatttctgatagatgtgtagttaatatagtaattctgtttcatgagatataatctattatgctagtggtttaataggcttgctatataagtagaaagaacatggctcaactagatatctttatatgtatgggcattactcttagtgatatttgtttcctgtcctttgttgctcatgctatttaagtgcaggctgagacccagcctctttgtaatcaaaataatccactgttttttgcagaccctattcacagggttaaaaaaattaagattgctttccatgtttgaaatttaccattgagagtcaatgaagttgctattttgagtttagcattgatattgtgaaaataaatgcaattttggatttcatgtttcttaatattcattcttgtttcacaaatgaatgatttaaggattatgcatcataaaagaacctaaagtgaggtataatgatgaagtgtatttgtcctttgcacacacaacctatagggta

SEQ ID NO: 26468 - DNA, 704 bp, Macaca Mulatta
tctctgggttccttatctattcggtgatttggagatttatctttgctccctttggaattgttcaaatgttcttttaatggtcagtttaatgaacttcaccatcgaggttaatgaatgacagtagtcacacttattgctgtttatgttatttgggagtaagactcttgcttttgattcacatggggaaatccctgttattttgtgaattggggcaagataacgtagcagaggaattaataatttttttagaaacttgaacttagcagcaaaatagagctcataaagaaataatgaaatgaaaatgtagttaattcttgccttatacctctttctctcccctgtaaaattaaaatatatacatgtatacctggatttgcttggcttctttgagaatgtaagagaaataaaaattgaaagaataatctttcctattcactggctcattttttcttcaaacatggactgagcatctgttgttcggaaaaccctgggttagtagtagagaggctaggtaagccagactcaccccttccccatagggtggtgaagtctaggagccacaatcctaaaattaagatggtgccatgtcctctaagaactagaggaaaataaaacatgggtgagggtttggggctctaggtgacagcagtcgagtgtatatgccctgagccagggtctttcgggctttgggaaactgcaattcc

SEQ ID NO: 26469 - DNA, 427 bp, Macaca Mulatta
  misc_feature (1)...(427): n = A,T,C or G
gggaaatatggtgtaggttttgctagagtcnnnnnnnnnnnnnnnnnnggatttttgctaattattgttagcaaaattttttgctcagcggcaccctcccctagtgtccatgggttagggccgtgctggggaaaacgggccggtatttacacatgcgcaaaacacccagagacggcacaaggaggttgaactaatgtttcagttcgcgaacattgactccttatgaaagtcacttctaactagatgcacccccttccggtcattatttcatttgcatgatgtattgcttcttcactttttgtttttattgagcacggagtagaattccggggctgccttgacttcttccctgcacgcttcctctcagtgacttttcttccctttcacatgaggatctgctgttccagttcctttttccttggccccc

SEQ ID NO: 26470 - DNA, 703 bp, Macaca Mulatta
cgctcatcttgtgcttctggtacggccgcttcgccttcagcccggccacctacgcctgccgcctggcctcgcactgcctggcctacgccaactcctgcctcaacccgctagtctacgcgctcgcttcgcgccactttcgcgcgcgcttccgccgcctgtggcagtgcggccgccgacgccgccaccgtgcccgtcgcaccctccgtcgcgtccaccccgcgtcctcgggcccacccggctgtcctggagacgcccggcctcgcgggaggctgccggccggcggcggccggggcctggagcccagggagggacccgcccacggcggagaggctgcttgaggaccggaataaaccctgccgcctgtctctgcctgtgtccgtctgtctcactccccttctccgagggcgggacgccaccgggtcagggatggagcaacgccacgagctctctgaggagcattgagtggagcggcttgtccccaccccacaatggagcaccagcccagcggacacccctgagtgtgacaatggacagcacagcccgccctcagcaggtcagcccccagaccctgctcatagccagcctggcagtccctctgcccatccttccaactgggtgacacctaggccctgcttcctcaccaccccctaaccacccccttcttggttcaagcgcagtcctaggtagcttaacatcaacagct

SEQ ID NO: 26471 - DNA, 409 bp, Macaca Mulatta
ggcccataaagagaggggatattttgcccccagaaaaaggccgagaggtagcgaaggaacttggcataccatactatgaaacaagcgtgtttgaccagtttgggatcaaggatgtgtttgacaatgcaatccgagcagcgctgatttcccgcaggcacctgcaattctggaaatcccacttaaagaaagtccagaaacctttacttcaggcacccttcctacctccaaaagcccctccaccggtcatcaaaattccagaatgtccttccatggggacaagtgaagctgcctgtttactggacaatcctctgtgtgccgatgttctgttcatccttcaggaccaggaacacatctttgcacatcgaatttaccttgctacctcttcttccaattttatgatctgttttta

SEQ ID NO: 26472 - DNA, 159 bp, Macaca Mulatta
ggctgaattctgggccctcaccatcctcaagcggcgccaccagaacgtcgtgcagtttgaggagtgcgtcctgcagcgcaacgggctagcccagcgcatgagtcacggcaacaagagctcgcagctttacctgcgcctggtggagacctcactgaaagg

SEQ ID NO: 26473 - DNA, 615 bp, Macaca Mulatta
  misc_feature (1)...(615): n = A,T,C or G
gacgagacttctataagatcttgggggtgcctcgaagtgcctctataaaggatattaaaaaggcctataggaaactagccctacagcttcatcccgaccggaaccctgatgatccacaagcccaggagaaattccaggatctgggtgctgcttatgaggnnnnnnnnnnnnnnnnnnnnnnnnnnnnnnnnnnnnnnnnnnnnnnnnnnnnnnnnnnnnnnnnnnnnnnnnnnnnnnnnnnnnnnnnnnnnnnnnnnnnnnnnnnnnnnnnnnnnnnnnnnnnnnnnnnnnnnnnnnnnnnnnnnnnnnnnnnnnnnnnnnnnnnnnnnnnnnnnnnnnnnnnnnnnnnnnnnnnnnnnnnnnnnnnnnnnnnnnnnnnnnnnnnnnnnnnnnnnnnnnnnnnnnnnnnnnnnnnnnnnnnnnnnnnnnnnnnnnnnnnnnnnnnnnnnnnnnnnnnnnnnnnnnnnnnnnnnnnnnnnnnnnnnnnnnnnnnnnnnnnnnnnnnnnnnnnnnnnnnnnnnnnnnnnnnnnactagtgaatgaagaacgaacgctggaagtagaaatagagcctggggtgagagacggcatggagtacccctttattggataagg

SEQ ID NO: 26474 - DNA, 790 bp, Macaca Mulatta
ttaatgttatagaaataaatgatgataaactctaactattaaaggaaagagaatatttggtactcagatccattttttaacctctggtgctgtataaagggaatattcaactagatgtaaatcaaagtatatgtttggctcatttgagcattttagaatatttgagaatgtataatacatgtaaaataaactattagaactctaccataattgtgttgaaggtagaagtgatcttcaaagagatggccattaacttagcagtgggacctcacttttacaagcactgctctagatatacttgaagaatttaatatgtacagaattttattctggataataaataggatcacactgtattaggggttatggcaacattattgaattttttatgtacataaagccttatgtttagggtggtttctatctgtcttgtttttcacttgtataacactgtgaacttctaaagagagagaataaaagaagcatgaatgagaagaatgacatttcagaaaaatggttcaatgaaaatctatagctaaaatatgtaaacctaggtaaagcgcttgccttcatcctgagtcagaatatatttaaataaattgtgttatctcttgccaaacattttgttagtgtttatttaaaaagaaaatgttgtttcttaatgcatttaaatcagttttgtattgtgcactaaaatgtgagaaaatatgaacatttcaattgtattttacatgttaaaacacaaaagttcagtaaactttgaagttgagtagtagtttttctagaacac

SEQ ID NO: 26475 - DNA, 128 bp, Macaca Mulatta
cagaacatttccatccggagtgtagaaggagaggtgtattgtgccaagtcaggcaggaaattcgctggccaaatccgggagaagttcatcatctcagactggagattcgtcctctctggatcttacag

SEQ ID NO: 26476 - DNA, 946 bp, Macaca Mulatta
  misc_feature (1)...(946): n = A,T,C or G
tatgtgccaagtgctctctgctgccccagcagagccagtatcctgacaggaaagtacccacataatcatcatgttgtgaacaacactctagaggggaactgcagtagcaagtcctggcagaagatccaagaaccaaatactttcccagcaattctcagatcaatgtgtggttatcagaccttttttgcagggaaatacttaaatgannnnnnnnnnnnnnnnnnnnnnnnnnnnnnnnnnnnnnnnnnnnnnnnnnnnnnnnnnnnnnnnnnnnnnnnnnnnnnnnnnnnnnnnnnnnnnnnnnnnnnnnnnnnnnnnnnnnnnnnnnnnnnnnnnnnnnnnnnnnnnnnnnnnnnnnnnnnnnnnnnnnnnnnnnnnnnnnnnnnnnnnnnnnnnnnnnnnnnnnnnnnnnnnnnnnnnnnnnnnnnnnnnnnnnnnnnnnnnnnnnnnnnnnnnnnnnnnnnnnnnnnnnnnnnnnnnnnnnnnnnnnnnnnnnnnnnnnnnnnnnnnnnnnnnnnnnnnnnnnnnnnnnnnnnnnnnnnnnnnnnnnnnnnnnnnnnnnnnnnnnnnnnnnnnnnnnnnnnnnnnnnnnnnnnnnnnnnnnnnnnnnnnnnnnnnnnnnnnnnnnnnnnnnnnnnnnnnnnnnnnnnnnnnnnnnnnnnnnnnnnnnnnnnnnnnnnnnnnnnnnnnnnnnnnnnnnnnnnnnnnnnnnnnnnnnnnnnnnnnnnnnnnnnnnnnnnnnnnnnnnnnnnnnnnnnnnnnnnnnnnnnnnnnnnnnnnnnnnnnnnnnnnnnnnnnnnnnnnnnnnnnnnnnnnnnnnnnnnnnnnnnnnnnnnnnnnnnnagatgctggttgccaacattgacttgggtcctactattttggacattgctggctatgacctaaataagacacagatggatgggatgtcctttttgcccatttt

SEQ ID NO: 26477 - DNA, 2078 bp, Macaca Mulatta
  misc_feature (1)...(2078): n = A,T,C or G
atctatgatggcaaggagtgccgggctgagtcctgcctggaccgccggtctgagatgcgtctcaagcacctggacatggtgctccctgaggtggcgtcatcctgtggccccagcaccagcnccagcaacaccagccccgaggcgggtccctcctctcagcccaaggtggatgtccgcatgattgactttgcacacagcacgttcaagggcttccgggatgaccccaccgtgcatgatgggccagacagaggctatgtgtttggcctggagaacctcatcagcatcatggaacagatgcgggacgagaaccagtaggccctgttctgggcccccagaaccccttcctctccacccgcaggcagggaccattgttctgaacttgccgtgaggacacacagacttgattttaaagggttatatttctctttggtgtaaactaaaagaaatgttattagcggtagcctggaatccatatatataaagtgaaggagggtagaccacacgccctctcagccaggctcctcagctttgtggctctgattggtgtgtccaggctgccttaggaaggaagaggtgcccctggtgggcttggcagcagggacagggtgcccttggacattggtttctcttgtctagatctttgaggtctgtggctgcagggctctgctgattatagggtaaagccctgggctggtgcagggcccctccatgcccactcttcccttgttccccagaagtannnnnnnnnnnnnnnnnnnnnnnnnnnnnnnnnnnnnnnnnnnnnnnnnnnnnnnnnnnnnnnnnnnnnnnnnnnnnnnnnnnnnnnnnnnnnnnnnnnnnnnnnnnnnnnnnnnnnnnnnnnnnnnnnnnnnnnnnnnnnnnnnnnnnnnnnnnnnnnnnnnnnnnnnnnnnnnnnnnnnnnnnnnnnnnnnnnnnnnnnnnnnnnnnnnnnnnnnnnnnnnnnnnnnnnnnnnnnnnnnnnnnnnnnnnnnnnnnnnnnnnnnnnnnnnnnnnnnnnnnnnnnnnnnnnnnnnnnnnnnnnnnnnnnnnnnnnnnnnnnnnnnnnnnnnnnnnnnnnnnnnnnnnnnnnnnnnnnnnnnnnnnnnnnnnnnnnnnnnnnnnnnnnnnnnnnnnnnnnnnnnnnnnnnnnnnnnnnnnnnnnnnnnnnnnnnnnnnnnnnnnnnnnnnnnnnnnnnnnnnnnnnnnnnnnnnnnnnnnnnnnnnnnnnnnnnnnnnnnnnnnnnnnnnnnnnnnnnnnnnnnnnnnnnnnnnnnnnnnnnnnnnnnnnnnnnnnnnnnnnnnnnnnnnnnnnnnnnnnnnnnnnnnnnnnnnnnnnnnnnnnnnnnnnnnnnnnnnnnnnnnnnnnnnnnnnnnnnnnnnnnnnnnnnnnnnnnnnnnnnnnnnnnnnnnnnnnnnnnnnnnnnnnnnnnnnnnnnnnnnnnnnnnnnnnnnnnnnnnnnnnnnnnnnnnnnnnnnnnnnnnnnnnnnnnnnnnnnnnnnnnnnnnnnnnnnnnnnnnnnnnnnnnnnnnnnnnnnnnnnnnnnncaggtgttgcctttttataaagacctgatagcagaataaactggtggtgtttccctgttgacccagcaccctttctgtgggcctagaatatggccctcaacactgacagtgggacagtgagggcttgaggagtgacccttcttttctcatggttttagtcattttggctgccagcccttaatggcacagacctgctgcttctaaaacagatggccaggacatgacaccgatttcagccattgccagggttagcaccctctcctttgagcctagggtcactgttcattgtcactttaggcaagtgcctgtttggcattaaaggtaagcctgccagctgtgaaaaaaaaaggtaactgatggactcatttcctggtccttagagatgcagcttcttaagggctccttgatggatgccatctctcctagcccccggctctggtgccactggtgggcaggttcccattctttggggctgggagggacagcttggctgtttctggtcagaaattacggttttctctcctgtaccattc

SEQ ID NO: 26478 - DNA, 709 bp, Macaca Mulatta
tccatcatgccttatccacctgctatgtgtactatgcgcccgcaggacctacctcagcccaaccagccgccgagtggcccccacagcctctcgcccaccagcccggagacaccggcactccatccagctcgacctgggtgacctagaggagctcaacaaggccctgagccgggccgtgcaggctgctgagagcgtccgctccaccaccaggcagatgagaagctcactgtcggccgacctgcgccaggctcacagcctgcggggctcctgcctcttctgacttcactgggggcccagagacagatgagtgggcgggtgagcaggtggcctgccaggccaggagtgggctggagctgctgaggcccagaaagcccgcatggttcctcaccaggagggtctccctccagcacgggccccacctgctcagtccctgtgctttccaagtggagggggtgtcagttcggtcaccgagagaagtgacttcccaggagcaccagtcccctcacagaggtgctgtgagcgaggcctccttcggcccaggcggagcctcgggcagtctctcctggtcctgcatgtgtccacctcccgctaataataggtatttcgtatacagatggacagatatttttttaaacaggggagttttcctgatcttggttcctccttagggggccagacaagaaaggaaacgcctacggtttctggagca

SEQ ID NO: 26479 - DNA, 717 bp, Macaca Mulatta
gcctctctgtgactcacttagaggaggctctgggtgggcagtttctggagcttgtggggaaggactttgagtgtctcctaccaggctcttgacccactctgttgatacagtatgtgtcctgcagatgcttttacagggttaaatgataccacaagaggcagggcagcgggctcgacgagctctgttctggtgcgggcaggaggcgggagcctggatctgtgcgactgaaggtgggagactgggccgggtggacctggtggtctggtgtgggcaggcggtgggcgatgaggccagccagacagctggctgagctggggcctgagcggggatgggcgccgcagaggactggagcctcagcagttgcccaaacagagctcctggtgtgtggcccggaggttccgggaaggcagctggcgagctggacgcccgtcaggaagcacagagccacgtgacagctgcagttggtcaccagctggctggccaggcattcccgtgccctgcttctccccatccagggaaccagaactggggtctgaggcctgagccagagaggtggggacagggagccatgggggcagggaaggactctacctaagctctctctgcccttcccatgtctgtcaggtgggaagaggagtacacggtgcggatccagctgcaagaccgtgtaaatgagctccaggaggtgagggtggcaccccacttgctgctggtgct

SEQ ID NO: 26480 - DNA, 271 bp, Macaca Mulatta
actacttaggtaaatgatgcttttggcctgcttatgtcttccatggccacaatggtgaatacttgttttctactcaaatagtaagaaaataaattttggcagttttccgagagcaaaagtatgtattgcttgcccaagataaattgacctctgaagagacataaactattttaaaacagttttttaaaaacaacatttttccatttacatagaaattgttaatgtcaattccacccccctccccagatcccatgccctttataaattatgg

SEQ ID NO: 26481 - DNA, 261 bp, Macaca Mulatta
tatcgattagggcctgtggtagagagacagaaacttgagagcagagaagttagtcattccctctctttctagtttggtaggaatcaccctaaagacctagtcctcaatttaattgtgtgggtttttaattttcctagaatgaaatgactgaaacaatgaggaagaatacagcacaacacttgaacaaaatgtattcagaaatatatttagttttatagcagaagcagcccaattgtttggtggaaagtaggggaaattgaa

SEQ ID NO: 26482 - DNA, 297 bp, Macaca Mulatta
  misc_feature (1)...(297): n = A,T,C or G
cacatcccgcctcagtatttgcaccttgtggctaatgaatacttccatgacaagcactccctgactgaaatccgagacggtcttctggacttgcttggagatgtgttctttgtggtccctgcactgatnnnnnnnnnnnnnnnnnngatgctggtgcacctgtctacttctatgagtttcggcaccggccccagtgctttgaagacacgaagccagcttttgtcaaagccgaccacgctgatgaagtccgctttgtgttcggtggtgccttcctgaagggtgacattgttatgttcg

SEQ ID NO: 26483 - DNA, 611 bp, Macaca Mulatta
  misc_feature (1)...(611): n = A,T,C or G
gtgagcttgtgtgctgagtgctgagccctcatcccctcctggggccaggcttgcgtttcacctgctgaatcgcttgtgctgggctgcctgggctgtcagtggtgcccgcatgaagctgctctggctgccagagctggacagccccaggaaaacccacctctctgcagagcttgcccagccgtccctgggaagccagctgcctctcacgtaagtcctccgctcgacggggtgtctctaaaccctcactcttcagcctctgtttgaccatgaaatgaagtgactgagctctattctgtacctgccactctatttctggggtgactttgtcagctgcccagaatgtccaagccaggctggttctctgcatcctttgaatgacctgtcttcttctgtaaccacaggnnnnnnnnnnnnnnnnnnnnnnnnnnnnnnnnnnnnnnnnnnnnnnnnnnnnnnnnnnnnnnnnnnnnnnnnnnnnnnnnnnnnnnnnnnnnnnnnnnnnnnnnnnnnnnnnnnnnnnnnnnnnnnnnnnnnnnatgggcccctcccgtcctgcgttcctgtccttcacaaagctcagtctgtggtggctccttctgaccccagcaggt

SEQ ID NO: 26484 - DNA, 1465 bp, Macaca Mulatta
  misc_feature (1)...(1465): n = A,T,C or G
agatactttgagaaaagtcatacagaaggcacgtgagtccaaaattgattatgannnnnnnnnnnnnnnnnnnnnnnnnnnnnnnnnnnnnnnnnnnnnnnnnnnnnnnnnnnnnnnnnnnnnnnnnnnnnnnnnnnnnnnnnnnnnnnnnnnnnnnnnnnnnnnnnnnnnnnnnnnnnnnnnnnnnnnnnnnnnnnnnnnnnnnnnnnnnnnnnnnnnnnnnnnnnnnnnnnnnnnnnnnnnnnnnnnnnnnnnnnnnnnnnnnnnnnnnnnnnnnnnnnnnnnnnnnnnnnnnnnnnnnnnnnnnnnnnnnnnnnnnnnnnnnnnnnnnnnnnnnnnnnnnnnnnnnnnnnnnnnnnnnnnnnnnnnnnnnnnnnnnnnnnnnnnnnnnnnnnnnnnnnnnnnnnnnnnnnnnnnnnnnnnnnnnnnnnnnnnnnnnnnnnnnnnnnnnnnnnnnnnnnnnnnnnnnnnnnnnnnnnnnnnnnnnnnnnnnnnnnnnnnnnnnnnnnnnnnnnnnnnnnnnnnnnnnnnnnnnnnnnnnnnnnnnnnnnnnnnnnnnnnnacagcaatcaaagagaccaaagaggcgttggagaacatgaacagcaccttgaagagcttgcaccaacaaagtacacagcttagcagcagtctgaccagcgtgaaaactagcctgcgggcatctctcaatnnnnnnnnnnnnnnnnnnnntccatcaagtgaaacctgcaacagcatcaggattgtctttaagccagctgaaaagcaaccctgaacggaggnnnnnnnnnnnnnnnnnnnnnnnnnnnnnnnnnnnnnnnnnnnnnnnnnnnnnnnnnnnnnnnnnnnnnnnnnnnnnnnnnnnnnnnnnnnnnnnnnnnnnnnnnnnnnnnnnnnnnnnnnnnnnnnnnnnnnnnnnnncaggtatcaaaagggtcttgaattccattggttcggatatccacaatgtaactcagcatcttcctattcaggatatactctcagaattctctgtttatgttaataacactgaaagttacatccacagaaatttacctacattggaagagtatgattcatactggtgnnnnnnnnnnnnnnnnnnnnnnnnnnnnnnnnnnnnnnnnnnnnnnnnnnnnnnnnnnnnnnnnnnnnnnnnnnnnnnnnnnnnnnnnnnnnnnnnnnnnnnnnnnnnnnnnnnnnnnnnnnnnnnnnnnnnnnnnnnnnnnnnnnnnnnnnnnnnnnnnnnnnnnnnnnnnnnnnnnnnnnnnnnnnnnnnnnnnnnnnnnnnnnnnnnnnnnnnnnnnnnnnnnnnnnnnnnnnnnnnnnnnnnnnnnnnnnnnnnnnnnnnnnnnttccaggttttggatacaccctacttactaaatgaagactgggaatactatctctctgggaagctgtttaataaatcagagatgaagctcacttttcaacaggtttacag

SEQ ID NO: 26485 - DNA, 2103 bp, Macaca Mulatta
  misc_feature (1)...(2103): n = A,T,C or G
gaggcacagaacttgggcaactttattgtcaggtatggctacatttaccccctgcaagaccccaagaatctcgttctcaagcaggatggcagcctctaccgatttcagncagacaccgtatttctggcccacccagcagtggccagctgaagataccgattacnnnnnnnnnnnnnnnnnnnnnnnnnnnnnnnnnnnnnnnnnnnnnnnnnnnnnnnnnnnnnnnnnnnnnnnnnnnnnnnnnnnnnnnnnnnnnnnnnnnnnnnnnnnnnnnnnnnnnnnnnnnnnnnnnnnnnnnnnnnnnnnnnnnnnnnnnnnnnnnnnnnnnnnnnnnnnnnnnnnnnnnnnnnnnnnnnnnnnnnnnnnnnnnnnnnnnnnnnnnnnnnnnnnnnnnnnnnnnnnnnnnnnnnnnnnnnnnnnnnnnnnnnnnnnnnnnnnnnnnnnnnnnnnnnnnnnnnnnnnnnnnnnnnnnnnnnnnnnnnnnnnnnnnnnnnnnnnnnnnnnnnnnnnnnnnnnnnnnnnnnnnnnnnnnnnnnnnnnnnnnnnnnnnnnnnnnnnnnnnnnnnnnnnnnnnnnnnnnnnnnnnnnnnnnnnnnnnnnnnnnnnnnnnnnnnnnnnnnnnnnnnnnnnnnnnnnnnnnnnnnnnnnnnnnnnnnnnnnnnnnnnnnnnnnnnnnnnnnnnnnnnnnnnnnnnnnnnnnnnnnnnnnnnnnnnnnnnnnnnnnnnnnnnnnnnnnnnnnnnnnnnnnnnnnnnnnnnnnnnnnnnnnnnnnnnnnnnnnnnnnnnnnnnnnnnnnnnnnnnnnnnnnnnnnnnnnnnnnnnnnnnnnnnnnnnnnnnnnnnnnnnnnnnnnnnnnnnnnnnnnnnnnnnnnnnnnnnnnnnnnnnnnnnnnnnnnnnnnnnnnnnnnnnnnnnnnnnnnnnnnnnnnnnnnnnnnnnnnnnnnnnnnnnnnnnnnnnnnnnnnnnnnnnnnnnnnnnnnnnnnnnnnnnnnnnnnnnnnnnnnnnnnnnnnnnnnnnnnnnnnnnnnnnnnnnnnnnnnnnnnnnnnnnnnnnnnnnnnnnnnnnnnnnnnnnnnnnnnnnnnnnnnnnnnnnnnnnnnnnnnnnnnnnnnnnnnnnnnnnnnnnnnnnnnnnnnnnnnnnnnnnnnnnnnnnnnnnnnnnnnnnnnnnnnnnnnnnnnnnnnnnnnnnnnnnnnnnnnnnnnnnnnnnnnnnnnnnnnnnnnnnnnnnnnnnnnnnnnnnnnnnnnnnnnnnnnnnnnnnnnnnnnnnnnnnnnnnnnnnnnnnnnnnnnnnnnnnnnnnnnnnnnnnnnnnnnnnnnnnnnnnnnnnnnnnnnnnnnnnnnnnnnnnnnnnnnnnnnnnnnnnnnnnnnnnnnnnnnnnnnnnnnnnnnnnnnnnnnnnnnnnnnnnnnnnnnnnnnnnnnnnnnnnnnnnnnnnnnnnnnnnnnnnnnnnnnnnnnnnnnnnnnnnnnnnnnnnnnnnnnnnnnnnnnnnnnnnnnnnnnnnnnnnnnnnnnnnnnnnnnnnnnnnnnnnnnnnnnnnnnnnnnnnnnnnnnnnnnnnnnnnnnnnnnnnnnnnnnnnnnnnnnnnnnnnnnnnnnnnnnnnnnnnnnnnnnnnnnnnnnnnnnnnnnnnnnnnnnnnnnnnnnnnnnnnnnnnnnnnnnnnnnnnnnnnnnnnnnnnnnnnnnnnnntttttccagatcaaaatggatgtgcccacggggagcgggacctgcttgatggactcagaggacgctggaacaggagagtcgggtgaccgggccacagaaaaggaggtcatctgcccctgggagagcctgtgagggaaaggcaggcagagctgggggctctggaccaggaagatgctctgacagatgccatgggatgggccgcaggacacactcactcgagaaccaaagtgcatttgagtgacatttgagggtgggggagacaagatggggtagattgtggcaaagaatgctctggctggttaccaggggccaactccttctcctcctgaccctccctcccttgggcagaagaaaggcatgtagaccaggagactttccctgctgccttanaaacaataaaaggttaacttt

SEQ ID NO: 26486 - DNA, 1399 bp, Macaca Mulatta
  misc_feature (1)...(1399): n = A,T,C or G
tggtattcatgggtagtttgaaatatccagatgagaatgggtttgatgccttcctgaagaagcacgggggtagtgataatgcctcaactgattgtgaacgcacagtctttcagtttgatgtccagaggaagtacttcaaggaagcccttgannnnnnnnnnnnnnnnnnnnnnnnnnnnnnnnnnnnnnnnnnnnnnnnnnnnnnnnnnnnnnnnnnnnnnnnnnnnnnnnnnnnnnnnnnnnnnnnnnnnnnnnnnnnnnnnnnnnnnnnnnnnnnnnnnnnnnnnnnnnnnnnnnnnnnnnnnnnnnnnnnnnnnnnnnnnnnnnnnnnnnnnnnnnnnnnnnnnnnnnnnnnnnnnnnnnnnnnnnnnnnnnnnnnnnnnnnnnnnnnnnnnnnnnnnnnnnnnnnnnnnnnnnnnnnnnnnnnnnnnnnnnnnnnnnnnnnnnnnnnnnnnnnnnnnnnnnnnnnnnnnnnnnnnnnnnnnnnnnnnnnnnnnnnnnnnnnnnnnnnnnnnnnnnnnnnnnnnnnnnnnnnnnnnnnnnnnnnnnnnnnnnnnnnnnnnnnnnnnnnnnnnnnnnnnnnnnnnnnnnnnnnnnnnnnnnnnnnnnnnnnnnnnnnnnnnnnnnnnnnnnnnnnnnnnnnnnnnagggtgaagccacttcattatatatcctggctggttggacatgaaggcaaaggcagcattctttctttccttaggaaaaagcaannnnnnnnnnnnnnnnnnnnnnnnnnnnnnnnnnnnnnnnnnnnnnnnnnnnnnnnnnnnnnnnnnnnnnnnnnnnnnnnnnnnnnnnnnnnnnnnnnnnnnnnnnnnnnnnnnnnnnnnnnnnnnnnnnnnnnnnnnnnnnnnnnnnnnnnnnnnnnnnnnnnnnnnnnnnnnnnnnnnnnnnnnnnnnnnnnnnnnnnnnnnnnnnnnnnnnnnnnnnnnnnnnnnnnacagacagatccagttgagtatgtggaaaacatgtgtgagaacatgcagctgtacccactgcaggacattctcactggagatcagcttctttttgaatacaagccagaagtnnnnnnnnnnnnnnnnnnnnnnnnnnnnnnnnnnnnnnnnnnnnnnnnnnnnnnnnnnnnnnnnnnnnnnnnnnnnnnnnnnnnnnnnnnnnnnnnnnnnnnnnnnnnnnnnnnnnnnnnnnnnnnnnnnnnnnnnnnnnnnnnnnnnnnnnnnnnnnnnnnnnnnnnnnnnnnnnnnnnnnnnnnnnnnnnnnnnnnnnnnnnnnnnnnnnnnnnnnnnnnnnnnnnnnnnnnnnnnnnnnnnnnnnnnnnnnnnnnnnnnnnnnnnnnnnnnnnnnnnnnnnnnnnnnnnnnnnnnnnnnnnnnnnnnnnnnnnnnnnnnnnnnn

SEQ ID NO: 26487 - DNA, 125 bp, Macaca Mulatta
gggctgctggagtcctctgcagagaaggctgttgtgtcagtgtcctgtggaggtgagagccccctggatgggatctgcctcagcgaatcagacaagacagccgtgctcaccttaataagagaaga

SEQ ID NO: 26488 - DNA, 742 bp, Macaca Mulatta
gggtggaacggtgacaggagcagctgagcccgggagaagctgtaaggaactaggcagggactttcacaaacacactgagaattgtgctgtgtccctggctttctctgaatcaccaaggagtttggaggaagtcgtgagaatcagaggagatgattaactgtgatcagaatggggggtggtggagggtgaaggaggtgccctcttgccagctgccctgtttggcttcatgcagaataggttgggctttcctggggccatgcctggctccattctgcctgcctgaaggcatggccgggatgaaaccaccttctttattgaagactgggtgtccgccatactttaaaaacacttacttttacctttttgtcctcagaaaaggaaatcctcacttccatggctgccaaaaggactgtttctggctctcagtcctaaggccctgcaaactctaacttatttcccaatgagtctgtatctatacttgggctctgtatctgaatgaaggttggtcacccatccagcctattaccttttgctttgtgtattaaaagtgctgcaaaatctgccttgcctcccacccttttgtgtctgagggaggtggggacagagcaaagggtagacatgactggggtgggctctggttctaagaaacagaaaccataaaggagtgctgaagtacacagagggcatatacacaagagcaggagaagtgtcaggaactgacccgtcaacaatacagtggatg

SEQ ID NO: 26489 - DNA, 404 bp, Macaca Mulatta
  misc_feature (1)...(404): n = A,T,C or G
aggaaaagactcaagaagagcatgaagaaatagacaaacgtaataaaaatatggcccagtatttaaaagaaaagctcaataatgaaatagttgcgaataaaagagaataaaagggcagcagcaannnnnnnnnnnnnnnnnnnnnnnnnnnnnnnnnnnnnnnnnnnnnnnnnnnnnnnnnnnnnnnnnnnnnnnnnnnnnnagtgaaaaaacaagcagagaagaggaaggcaaagcaaaggaacaaattagaaattgtgagaacaactgccagcaggtaactgacaaagcattcaaagaacagagagacagaccagaggcccaagaacaaagtgagaaaaaaatatcaaaattagatcctaagaagttagctctagataccagctttttgaaggtaagtgcaa

SEQ ID NO: 26490 - DNA, 661 bp, Macaca Mulatta
  misc_feature (1)...(661): n = A,T,C or G
nnnnnnnnnnnnnnnnnnnnnnnnnnnnnnnnnnnnnnnnnnnnnnnnnnnnnnnnnnnnnnnnnnnnnnnnnnnnnnnnnnnnnnnnnnnnnnnnnnnnnnnnnnnnnnnnnnnnnnnnnnnnnnnnnnnnnnnnnnnnnnnnnnnnnnnnnnnnnnnnnnnnnnnnnnnnnnnnnnnnnnnnnnnnnnnnnnnnnnnnnnnnnnnnnnnnnnnnnnnnnnnnnnnnnnnnnnnnnnnnnnnnnnnnnnnnaaaaacttttatttgtatcaacacttcctagctcttgacttagcttagagcttttaaaagagcagacaccttacatatttgagtttgaaaaagtttctgctattaatcagaaataatcatttctattttctggcttaccccttggaataagccaaaaataaaaccaaagttacatttcctgacagatggatgagaaaacaatagaaggaacgtcctgaattctagagttgactcttgctggtgaagtacaccttcagcttagtccatactcctaagtaaagcccgaaggaaaactcttaacacctaattctttgtggaaaaatgatcaactagccatttcataggttatagaacaaaagtacaattgggcatctttccttatgtcatgatnccgggggtgcttatatta

SEQ ID NO: 26491 - DNA, 526 bp, Macaca Mulatta
tcaggaagggagcgctgatcagatgggagctgtggccaagtccaccttctgtgaagccctaggagaggcccctgcctcagcctgccccgggtgtgctggggcacggggaaacgaggacctcccccaggtggggtggttggggggactcttaggaggaaaggctcttccaggcctaggaaggctgtcacacttcctactgaggccaggagctgccagggctggtgcgggatcagggctgtgggaggaaggccttcggcactggcccctgtgctaggaaggctgccaggcctgcattggagccaccccctgcaagggaggggtggccatgcctcagcaggccccagtgcccccgaagctgtagaagcttttccgggtccagcaaagggtctgtgtcctctcagtcaaactccttgacatttcccaccccctcatggggagggcgctgggcctgaggctggcaggacctagggccttgctatatttggtcggtcctggttgctgacctggccagcgctattccgggcag

SEQ ID NO: 26492 - DNA, 418 bp, Macaca Mulatta
  misc_feature (1)...(418): n = A,T,C or G
aaactaaacacacatccatcatttctctgtacctcacgcgcataaatttgctgctcctatgnnnnnnnnnnnnnnnnnnntatgtgtgtttatggatctaagttaaatcttttggcaatatataaaaatgtaaatagtaaactttatttattaagaatgtcatctttttttaatttatatttacacaattgttcatctaatttattttttctatacagttttaaatacttagacatattttactgttcatgatatttttatcctgttcttgtggatttgtttttccatactgttttctcttatctcaattacaggttggatctcacaaataataatgtcagagacagaaatattttgccactgttgattactatactttaaagttctatattatgaaaatatataatagcttgtatgc

SEQ ID NO: 26493 - DNA, 1489 bp, Macaca Mulatta
  misc_feature (1)...(1489): n = A,T,C or G
agcagctccaggtggttccgctatttggggacatgcaaatagaactggcaagatacatcaagaccagcgcccactacgaggaaaataaatctcnnnnnnnnnnnnnnnnnnnnnnnnnnnnnnnnnnnnnnnnnnnnnnnnnnnnnnnnnnnnnnnnnnnnnnnnnnnnnnnnnnnnnnnnnnnnnnnnnnnnnnnnnnnnnnnnnnnnnnnnnnnnnnnnnnnnnnnnnnnnnnnnnnnnnnnnnnnnnnnnnnnnnnnnnnnnnnnnnnnnnnnnnnnnnnnnnnnnnnnnnnnnnnnnnnnnnnnnnnnnnnnnnnnnnnnnnnnnnnnnnnnnnnnnnnnnnnnnnnnnnnnnnnnnnnnnnnnnnnnnnnnnnnnnnnnnnnnnnnnnnnnnnnnnnnnnnnnnnnnnnnnnnnnnnnnnnnnnnnnnnnnnnnnnnnnnnnnnnnnnnnnnnnaggtgatcgccatgatcaaaggcctgcaggtgctgatgggcaggatggagagcgtgttcaaccacgccatccggcacaccgtctatgctgcactgcaggacttctcccaggtgaccctccgggagccgctgcggcaggccatcaagaagaagaagaatgtcatccagannnnnnnnnnnnnnnnnnnnnnnnnnnnnnnnnnnnnnnnnnnnnnnnnnnnnnnnnnnnnnnnnnnnnnnnnnnnnnnnnnnnnnnnnnnnnnnnnnnnnnnnnnnnnnnnnnnnnnnnnnnnnnnnnnnnnnnnnnnnnnnnnnnnnnnnnnnnnnnnnnnnnnnnnnnnnnnnnnnnnnnnnnnnnnnnnnnnnnnnnnnnnnnnnnnnnnnnnnnnnnnnnnnnnnnnnnnnnnnnnnnnnnnnnnnnnnnnnnnnnnnnnnnnnnnnnnnnnnnnnnnnnnnnnnnnnnnnnnnnnnnnnnnnnnnnnnnnnnnnnnnnnnnnnnnnnnnnnnnnnnnnnnnnnnnnnnnnnnnnnnnnnnnnnnnnnnnnnnnnnnnnnnnnnnnnnnnnnnnnnnnnnnnnnnnnnnnnnnnnnnnnnnnnnnnnnnnnnnnnnnnnnnnnnnnnnnnnnnnnnnnnnnnnnnnnnnnnnnnnnnnnnnnnnnnnnnnnnnnnnnnnnnnnnnnnnnnnnnnnnnnnnnnnnnnnnnnnnnnnnnnnnnnnnnnnnnnnnnnnnnnnnnnnnnnnnnnnnnnnnnnnnnnnnnnnnnnnnnnnnnnnnnnnnnnnnnnnnnnnnnnnnnnnnnnnnnnnnnnnnnnnnnnnnnnnnnnnnnnnnnnnnnnnnnnnnnnnnnnnnnnnnnnnnnnnnnnnnnnnnnnnnnnnnnnnnnnnnnnnnnnnnnnnnnnnnnnnnnnagctcctcggcaggtcgatagacctcaatcgtctgatcacgcagcgtgtctcagcagccgtgtataagtccctggaactggcgattggtcgatttgaaagtgaagatttgacctccatagttg

SEQ ID NO: 26494 - DNA, 234 bp, Macaca Mulatta
cagcaccaagaaggaccgatccccgcgggaggtgcagaggctgtggcagaggccgtggctaaggactgcgggcctgggggccggccttgtgctcaccacactcctgctctggagcaacttaggggccgaagacggggtcacagaggtcctggcccgccgtggcgaggtggtggcggggagattcatcgaggtgccctgctctgaggactacgacagtcatcgcaggtttgaagg

SEQ ID NO: 26495 - DNA, 922 bp, Macaca Mulatta
  misc_feature (1)...(922): n = A,T,C or G
agtcttgctctgtctcccaggctggagtgcagtggcgtgatctcagttcaccacaacctccatctcctgggttcaagcaattctcctgcctcagccttccgagtagctgagactacaggggttcaccactacacccggctaaatttttgtatttttagtagagatgaggtttcaccatgttggtcagggtggtcttgaactcctgacatcaagtgatccacccgcctcagcctcccaaagtgctgagattacaggcatgagccactgtgcctggccctgagcttaaaataaaagttaaatttaaaaaaataataatgttgatgttttcctttttgcaatcaatagcttagttagactcaggattgcaaactgtcnnnnnnnnnnnnnnnnnnnnnnnnnnnnnnnnnnnnnnnnnnnnnnnnnnnnnnnnnnnnnnnnnnnnnnnnnnncccacgcatacatggttcaggagtcagccagagacttggctgaggtttaacatggaatctggggatctcctcttttagctctctttctttggcatcttcatcattctccagcagcgatggtttttccaggctctttcccccagtttcctccagtcagaaagatggcaagagtttttgctgcctgccctcccccagtccttgtgccaacaccaccgccattgcaactgccgccaggaaaaaactgcaaaaaccaaatcacttgctccagatgttgactcctcttcaaaatctatttttcttaaatctccaaagcctcaaataggttttctccctagaatttatatctgttatttgtagcaagattggtctgtaaggcactcagtcttctatatcatgggtcagcagattacagcccttgggctaaatccagccagctgcttgttttattaataaagttttgttggaactaaacc

SEQ ID NO: 26496 - DNA, 183 bp, Macaca Mulatta
ctagaagaagaaaattctccagctgagtcagagtcctctgctggagatgatttacaggaggaagccagtgttggctctgaggctgcttccgctcaaggctaatctccagctggtagacatttcagcaacaaatgccatagagtgtctgataagtgcttttgtgtttttagtacacttagttta

SEQ ID NO: 26497 - DNA, 178 bp, Macaca Mulatta
  misc_feature (1)...(178): n = A,T,C or G
gcagcatgctggatgccttcgcccaagagatggaccacacccagtcccgcatggacggggtcctcaggaagttggccaaagtatcccacatgacgagtgngaccgctgacactggtgtgacatcgccgtgctggtgggggtgcttctcctcgttcttatcttacttttctctctctga

SEQ ID NO: 26498 - DNA, 1144 bp, Macaca Mulatta
  misc_feature (1)...(1144): n = A,T,C or G
aggatgaggatgggacagaagaggataacagtcgtgttgaacctgttggacatgctgacacgggtttggagaatatacccaacttttctctggnnnnnnnnnnnnnnnnnnnnnnnnnnnnnnnnnnnnnnnnnnnnnnnnnnnnnnnnnnnnnnnnnnnnnnnnnnnnnnnnnnnnnnnnnnnnnnnnnnnnnnnnnnnnnnnnnnnnnnnnnnnnnnnnnnnnnnnnnnnnnnnnnnnnnnnnnnnnnnnnnnnnnnnnnnnnnnnnnnnnnnnnnnnnnnnnnnnnnnnnnnnnnnnnnnnnnnnnnnnnnnnnnnnnnnnnnnnnnnnnnnnnnnnnnnnnnnnnnnnnnnnnnnnnnnnnnnnnnnnnnnnnnnnnnnnnnnnnnnnnnnnnnnnnnnnnnnnnnnnnnnnnnnnnnnnnnnnnnnnnnnnnnnnnnnnnnnnnnnnnnnnnnnnnnnnnnnnnnnnnnnnnnnnnnnnnnnnnnnnnnnnnnnnnnnnnnnnnnnnnnnnnnnnnnnnnnnnnnnnnnnnnnnnnnnnnnnnnnnnnnnnnnnnnnnnnnnnnnnnnnnnnnnnnnnnnnnnnnnnnnnnnnnnnnnnnnnnnnnnnnnnnnnnnnnnnnnnnnnnnnnnnnnnnnnnnnnnnnnnnnnnnnnnnnnnnnnnnnnnnnnnnnnnnnnnnnnnnnnnnnnnnnnnnnnnnnnnnnnnnnnnnnnnnnnnnnnnnnnnnnnnnnnnnnnnnnnnnnnnnnnnnnnnnnnnnnnnnnnnnnnnnnnnnnnnnnnnnnnnnnnnnnnnnnnnnnnnnnnnnnnnnnnnnnnnnnnnnnnnnnnnnnnnnnnnnnnnnnnnnnnnnnnnnnnnnnnnnnnnnnnnnnnnnnnnnnnnnnnnnnnnnnnnnnnnnnnnnnnnnnnnnnnnnnnnnnnnnnnnnnnnnnnnnnnnnnnnnnnnnnaaagcagaagatgaggatattgttctcacacctgatggcacgagagaatttctgacgtttgaagtcccacttaatgattcgggatctgccggccttggtgtcagtgtcaaaggtaaccggtcaaaagagaaccacgcagatttgggaatctttgtcaagtccattattaatggaggagcagcatctaaag

SEQ ID NO: 26499 - DNA, 474 bp, Macaca Mulatta
atgattactctagaagttcggcaaccctgcatttgcctggcctgtgagccttcgccacacaggtagagaagtttcattcctccagggagctctgtccctctcagcacacagcccaagctcctcagtccccaggtggactgagcagagcccatgaggatggacaacgggctggggctcctgagaagcaggccaatgcagaacatccatttccagagacctactatgtgcctggccccaaatcaggtgccagctgtcctatgcacactgacctggcatctgccacccggcacctccctggccgtgaggataagtaaaccacacttgacttctggaaggcctgtttagactcgacctctgacctcaacgttagtcccattctgggctatttgaccttcacacttatttttcctttacagctgcattcccacaggactctccctgggatgctggctgagctgactcccacagctccca

SEQ ID NO: 26500 - DNA, 2196 bp, Macaca Mulatta
  misc_feature (1)...(2196): n = A,T,C or G
gtcacatgagccgcgcgcccgcttcgctccccctcctccccggctgggctgtgtgaatgaagctctgccggctacgtggggcgctcactcaacttggtgtcctggacgccagagccgaccgagcgcgctgcccaccggcggcggacacggactccgccgctcctgacctcggcgannnnnnnnnnnnnnnnnnnnnagttcccagcgaagttgtacctgtgcccgtgcgataacgtcagtggaagctgccccgagtaagtgcgggaaatctagaagtttggagcataaaaaaccagcacgaatccactttacttaaacttcatacgtttattagcaactgctcgggtttaatttcagagatgttgaatttcgcctagtcccacgggacgacgatcattacttcttaactgcacgcgaaacaggagaagaaaaaaaggcaaatcaaaacagactgtctcaggtctcagataagtcatcggagcgctttttcctggtgaattcaccctaggagtttgnnnnnnnnnnnnnnnnnnnnnnnnnnnnnnnnnnnnnnnnnnnnnnnnnnnnnnnnnnnnnnnnnnnnnnnnnnnnnnnnnnnnnnnnnnnnnnnnnnnnnnnnnnnnnnnnnnnnnnnnnnnnnnnnnnnnnnnnnnnnnnnnnnnnnnnnnnnnnnnnnnnnnnnnnnnnnnnnnnnnnnnnnnnnnnnnnnnnnnnnnnnnnnnnnnnnnnnnnnnnnnnnnnnnnnnnnnnnnnnnnnnnnnnnnnnnnnnnnnnnnnnnnnnnnnnnnnnnnnnnnnnnnnnnnnnnnnnnnnnnnnnnnnnnnnnnnnnnnnnnnnnnnnnnnnnnnnnnnnnnnnnnnnnnnnnnnnnnnnnnnnnnnnnnnnnnnnnnnnnnnnnnnnnnnnnnnnnnnnnnnnnnnnnnnnnnnnnnnnnnnnnnnnnnnnnnnnnnnnnnnnnnnnnnnnnnnnnnnnnnnnnnnnnnnnnnnnnnnnnnnnnnnnnnnnnnnnnnnnnnnnnnnnnnnnnnnnnnnnnnnnnnnnnnnnnnnnnntcaggttcattagctggtttgatagacatctctgctcattggatgacagacttaaaagaaggtatatgcacagggggattctggtttaaccatgaacattgttgctggaactctgatcatgtcacctttgaagagagagacaaatgtccagagtggaatagttggtcccagcttatcatcagcacagatgaggnnnnnnnnnnnnnnnnnnnnnnnnnnnnnnnnnnnnnnnnnnnnnnnnnnnnnnnnnnnnnnnnnnnnnnnnnnnnnnnnnnnnnnnnnnnnnnnnnnnnnnnnnnnnnnnnnnnnnnnnnnnnnnnnnnnnnnnnnnnnnnnnnnnnnnnnnnnnnnnnnnnnnnnnnnnnnnnnnnnnnnnnnnnnnnnnnnnnnnnnnnnnnnnnnnnnnnnnnnnnnnnnnnnnnnnnnnnnnnnnnnnnnnnnnnnnnnnnnnnnnnnnnnnnnnnnnnnnnnnnnnnnnnnnnnnnnnnnnnnnnnnnnnnnnnnnnnnnnnnnnnnnnnnnnnnnnnnnnnnnnnnnnnnnnnnnnnnnnnnnnnnnnnnnnnnnnnnnnnnnnnnnnnnnnnnnnnnnnnnnnnnnnnnnggtcagctactattttcccctcaaaacattgtggcgttcattctttgctgccttggtggcagcattcactctacgctccatcaatccatttgggaatagccgcctggtactattttatgtggagtttcacaccccatggcatctctttgagctcgtaccattcattctgctgggcatatttggtggtctgtggggagcgctgtttatccgcacaaacattgcctggtgtcggaaacgaaagaccacccagttgggcaagtatcctgtcatagaagtactcgtcgtgacagccatcactgccatcctggctttccccaatgaatacactcggatgagcacaagtgagctcatttctgagctgtttaatgactgtggccttctggactcctccaagctctgtgattatgagaaccgtttcaacacaagcaaggggggtgaactgcctgacagaccggctggcgtgggagtctacagtgcaatgtggcagctggctttaacactcatactgaaaattgtcattactatattcacctttggcatgaag

SEQ ID NO: 26501 - DNA, 719 bp, Macaca Mulatta
cacacaacagctgcatatcatccgcggtcgtgggctcagagtttgtacagaagtacctgggtgagggccccgcatggtccgggatgtgttccgcctggccaaggagaatgcacctgccatcatcttcatagatgagatttgatgccattgccaccaagagattcgatgctcagacgggagccgacagggaggttcagaggatcctgctggagctgctgaatcagatggatggatttgatcagaatgtcaatgtcaaggtgatcatgggcacaaacagagcagacaccctggatccagccctgctacggccaggacggctggaccgtaaaattgaatttccacttcctgaccgccgccagaagagattgattttctccactatcaccagcaagatgaacctctctgaggaggttgacttggaagattatgtggcccggccagataagatttcaggagctgatatcaaactccatctgtcaggagagtggaatgttggctgtccgtgaaaaccgctacattgtcctggccaaggacttcgagaaagcatacaagactgtcatcaagaaggacgagcaggagcatgagttttacaagtgaaccctcccttccctccaacaaaccactcaggggcttggggcttctctcggaacccccaggacctctgtcccaaaagctcattcccttttttcttttaccaggattgggttcttcaataaata

SEQ ID NO: 26502 - DNA, 6308 bp, Macaca Mulatta
  misc_feature (1)...(6308): n = A,T,C or G
tgatgaaaagactcttcctcctactccagttctcatgttactttcaacagatggtgtgctttgtccattttatatgattaatcaaaatcctggggttaagtctctcatcaaaacaccggagcgactttcattagaaggagagcgacagcccaagtcaccagnnnnnnnnnnnnnnnnnnnnnnnnnnnnnnnnnnnnnnnnnnnnnnnnnnnnnnnnnnnnnnnnnnnnnnnnnnnnnnnnnnnnnnnnnnnnnnnnnnnnnnnnnnnnnnnnnnnnnnnnnnnnnnnnnnnnnnnnnnnnnnnnnnnnnnnnnnnnnnnnnnnnnnnnnttgaagtcatcggctactgtcactggggagccatcttcatattccagtggttctgacagctccaaagcagccccgagccctggcccatcaaccttctcttttgttcccccttctaaagcctccctagccctcacccctgcagcgtctcccacaggtccatcagctgcctcattctcctttggatcatctggttttaagcctaccctggaaagtacaccagtgccaagtatgtctgctccaaatatagcagtgaagccctccttcccaccctcaacctctgctgtcaaagtcaacctgagtgaaaagnnnnnnnnnnnnnnnnnnnnnnnnnnnnnnnnnnnnnnnnnnnnnnnnnnnnnnnnnnnnnnnnnnnnnnnnnnnnnnnnnnnnnnnnnnnnnnnnnnnnnnnnnnnnnnnnnnnnnnnnnnnnnnnnnnnnnnnnnnnnnnnnnnnnnnnnnnnnnnnnnnnnnnnnnnnnnnnnnnnnnnnnnnnnnnnnnnnnnnnnnnnnnnnnnnnnnnnnnnnnnnnnnnnnnnnnnnnnnnnnnnnnnnnnnnnnnnnnnnnnnnnnnnnnnnnnnnnnnnnnnnnnnnnnnnnnnnnnnnnnnnnnnnnnnnnnnnnnnnnnnnnnnnnnnnnnnnnnnnnnnnnnnnnnnnnnnnnnnnnnnnnnnnnnnnnnnnnnnnnnnnnnnnnnnnnnnnnnnnnnnnnnnnnnnnnnnnnnnnnnnnnnnnnnnnnnnnnnnnnnnnnnnnnnnnnnnnnnnnnnnnnnnnnnnnnnnnnnnnnnnnnnnnnnnnnnnnnnnnnnnnnnnnnnnnnnnnnnnnnnnnnnnnnnnnnnnnnnnnnnnnnnnnnnnnnnnnnnnnnnnnnnnnnnnnnnnnnnnnnnnnnnnnnnnnnnnnnnnnnnnnnnnnnnnnnnnnnnnnnnnnnnnnnnnnnnnnnnnnnnnnnnnnnnnnnnnnnnnnnnnnnnnnnnnnnnnnnnnnnnnnnnnnnnnnnnnnnnnnnnnnnnnnnnnnnnnnnnnnnnnnnnnnnnnnnnnnnnnnnnnnnnnnnnnnnnnnnnnnnnnnnnnnnnnnnnnnnnnnnnnnnnnnnnnnnnnnnnnnnnnnnnnnnnnnnnnnnnnnnnnnnnnnnnnnnnnnnnnnnnnnnnnnnnnnnnnnnnnnnnnnnnnnnnnnnnnnnnnnnnnnnnnnnnnnnnnnnnnnnnnnnnnnnnnnnnnnnnnnnnnnnnnnnnnnnnnnnnnnnnnnnnnnnnnnnnnnnnnnnnnnnnnnnnnnnnnnnnnnnnnnnnnnnnnnnnnnnnnnnnnnnnnnnnnnnnnnnnnnnnnnnnnnnnnnnnnnnnnnnnnnnnnnnnnnnnnnnnnnnnnnnnnnnnnnnnnnnnnnnnnnnnnnnnnnnnnnnnnnnnnnnnnnnnnnnnnnnnnnnnnnnnnnnnnnnnnnnnnnnnnnnnnnnnnnnnnnnnnnnnnnnnnnnnnnnnnnnnnnnnnnnnnnnnnnnnnnnnnnnnnnnnnnnnnnnnnnnnnnnnnnnnnnnnnnnnnnnnnnnnnnnnnnnnnnnnnnnnnnnnnnnnnnnnnnnnnnnnnnnnnnnnnnnnnnnnnnnnnnnnnnnnnnnnnnnnnnnnnnnnnnnnnnnnnnnnnnnnnnnnnnnnnnnnnnnnnnnnnnnnnnnnnnnnnnnnnnnnnnnnnnnnnnnnnnnnnnnnnnnnnnnnnnnnnnnnnnnnnnnnnnnnnnnnnnnnnnnnnnnnnnnnnnnnnnnnnnnnnnnnnnnnnnnnnnnnnnnnnnnnnnnnnnnnnnnnnnnnnnnnnnnnnnnnnnnnnnnnnnnnnnnnnnnnnnnnnnnnnnnnnnnnnnnnnnnnnnnnnnnnnnnnnnnnnnnnnnnnnnnnnnnnnnnnnnnnnnnnnnnnnnnnnnnnnnnnnnnnnnnnnnnnnnnnnnnnnnnnnnnnnnnnnnnnnnnnnnnnnnnnnnnnnnnnnnnnnnnnnnnnnnnnnnnnnnnnnnnnnnnnnnnnnnnnnnnnnnnnnnnnnnnnnnnnnnnnnnnnnnnnnnnnnnnnnnnnnnnnnnnnnnnnnnnnnnnnnnnnnnnnnnnnnnnnnnnnnnnnnnnnnnnnnnnnnnnnnnnnnnnnnnnnnnnnnnnnnnnnnnnnnnnnnnnnnnnnnnnnnnnnnnnnnnnnnnnnnnnnnnnnnnnnnnnnnnnnnnnnnnnnnnnnnnnnnnnnnnnnnnnnnnnnnnnnnnnnnnnnnnnnnnnnnnnnnnnnnnnnnnnnnnnnnnnnnnnnnnnnnnnnnnnnnnnnnnnnnnnnnnnnnnnnnnnnnnnnnnnnnnnnnnnnnnnnnnnnnnnnnnnnnnnnnnnnnnnnnnnnnnnnnnnnnnnnnnnnnnnnnnnnnnnnnnnnnnnnnnnnnnnnnnnnnnnnnnnnnnnnnnnnnnnnnnnnnnnnnnnnnnnnnnnnnnnnnnnnnnnnnnnnnnnnnnnnnnnnnnnnnnnnnnnnnnnnnnnnnnnnnnnnnnnnnnnnnnnnnnnnnnnnnnnnnnnnnnnnnnnnnnnnnnnnnnnnnnnnnnnnnnnnnnnnnnnnnnnnnnnnnnnnnnnnnnnnnnnnnnnnnnnnnnnnnnnnnnnnnnnnnnnnnnnnnnnnnnnnnnnnnnnnnnnnnnnnnnnnnnnnnnnnnnnnnnnnnnnnnnnnnnnnnnnnnnnnnnnnnnnnnnnnnnnnnnnnnnnnnnnnnnnnnnnnnnnnnnnnnnnnnnnnnnnnnnnnnnnnnnnnnnnnnnnnnnnnnnnnnnnnnnnnnnnnnnnnnnnnnnnnnnnnnnnnnnnnnnnnnnnnnnnnnnnnnnnnnnnnnnnnnnnnnnnnnnnnnnnnnnnnnnnnnnnnnnnnnnnnnnnnnnnnnnnnnnnnnnnnnnnnnnnnnnnnnnnnnnnnnnnnnnnnnnnnnnnnnnnnnnnnnnnnnnnnnnnnnnnnnnnnnnnnnnnnnnnnnnnnnnnnnnnnnnnnnnnnnnnnnnnnnnnnnnnnnnnnnnnnnnnnnnnnnnnnnnnnnnnnnnnnnnnnnnnnnnnnnnnnnnnnnnnnnnnnnnnnnnnnnnnnnnnnnnnnnnnnnnnnnnnnnnnnnnnnnnnnnnnnnnnnnnnnnnnnnnnnnnnnnnnnnnnnnnnnnnnnnnnnnnnnnnnnnnnnnnnnnnnnnnnnnnnnnnnnnnnnnnnnnnnnnnnnnnnnnnnnnnnnnnnnnnnnnnnnnnnnnnnnnnnnnnnnnnnnnnnnnnnnnnnnnnnnnnnnnnnnnnnnnnnnnnnnnnnnnnnnnnnnnnnnnnnnnnnnnnnnnnnnnnnnnnnnnnnnnnnnnnnnnnnnnnnnnnnnnnnnnnnnnnnnnnnnnnnnnnnnnnnnnnnnnnnnnnnnnnnnnnnnnnnnnnnnnnnnnnnnnnnnnnnnnnnnnnnnnnnnnnnnnnnnnnnnnnnnnnnnnnnnnnnnnnnnnnnnnnnnnnnnnnnnnnnnnnnnnnnnnnnnnnnnnnnnnnnnnnnnnnnnnnnnnnnnnnnnnnnnnnnnnnnnnnnnnnnnnnnnnnnnnnnnnnnnnnnnnnnnnnnnnnnnnnnnnnnnnnnnnnnnnnnnnnnnnnnnnnnnnnnnnnnnnnnnnnnnnnnnnnnnnnnnnnnnnnnnnnnnnnnnnnnnnnnnnnnnnnnnnnnnnnnnnnnnnnnnnnnnnnnnnnnnnnnnnnnnnnnnnnnnnnnnnnnnnnnnnnnnnnnnnnnnnnnnnnnnnnnnnnnnnnnnnnnnnnnnnnnnnnnnnnnnnnnnnnnnnnnnnnnnnnnnnnnnnnnnnnnnnnnnnnnnnnnnnnnnnnnnnnnnnnnnnnnnnnnnnnnnnnnnnnnnnnnnnnnnnnnnnnnnnnnnnnnnnnnnnnnnnnnnnnnnnnnnnnnnnnnnnnnnnnnnnnnnnnnnnnnnnnnnnnnnnnnnnnnnnnnnnnnnnnnnnnnnnnnnnnnnnnnnnnnnnnnnnnnnnnnnnnnnnnnnnnnnnnnnnnnnnnnnnnnnnnnnnnnnnnnnnnnnnnnnnnnnnnnnnnnnnnnnnnnnnnnnnnnnnnnnnnnnnnnnnnnnnnnnnnnnnnnnnnnnnnnnnnnnnnnnnnnnnnnnnnnnnnnnnnnnnnnnnnnnnnnnnnnnnnnnnnnnnnnnnnnnnnnnnnnnnnnnnnnnnnnnnnnnnnnnnnnnnnnnnnnnnnnnnnnnnnnnnnnnnnnnnnnnnnnnnnnnnnnnnnnnnnnnnnnnnnnnnnnnnnnnnnnnnnnnnnnnnnnnnnnnnnnnnnnnnnnnnnnnnnnnnnnnnnnnnnnnnnnnnnnnnnnnnnnnnnnnnnnnnnnnnnnnnnnnnnnnnnnnnnnnnnnnnnnnnnnnnnnnnnnnnnnnnnnnnnnnnnnnnnnnnnnnnnnnnnnnnnnnnnnnnnnnnnnnnnnnnnnnnnnnnnnnnnnnnnnnnnnnnnnnnnnnnnnnnnnnnnnnnnnnnnnnnnnnnnnnnnnnnnnnnnnnnnnnnnnnnnnnnnnnnnnnnnnnnnnnnnnnnnnnnnnnnnnnnnnnnnnnnnnnnnnnnnnnnnnnnnnnnnnnnnnnnnnnnnnnnnnnnnnnnnnnnnnnnnnnnnnnnnnnnnnnnnnnnnnnnnnnnnnnnnnnnnnnnnnnnnnnnnnnnnnnnnnnnnnnnnnnnnnnnnnnnnnnnnnnnnnnnnnnnnnnnnnnnnnnnnnnnnnnnnnnnnnnnnnnnnnnnnnnnnnnnnnnnnnnnnnnnnnnnnnnnnnnnnnnnnnnnnnnnnnnnnnnnnnnnnnnnnnnnnnnnnnnnnnnnnnnnnnnnnnnnnnnnnnnnnnnnnnnnnnnnnnnnnnnnnnnnnnnnnnnnnnnnnnnnnnnnnnnnnnnnnnnnnnnnnnnnnnnnnnnnnnnnnnnnnnnnnnnnnnnnnnnnnnnnnnnnnnnnnnnnnnnnnnnnnnnnnnnnnnnnnnnnnnnnnnnnnnnnnnnnnnnnnnnnnnnnnnnnnnnnnnnnnnnnnnnnnnnnnnnnnnnnnnnnnnnnnnnnnnnnnnnnnnnnnnnnnnnnnnnnnnnnnnnnnnnnnnnnnnnnnnnnnnnnnnnnnnnnnnnnnnnnnnnnnnnnnnnnnnnnnnnnnnnnnnnnnnnnnnnnnnnnnnnnnnnnnnnnnnnnnnnnnnnnnnnnnnnnnnnnnnnnnnnnnnnnnnnnnnnnnnnnnnnnnnnnnnnnnnnnnnnnnnnnnnnnnnnnnnnnnnnnnnnnnnnnnnnnnnnnnnnnnnnnnnnnnnnnnnnnnnnnnnnnnnnnnnnnnnnnnnnnnnnnnnnnnnnnnnnnnnnnnnnnnnnnnnnnnnnnnnnnnnnnnnnnnngcagttgagtttcagaagcagccatagcgctcttcagtacaatagtagccagcgtgaggcaggacagtgctgcccgttagccagccttgtccgctcatctccatgtggctcttgggtgctgtgtgtcctactccagagaggagggaccagttgcttgagaagacagcctttatattctgtacgtggcagtgacattggtaaccacacctacccattgtctgctaaccacagtgcagatagcccttgggtagacccaggaagtgggaagacactgctattgccagacaacactagcagaacggtagtggatttgacaacagtgtttgctagcacggcccagagttcatcactgcagttctgttacagtgcttctttatctttaatgcagtatctttgaggcctgtaacatcctagatagttgccatcaaacaaggaccatctcgcattgaaaacagatgtaagactttctctttcagacccagaatctgacagcactttggcttgggtcatgagcaggggcgagttgggaannnnnnnnnnnnnnnnnnnnnnnnnnnnnnnnnnnnnnnnnnnnnnnnatgttttaataaaagtttgacatgacattaattca

SEQ ID NO: 26503 - DNA, 411 bp, Macaca Mulatta
gccagccaccatgctaggtagcaagcgactggggctgtccggactgaccctcgccctgtccctgctcgtgtgcctgggtgcgctggccgaggcgtacccttccaaaccggacaacccgggcgaggacgcgccagcggaggacatggccagatactactcggcgctgcgacactacatcaacctcatcaccaggcagaggtatggcaaacgatctagcccagagacactgatttcagacctcttgatgagagaaagcacagaaaatgttcccagaactcggcttgaagacccttcaatgtggtgatgggaaatgaaacttgctctctgatcttttcctattttcagcccatatttcatcgtgtaaaatgagagtccacccatcctaccaatgcatgcagccactgtgctgaa

SEQ ID NO: 26504 - DNA, 686 bp, Macaca Mulatta
gtattctttgggggatggtttgggccgaatggggagtggaatatttgacatttttcctgttttaaattctaggatagattttaacattctttgcagtcccagtccaaggtaggctgctgtcatagtcttctcactcctaatccatgaccactgtttttttcctatttatatcaccaggtagcctactgcgttaatatttaagttgtcaataggtatgtgtccctgttttgtggcataatataaaataactgaatttcatgagaagatctattccaccggggtatttcagctttgaaaccaaatctgtatatctaatactaaccaatctgttggatgtgggttttaaaaaatgtttgctaaactacccaagtaggatttattgtattaaatgacctttgggtctgaaaagcttttttaacctcttgcttaaaacgcgtcttattttgataagatacttcaaatagcctccaaaagtgtagatccaatcatttaaataaacctgtatgtctatgcatatgtgtacatgcataccccctcctgctcaaactcatacacatgcatgcagattattttccaggttgaacctaggggtgcgttgttgattgggaaaataggtttctgaaaaaccaatagacttgatcatcaaatgaaagtgttttgggataatatctattcctggagaaagg

SEQ ID NO: 26505 - DNA, 785 bp, Macaca Mulatta
ggggggtcaccagactcacactgacttctggggagcaaggcctccacggttaccattgggtcggagatacagatctcgaggaagttctcgtcctgacagatctccagctattgaaggaatactacaacacatctttgcaggattctttgcaaattctgccattcctggatctccacaccctttttcctgcttttaggacaactggaaaacacaggccctcccccagctgacaaggaaaagatcacatctcttccaacagtgacagtaactcaggaacaagttgatatgggtttagagtgtccagtatgcaaagaagattacacagttgaagaggaagtccggcagttaccttgcaatcacttctttcacagcagttgtattgtgccatggctggaactgcatgacacatgtcctgtatgtaggaagagcttaaatggtgaggactctactcggcaaagccagagctctgaggcctctgcaagcaacagatttagcaatgacagtcagttacatgaccgatggactttctgaagctaaagaccacacctgaatctgggctgtggtaatcatcttaccatagctgtacattgtatcaaaacaaaaaattagtagatggatttaggaatcatgtaagaaactcaacacataatattaatgcaatgaaagtttttcttctctaaatttaaagttagtatctacagatggaattgtgtctacaaccaaatgcctcttatccctgattcagagtgatattttataagtgtgaaacttaattttgaagggcc

SEQ ID NO: 26506 - DNA, 1559 bp, Macaca Mulatta
  misc_feature (1)...(1559): n = A,T,C or G
aggatgtcactgctgagcctgccctggctgggcctcggaccggtggcaacgtccccagggctgctcctgatgctggttgtgggctcctggctccttgcccgcgtcctggcctggacctacgccttctatgacaaccgccgccggctccagtgtttcccgcagcccccaaaacagaactggttttgagatcacctgggcctatcactcctacagaggagggcttgaagaacttgacccatatatcggccacctattcccaggggtttatgatatggatgggtcccatcatccccttcatcgttttatgccaccctgacaccattcggtctatcaccaatgcctcagnnnnnnnnnnnnnnnnnnnnnnnnnnnnnnnnnnnnnnnnnnnnnnnnnnnnnnnnnnnnnnnnnnnnnnnnnnnnnnnnnnnnnnnnnnnnnnnnnnnnnnnnnnnnnnnnnnnnnnnnnnnnnnnnnnnnnnnnnnnnnnnnnnnnnnnnnnnnnnnnnnnnnnnnnnnnnnnnnnnnnngacaagtggcagcacctggcctcagagggcagcagtcgtctggacatgtttgagcacatcagcctgatgaccttggacagtctgcagaaatgcatcttcagctttgacagccgttgtcaggannnnnnnnnnnnnnnnnnnnnnnnnnnnnnnnnnnnnnnnnnnnnnnnnnnnnnnnnnnnnnnnnnnnnnnnnnnnnnnnnnnnnnnnnnnnnnnnnnnnnnnnnnnnnnnnnnnnnnnnnnnnnnnnnnnnnnnnnnnnnnnnnnnnnnnnnnnnnnnnnnnnnnnnnnnnnnnnnnnnnnnnnnnnnnnnnnnnnnnnnnnnnnnnnnnnnnnnnnnnnnnnnnnnnnnnnnnnnnnnnnnnnnnnnnnnnnnnnnnnnnnnnnnnnnnnnnnnnnnnnnnnnnnnnnnnnnnnnnnnnnnnnnnnnnnnnnnnnnnnnnnnnnnnnnnnnnnnnnnnnnnnnnnnnnnnnnnnnnnnnnnnnnnnnnnnnnnnnnnnnnnnnnnnnnnnnnnnnnnnnnnnnnnnnnnnnnnnnnnnnnnnnnnnnnnnnnnnnnnnnnnnnnnnnnnnnnnnnnnnnnnnnnnnnnnnnnnnnnnnnnnnnnnnnnnnnnnnnnnnnnnnnnnnnnnnnnnnnnnnnnnnnnnnnnnnnnnnnnnnnnnnnnnnnnnnnnnnnnnnnnnnnnnnnnnnnnnnnnnnnnnnnnnnnnnnnnnnnnnnnnnnnnnnnnnnnnnnnnnnnnnnnnnnnnnnnnnnnnnnnnnnnnnnnnnnnnnnnnnnnnnnnnnnnnnnnnnnnnnnnnnnnnnnnnnnnnnnnnnnnnnnnnnnnnnnnnnnnnnnnnnnnnnnnnnnnnnnnnnnnnnnnnnnnnnnctgcatcgggcagacgttcgccatggcagagatgaagactgtcctggcgctgttgctgctgcacttccggttcctgccggatcacactgagccccgccggaagccggagctgaccatgcgcgccgagggcaggctttggctgcgggtggagcccttga

SEQ ID NO: 26507 - DNA, 668 bp, Macaca Mulatta
atatgaaggtggtgtgttttttctggatatcacattttcatcagattatccatttaagccaccaaaggttactttccgcaccagaatttatcactgcaacatcaacagtcagggagtcatctgtctggacatccttaaagacaactggagtcccgctttgactatttcaaaagttttgctgtctatttgttcccttttgacagactgcaaccctgcggatcctctggttggaagcatagccactcagtatttgaccaacagagcagaacacgacaggatagccagacagtggaccaagagatacgcaacataattcacataatttgtatgcagtgtgaaggagcagaaggcatcttctcactgtgctgcaaatctttatagcctttacaatacggacttctgtgtatatgttatactgattctactctgcttttatcctttggagcctgggagactccccaaaaaggtaaatgctatcaagagtagaactttgtagctgtagattagttatgtttaaaacgcctacttgcaagtcttgcttctttgggatatcaaaatgtattttgtgatgtactaaggatactggtcctgaagtctaccaaatattatagtgcattttagcctaattcattatctgtatgaagttataaaagtagctgtagatgact

SEQ ID NO: 26508 - DNA, 716 bp, Macaca Mulatta
gggcatgactcacacccaagcagttaacctactgaaaaatgcatctggctccattgaaatgcaggtggttgctggaggagatgtgagtgtggtcacaggtcatcagcaggagcctgcaagttccagtctttctttcactgggctgacgtcaagcagtatatttcaggatgatttaggacctcctcaatgtaagtctattacactagagcgaggaccagatggcttaggcttcagtatagttggaggatatggcagccctcatggagacttacccatttatgttaaaacagtgtttgcaaagggagcagcctctgaagatggacgtctgaaaaggggcgatcagatcattgctgtcaatgggcagagtctagaaggagtcacccatgaagaagctgttgccatccttaaacggacaaaaggcactgtcactttgatggttctgtcttgaattggctgccagaattgagccaaccccacccctagctcacctcctactgggaagagaaatggactggtccctgacttcttttatgctgtggttcagcggggtcttccaaaactaatagggggggaaaataaccttaaaaggggtttttttctccatatagaaaaatgcttttccctttactgaacaaaccttcaccatcaatttttcccttttcccctccctggccaatttttgtggaaaacttttacaaaagcaaaaaaggggaatt

SEQ ID NO: 26509 - DNA, 650 bp, Macaca Mulatta
tcttctaccctaaaatattcctataatactttgagctgttctggttcctccagggtgcatggtacccattaacccaaaatatgattatttcccttttttcccattttcagtccttttggaatgttctctgtgaaccacagatatgttgtttaaagctcacatttctttctatcaccacagagattggcctacggtttctgttttgagggtgctattcaataaagctgtgtacactaaatgtctttcctctctgagtgggccttgctctgtccatgggaagttttaatgaggtctcattgtttgaatccctcaggttacctgaggggataagtgcatccagccctgtggctgaagagcattccctcataaagcagtacgtaaatcagcttgatcacggtgcacggtcagtatcccagccctgaattgctaatcatagtagtagttccatagctagactcatagtcattctactctagcactaaaatcctctcgtagtatgtcttattggagatagaggtcttctggggtttaataaaattgtgttgagacttttcaacttgagctggactttgcagctctttcctctcctttccacatattttatggatttcatagcttcataccagtatataagagatgtgtatatgtga

SEQ ID NO: 26510 - DNA, 947 bp, Macaca Mulatta
  misc_feature (1)...(947): n = A,T,C or G
gaaattgaaaaatggacctttgaaaatgctaggtttacaatgagaaacgccataattcgatgtttattctatgggtccttgacatttgggatctggacagctctgttattcatatatttgcaccataatcatgtgagcaactggcagaagaaaagccatgagcctctgtcagcttggtctcctggaaaaaaagtgcatcagcaaattatctatggttcagaccaaataccaaaaccgcacgtaatagtcaaaaggactgatgaagataaagcagagtctannnnnnnnnnnnnnnnnnnnnnnnnnnnnnnnnnnnnnnnnnnnnnnnnnnnnnnnnnnnnnnnnnnnnnnnnnnnnnnnnnnnnnnnnnnnnnnnnnnnnnnnnnnnnnnnnnnnnnnnnnnnnnntgtcttcaaaaacattacccagcccgcctcccgactgccagcattgtcatttgcttccataatgaagaatttcatgccttgtttcggaccgtgtccagtgtcatgaacctcacgccacactattttcttgaagaaattattttggtagatgacatgagcgaagttgnnnnnnnnnnnnnnnnnnnnnnnnnnnnnnnnnnnnnnnnnnnnnnnnnnnnnnnnnnnnnnnnnnnnnnnnnnnnnnnnnnnnnnnnnnnnnnnnnnnnnnnnnnnnnnnnnnnnnnnncaggggatgttctggtgttcctggacagccactgcgaggtgaacagagtatggctggagcccctgctgcatgccattgccaaggaccccaaaatggtggtgtgccctctgatagatgtcattgatgatagaactctggagtataagccttctcctgttgtaaggggagcttttgactggaacctacaatttaaatgggataatgttttctcttatgagatggatggaccagaaggacctactaaaccaatccgg

SEQ ID NO: 26511 - DNA, 479 bp, Macaca Mulatta
ttcacactggtgagaaaccttacaagtgtaatgagtgtggcaagaccttcgttcaaaattcatctcttgtaatgcataaagtcattcatactggagagaaaccttacaagtgtaatgaatgtggcaaggtttttaatcgaaaatcaaaccttgaatgtcatcatagacttcatagtgaaaagaaatcttataaacgtaattaatttgcaaggtttttaggcaacaatcaaaccttgcctgtcatcacagactttatactggagagaaactttacaaatgtgaagaatgtgacaaagttttcaatttcaaatcacgccttgaaatacataggagagttcatactggagagaaataatagaagtgtaaggtttgtgacaaggttttcaggtgtgagtcacacctggcacaacatactggaattcacactggaaaggaactgtacaagtaaaaggagtgtggcaaagcctttaatggtcagt

SEQ ID NO: 26512 - DNA, 899 bp, Macaca Mulatta
  misc_feature (1)...(899): n = A,T,C or G
aggtgctataatggcaggcacaatctgtttcatcttgtgggtgttattcgtaacagacactgtgtggactagaagtgtgaggcaggtctatgaagtacacgattcagatgattggactattcatgacttcgagtgtcccgtggaatgtttctgcccacccagttttcctactgctttgtattgtgaaaatagagggctcaaagaaattcctgctattccttcaagaatttggtatctttatcttcaaaacaacctgatagaaaccattcctgaaaagccattnnnnnnnnnnnnnnnnnnnnnnnnnnnnnnnnnnnnnnnnnnnnnnnnnnnnnnnnnnnnnnnnnnnnnnnnnnnnnnnnnnnnnnnnnnnnnnnnnnnnnnnnnnnnnnnnnnnnnnnnnnnnnnnnnnnnnnnnnnnnnnnnnnnnnnnnnnnnnnnnnnnnnnnnnnnnnnnnnnnnnnnnnnnnnnnnnnnnnnnnnnnnnnnnnnnnnnnnnnnnnnnnnnaacctgacccttcttgacctacagaaccaaaaaattagtgaacaatgcctttcaaagagacacttttaaaggactcaagaacctcatgcagctaacatgggccaagaatgccctgaggaatatgcctccaagattaccagccaatacaatgcaattgtttttagacaacaattccattgaaggaataccagaaaattattttaatgtgattcccaaagtggcctttttgagactaaatcacaacaaattatcagatgagggtctcccatcaagaggatttgatgtatcatcaattctagatcttcaactgtcacacaatcaactcacaaaagttccccgaatcagtgctcatctgcagcaccttcaccttgatcataacaaaattaaaagt

SEQ ID NO: 26513 - DNA, 696 bp, Macaca Mulatta
  misc_feature (1)...(696): n = A,T,C or G
taactttctgttaattattaatccncctttctactgcggtttctgttgtcnnnnnnnnnnnnnnnnnnnnnnnnnnnnnnnnnnnntttactttttacctcttgtgtatatgtagggaatttatagggaaatatgtactttatggaataaattttaagaactaaaatatattttattttgaataaagtaatgggcctttcatcttgcagctaaatcactgattatatatttgctgagctgatttaagggttaaaaaaaattgtatcaagagttttattttttgacttcaaagccttcttaataaagcctcttttctacatnnnnnnnnnnnnnnnnnnnnnnnnnnnnnnnnnnnnnnnnnnnnnnnnnnnnnnnnnnnnnnnnnnnnnnnnnnnnnnnnnnnnnnnnnnnnnnnnnnnnnnnnnnnnnnnnnnnnnnnnnnnnnnnnnnnnnnnnnnnnnnnnnnnnnnnnnnnnnnnnnnnnnnnnnnnnnnnnnnnnnnnnnnnnnnnnnnnnnnnnnnnnnnnnnnnnnnnnnnnnnnnnnnnnnnnnnnnnnnnnnnnnnnnnnnnnnnnnnnnnnnnnnnnnnnnnnnnnnnnnnnnnnnnnnnnnnnnnnnnnnnnnnnnnnnnnnnnnnnnnnnnnnnnnnnnnnnnnnnnnnnnnnnnnnnnnnnnnnnnnnnnnnnnnnnnnnnnn

SEQ ID NO: 26514 - DNA, 668 bp, Macaca Mulatta
aatcaaggcaccattgcctacactcagacagattgatactgcttttgcctttgcctcacttactcgttatgtataaattcactgttgctattgatgtctctgtgaagatgtatgaaggtgggtgagtttggggtagttacgggcttctgtctctttgccagtttctaagaactgttagaaacacccattatttaccagtgttacgtactatgtatatataccttttggagaatcagttttcttgtaagtaatcttacttctccaaagggtgaaaaagagatgaacatatcagataaaggcataggtgggctattccagccacttaagaaggacactgagggtataaaatataagctaccataaaatggaaaagcaccaggaatttattgatgtacttttgaattttatttcacagccttgggaggaagaaactgtgagtggtctcagatgtctgaatgatcttaaaatgttttcaaaccatgttccacatagatgccatgttattcaatgtcagcttgttcattagtaaggagctttatcctcctagccttatattaccagccccccacagccttgcatagaatgtttctgttatctccctagaagaaactggctcagtgacatttctagtgtagtgcagatagaggtcaagaggagcattttgatct

SEQ ID NO: 26515 - DNA, 405 bp, Macaca Mulatta
agcaaaatgggaggacacatttttatgataagctcattgttgaatcctttgaagaagcaccccttcatgttatggttttcacttacatggggtatggaattggaaccctgtttggctatctcagagactttatgagaaactggggaatagaaaaatgcaatgcagccgtggaacgaaaagaacaaagagtacgtatgcacacctccctggatctttgtcaatgcctactactctctaaagtgttctcagaagtggtgatacaggtgcagatcctagaaagcatgaggtgctcaggaactattcagtgtaaatttcattcatctccacttcctaaaccccattccccatgggtttatgaacctgtttttacaaacatctcatgagcaactactatttgccagatac

SEQ ID NO: 26516 - DNA, 704 bp, Macaca Mulatta
  misc_feature (1)...(704): n = A,T,C or G
aggctcgtgcttgtccacctcagcaccctcccccagcttgattttaggtctccccagcaccctcctccctgtgccggtgcaaagtacagagaggtagaggacgacccttgcagactgttgcccagcacacagtaggccctcaataaaagccatttgcactttaaannnnnnnnnnnnnnnnnnnnnnnnnnnnnnnnnnnnnnnnnnnnnnnnnnnnnnnnnnnnnnnnnnnnnnnnnnnnnnnnnnnnnnnnnnnnnnnnnnnnnnnnnnnnnnnnnnnnnnnnnnnnnnnnnnnnnnnnnnnnnnnnnnnnnnnnnnnnnnnnnnnnnnnnnnnnnnnnnnnnnnnnnnnnnnnnnnnnnnnnnnnnnnnnnnnnnnnnnnnnnnnnnnnnnnnnnnnnnnnnnnnnnnnnnnnnnnnnnnnnnnnnnnnnnnnnnnnnnnnnnnnnnnnnnnnnnnnnnnnnnnnnnnnnnnnnnnnnnnnnnnnnnnnnnnnnnnnnnnnnnnnnnnnnnnnnnnnnnnnnnnnnnnnnnnnnnnnnnnnnnnnnnnnnnnnnnnnnnnnnnnnnnnnnnnnnnnnnnnnnnnnnnnnnnnnnnnnnnnnnnnnnnnnnnnnnnnnnnnnnnnnnnnnnnnnnnnnnnnnnnnnnnnnnnnnnnnnnnnnnnnnnnnnnnnnnnnnnnnnnnnnnnnnnnnnnnnnnnnn

SEQ ID NO: 26517 - DNA, 1290 bp, Macaca Mulatta
  misc_feature (1)...(1290): n = A,T,C or G
ggcgccagcggccgcatgccggcggagcaggggcattgagggccggggattccggtaatcgagcacgctggtaggaaaggacccgggacttgaacagtgttgtgcgccgccatgcaggtttccagcctcaatgaggtgaagatttacagtctcagctgcggcaagtcccttcctgagnnnnnnnnnnnnnnnnnnnnnnnnnnnnnnnnnnnnnnnnnnnagatgtccgtaggagaattgaacttattcaggattttgaaatgcctactgtatgtaccactattaaggtgtcaaaagacggacagtacattttagcaactggnnnnnnnnnnnnnnnnnnnnnnnnnnnnnnnnnnnnnnnnnnnnnnnnnnnnnnnnnnnnnnnnnnnnnnnnnnnnnnnnnnnnnnnnnnnnnnnnnnnnnnnnnnnnnnnnnnnnnnnnnnnnnnnnnnnnnnnnnnnnnnnnnnnnnnnnnnnnnnnnnnnnnnnnnnnnnnnnnnnnnnnnnnnnnnnnnnnnnnnnnnnnnnnnnnnnnnnnnnnnnnnnnnnnnnnnnnnnnnnnnnnnnnnnnngttctgaagtttataggttaaacttagaacaaggacgatacctgaatcctctacaaactgatgctgcgnnnnnnnnnnnnnnnnnnnnnnnnnnnnnnnnnnnnnnnnnnnnnnnnnnnnnnnnnnnnnnnnnnnnnnnnnnnnnnnnnnnnnnnnnnnnnnnnnnnnnnnnnnnnnnnnnnnnnnnnnnnnnnnnnnnnnnnnnnnnnnnnnngataaacaatttaccaacaatctctgctttgaaatttaatggtgccttgaccatggcagttggaacatccacagggcagnnnnnnnnnnnnnnnnnnnnnnnnnnnnnnnnnnnnnnnnnnnnnnnnnnnnnnnnnnnnnnnnnnnnnnnnnnnnnnnnnnnnnnnnnnnnnnnnnnnnnnnnnnnnnnnnnnnnnnnnnnnnnnnnnnnnnnnnnnnnnnnnnnnnnnnnnnnnnnnnnnnnnnnnnnnnnnnnnnnnnnnnnnnnnnnnnnnnnnnnnnnnnnnnnnnnnnnnnnnnnnnnnnnnnnnnnnnnnnnnnnnnnnnnnnnnnnnnnnnnnnnnnnnnnnnnnnnnnnnnnnnnnnnnnnnnnnnnnnnnnnnnnnnnnnnnnnnnnnnnnnnaggtgaaactgatggtaaatccatttgcttatgaagaatataggaaagataaaatacgacagaaaatagaagaaacgcgtgcacagagagtccagttaaagn

SEQ ID NO: 26518 - DNA, 6946 bp, Macaca Mulatta
  misc_feature (1)...(6946): n = A,T,C or G
ttcaaggcctttggaaatggttgaaacagagagctcccatgttgtcttgtcaggttccaatgaaaatcaacctgtggaatttggagagagaaaacccttccaaggaaaagccaagggagaaagaaagacagcaagnnnnnnnnnnnnnnnnnnnnnnnnnnnnnnnnnnnnnnnnnnnnnnnnnnnnnnnnnnnnnnnnnnnnnnnnnnnnnnnnnnnnnnnnnnnnnnnnnnnnnnnnnnnnnnnnnnnnnnnnnnnnnnnnnnnnnnnnnnnnnnnnnnnnnnnnnnnnnnnnnnnnnnnnnnnnnnnnnnnnnnnnnnnnnnnnnnnnnnnnnnnnnnnnnnnnnnnnnnnnnnnnnnnnnnnnnnnnnnnnnnnnnnnnnnnnnnnnnnnnnnnnnnnnnnnnnnnnnnnnnnnnnnnnnnnnnnnnnnnnnnnnnnnnnnnnnnnnnnnnnnnnnnnnnnnnnnnnnnnnnnnnnnnnnnnnnnnnnnnnnnnnnnnnnnnnnnnnnnnnnnnnnnnnnnnnnnnnnnnnnnnnnnnnnnnnnnnnnnnnnnnnnnnnnnnnnnnnnnnnnnnnnnnnnnnnnnnnnnnnnnnnnnnnnnnnnnnnnnnnnnnnnnnnnnnnnnnaggcttccagggccctctagggtgcctgctgcaggcagcagcagcaaggtccagggagcctctaatttaaataggagaagtcagagctttaacagcattgacaaaaacaagcctccaaattatgcaaatggaaacgaaaaagnagattcctccaaaggacctcaatcgtcttcaggtgtaaatggtaacatgcagcctcccagtactgctgggcagcctcctgcctctgccatcccttctccaagtgccagcaaaccctggcgcagcaagtccatgaatgtcaaacacagcgccacctccaccatgttgactgtaaagcagtcaagtccagccacctcacccacaccaccgtcagacagactgaagccacctgtctcagaaggggtcaaaactgctccctcaggacagaaatccatgcttgagaaattcaagctagtcaatgcccggactgctttacgccccccgcagcctcccagttcaggacctagtgatggtgggaaggatgatgatgccttttctgaatctggtgaaatggaaggttttaacagtggtctgaatagtggtggctcaacaaatagcagtcccaaagtgtcacctaagttggcccctccaaaagcttggaagcaaaaatctcagcaataaaaagtctttgctacagccaaaggaaaaagaagaatagaacagggacaaaaataaagtttgcactgaaaaaccagtcaaggaagagaaggatcaggtgacggaaatggttccaaaaagacctccaaaattgccagcttgatcccccagggctacaagacaacagcagccaagaaggaaagtttaattccttcttccaatgggattcccaaaaccaggctctaaagttnnnnnnnnnnnnnnnnnnnnnnnnnnnnnnnnnnnnnnnnnnnnnnnnnnnnnnnnnnnnnnnnnnnnnnnnnnnnnnnnnnnnnnnacagcagccaagaaggaaagcttaattctcatcttccagtggggattccaaaacccgtttctaaagttccaacagcaaagcaaaccatttcacctggctgcacagcaaacaaagagtctgagaaattcaggactaccaaggggagcccttcccagtccttacctaagcctataaccatggagaaagcaagtgcatctagctgtcctggccctttggaaggtagggaagctggtcaagcctcttctgcttcctgtaccatgacagtggcacaaagcagtgggcagagcacaggaaatggtgctgtccaactccctcaacagcagcaacacagccacccgaatactgcgacagtggcaccattcatttacaggncagggcacattcagaaaatgaaggtacctctttaccatcagctgactcctgtaccagtcctacaaagatggacttatcatatagtaagactgttaagcagtgcctggaggagatatctggtnnnnnnnnnnnnnnnnnnnnnnnnnnnnnnnnnnnnnnnnnnnnnnnnnnnnnnnnnnnnnnnnnnnnnnnnnnnnnnnnnnnnnnnnnnnnnnnnnnnnnnnacagcaccttggagacaacatttgacagcactgtgacaacagaagtgaatggaaggagcatacccaacttgacaagtcgacccacccccatgacatggaggttgggccaggcatgtccgcaacttcaggcaggagatgctccctccctgggtgctggctatcctcgcagtggtaccagtcgattcatccacacagacccctcgaggttcatgtataccacgcctctccgtcgagctgctgtgtctcggctgggaaacatgtcacagattgacatgaatgagaaagcaagcagtgacctgaacatgtcttctgaagtcgatgtgggtggatatttgagtgatggtgatatccttgggaaaagtctcaggactgatgacatcaacggtgggtannnnnnnnnnnnnnnnnnnnnnnnnnnnnnnnnnnnnnnnnnnnnnnnnnnnnnnnnnnnnnnnnnnnnnnnnnnnnnnnnnnnnnnnnnnnnnnnnnnnnnnnnnnnnnnnnnnnnnnnnnnnnnnnnnnnnnnnnnnnnnnnnnnnnnnnnnnnnnnnnnnnnnnnnnnnnnnnnnnnnnnnnnnnnnnnnnnnnnnnnnnnnnnnnnnnnnnnnnnnnnnnnnnnnnnnnnnnnnnnnnnnnnnnagctgaagacagattcagagaaacgctccaccacagacgagacctgggatagtcctgaggaactgaaaaaaccagaagaagattttgacagccatggggatgctggtggcaagtggaagactgtgtcctctggacttcctgaagaccccgagaaggcagggcagaaagcttccctatctgtttcacagacaggttcctggagaagaggcatgtctgcccaaggaggggcacaatctaggcagaaagctggaacaagtgtgctcaaaacnnnnnnnnnnnnnnnnnnnnnnnnnnnnnnnnnnnnnnnnnnnnnnnnnnnnnnnnnnnnnnnnnnnnnnnnnnnnnnnnnnnnnnnnnnnnnnnnnnnnnnnnnnnnnnnnnnnnnnnnnnnnnnnnnnnnnnnnnnnnnnnnnnnnnnnnnnnnnnnnnnnnnnnnnnnnnnnnnnnnnnnnnnnnnnnnnnnnnnnnnnnnnnnnnnnnnnnnnnnnnnnnnnnnnnnnnnnnnnnnnnnnnnnnnnnnnnnnnnnnnnnnnnnnnnnnnnnnnnnnnnnnnnnnnnnnnnnnnnnnnnnnnnnnnnnnnnnnnnnnnnnnnnnnnnnnnnnnnnnnnnnnnnnnnnnnnnnnnnnnnnnnnnnnnnnnnnnnnnnnnnnnnnnnnnnnnnnnnnnnnnnnnnnnnnnnnnnnnnnnnnnnnnnnnnnnnnnnnnnnnnnnnnnnnnnnnnnnnnnnnnnnnnnnnnnnnnnnnnnnnnnnnnnnnnnnnnnnnnnnnnnnnnnnnnnnnnnnnnnnnnnnnnnnnnnnnnnnnnnnnnnnnnnnnnnnnnnnnnnnnnnnnnnnnnnnnnnnnnnnnnnnnnnnnnnnnnnnnnnnnnnnnnnnnnnnnnnnnnnnnnnnnnnnnnnnnnnnnnnnnnnnnnnnnnnnnnnnnnnnnnnnnnnnnnnnnnnnnnnnnnnnnnnnnnnnnnnnnnnnnnnnnnnnnnnnnnnnnnnnnnnnnnnnnnnnnnnnnnnnnnnnnnnnnnnnnnnnnnnnnnnnnnnnnnnnnnnnnnnnnnnnnnnnnnnnnnnnnnnnnnnnnncattagcgcggcaaggcagtctggagtcacctcgtcccgtacgggcagcatgggcagtgctggtgggctaagcggcagcagcagccctctcttcaataaaccctcagacttaactacagatgttataagcttaagtcactcgttggcctccagcccagcatcggttcactctttcacatcaggtggtctcgtgtgggctgccaatatgagcagttcctctgcaggcagcaaggacactccgagctaccagtccatgactagcctccacacgagctctgagtccattgacctccccctcagccatcatggctccttgtctggactgaccacaggcactcacgaggtccagagcctgctcatgagaacgggtagtgtgagatctactctctcagaaagnnnnnnnnnnnnnnnnnnnnnnnnnnnnnnnnnnnnnnnnnnnnnnnnnnnnnnnnnnnnnnnnnnnnnnnnnnnnnnnnnnnnnnnnnnnnnnnnnnnnnnnnnnnnnnnnnnnnnnnnnnnnnnnnnnnnnnnnnnnnnnnnnnnnnnnnnntctgccatgtcatcttcggcagctggaaaataccacttttctaactnnnnnnncccaacaaatttgtctcaatttaaccttcctgggcccagcatgatgcgctcaaacagcatcccagcccaagactcttccttcgatctctatgatgactcccagctttgtgggagtgccacttctctggaggaaagacctcgtgccatcagtcattcaggctcattcagagacagcatggaagaagnnnnnnnnnnnnnnnnnnnnnnnnnnnnnnnnnnnnnnnnnnnnnnnnnnnnnnnnnnnnnnnnnnnnnnnnnnnnnnnnnnnnnnnnnnnnnnnnnnnnnnnnnnnnnnnnnnnnnnnnnnnnnnnnnnnnnncaccttgtagcagcttttgaaaagagcttagggaatatgactggccgattgcaaagtctaaccatgacagcggaacaaaaggnnnnnnnnnnnnnnnnnnnnnnnnnnnnnnnnnnnnnnnnnnnnnnnnnnnnnnnnnnnnnnnnnnnnnnnnnnnnnnnnnnnnnnnnnnnnnnnnnnnnnnnnnnnnnagatcttcgcatcagaagacagcattcctctgaaagtgtttctagtatcaacagtgccaccagccctttccagtatgggcagtggtaaggatgctgaatccaaagaaaaagaaaaagaaaacctgggnnnnnnnnnnnnnnnnnnnnnnnnnnnnnnnnnnnnnnnnnnnnnnnnnnnnnnnnnnnnnnnnnnnnnnnnnnnnnnnnnnnnnnnnnnnnnnnnnnnnnnnnnnnnnnnnnnnnnnnnnnnnnnnnnnnnnnnnnnnnnnnnnnnnnnnnnnnnnnnnnnnnnnnnnnnnnnnnnnnnnnnnnnnnnnnnnnnnnnnnnnnnnnnnnnnnnnnnnnnnnnnnnnnnnnnnncagaatgaaattgaaatactgaaggctgaaaatgaccggttgaaggcagaaactggtaacacagctaagcctactcggccaccatcagaatcctcaagcagcacctcctcttcatcttccaggcagtcattaggactttctctaaataatttgaacatcacggaggctgttacctcagnagatattttgctagatgaatgctggtgatgcaactggacataaagatggccgcagtgtgaaaattatagtctccataagcaagggctatggtcgagcaaaggnnnnnnnnnnnnnnnnnnnnnnnnnnnnnnnnnnnnnnnnnnnnnnnnnnnnnnnnnnnnnnnnnnnnnnnnnnnnnnnnnnnnnnnnnnnnnnnnnnnnnnnnnnnnnnnnnnnnnnnnnnnnnnnnnnnnnnnnnnnnnnnnnnnnnnnnnnnnnnnnnnnnnnnnnagacttaattagatccccataacctagaagtgcctgaattgctgccttgtggataccttgttggagataataacgtcatcactgtgaacctcaaaggnnnnnnnnnnnnnnnnnnnnncagttttgttttggatccactgattcctaaaccaattacccaaaagttcttttacttgttgatggagcatcacagaattatactttcgggcccgagggtaccggaaagacctatttggcaaaccaacttgctgaatatgtaataaccaaatctgggaagaagaaaacagaggatgcaattgccacttttaatgtggaccacaagtcaagtaaggnnnnnnnnnnnnnnnnnnnnnnnnnnnnnnnnnnnnnnnnnnnnnnnnnnnnnnnnnnnnnnnnnnnnnnnnnnnnnnnnnnnnnnnnnnnnnnnnnnnnnnnnnnnnnnnnnnnnnnnnnnnnnnnnnnnnnnnnnnnnnnnnnnnnnnnnnnaggtgggtattatgtgcaaatcatacagaaccagtgaaaggctttttaggcagatatcttcgaagaaaactcatagagatagaaattgaaaggaacattcgcaataatgacctagtcaaaattatagattggattcctaagacgtggcatcatctcaacagttttttggaacacacagttcttctgacggtaccattggtnnnnnnnnnnnnnnnnnnnnnnnnnnnnnnnnnnnnnnnnnnnnnnnnnnnnnnnnnnnnnnnnnnnnnnnnnnnnnnnnnnnnnnnnnnnnnnnnnnnnnnnnnnnnnnnnnnnagatgtatgggaaacgcacaccatgggaagatccttcaaagtgggtgcttgacacatatccatggagctcagcatctctgcctcaggagagcccagccttacttcagctgcgaccagaagacgttggatatgaaggctgcacatccactaaggaagccacaacctcaaagcacattcctcaaactgacacagaaggagatcccctgngatgaatatgctaatgaaactccaagaagcagccaattactcgagcacacaaagctgcgacagcgaaagcaccagccaccatgaagacattttggattcgtctcttgaatctactctctag

SEQ ID NO: 26519 - DNA, 143 bp, Macaca Mulatta
agatcaactatggcggggagatccccaagtccatgtacgtgcgggaccaggtgaagactcagtacgagcactcggtgcaaatcaaccgcggctcgtcacaccaagtggaatacgagatcctgtttccaggctgtgtcctcagg

SEQ ID NO: 26520 - DNA, 4735 bp, Macaca Mulatta
  misc_feature (1)...(4735): n = A,T,C or G
agggctgcctccgaagaaaggagaatggcgttcagtaaaggattccggatctatcacaaattggatcccccacctttcagcctcatagtggaaactaggcataaggaagaatgtctcatgttcgagtctggggccgtcgctgtgctcnnnnnnnnnnnnnnnnnnnnnnnnnnnnnnnnnnnnnnnnnnnnnnnnnnnnnnnnnnnnnnnnnnnnnnnnnnnnnnnnnnnnnnnnnnnnnnnnnnnnnnnnnnnnnnnnnnnnnnnnnnnnnnnnnnnnnnnnnnnnnnnnnnnnnnnnnnnnnnnnnnnnnnnnnnnnnnnnnnnnnnnnnnnnnnnnnnnnnnnnnnnnnnnnnnnnnnnnnnnnnnnnnnnnnnnnnnnnnnnnnnnnnnnnnnnnnnnnnnnnnnnnnnnnnnnnnnnnnnnnnnnnnnnnnnnnnnnnnnnnnnnnnnnnnnnnnnnnnnnnnnnnnnnnnnnnnnnnnnnnnnnnnnnnnnnnnnnnnnnnnnnnnnnnnnnnnnnnnnnnnnnnnnnnnnnnnnnnnnnnnnnnnnnnnnnnnnnnnnnnnnnnnnnnnnnnnnnnnnnnnnnnnnnnnnnnnnnnnnnnnnnnnnnnnnnnnnnnnnnnnnnnnnnnnnnnnnnnnnnnnnnnnnnnnnnnnnnnnnnnnnnnnnnnnnnnnnnnnnnnnnnnnnnnnnnnnnnnnnnnnnnnnnnnnnnnnnnnnnnnnnnnnnnnnnnnnnnnnnnnnnnnnnnnnnnnnnnnnnnnnnnnnnnnnnnnnnnnnnnnnnnnnnnnnnnnnnnnnnnnnnnnnnnnnnnnnnnnnnnnnnnnnnnnnnnnnnnnnnnnnnnnnnnnnnnnnnnnnnnnnnnnnnnnnnnnnnnnnnnnnnnnnnnnnnnnnnnnnnnnnnnnnnnnnnnnnnnnnnnnnnnnnnnnnnnnnnnnnnnnnnnnnnnnnnnnnnnnnnnnnnnnnnnnnnnnnnnnnnnnnnnnnnnnnnnnnnnnnnnnnnnnnnnnnnnnnnnnnnnnnnnnnnnnnnnnnnnnnnnnnnnnnnnnnnnnnnnnnnnnnnnnnnnnnnnnnnnnnnnnnnnnnnnnnnnnnnnnnnnnnnnnnnnnnnnnnnnnnnnnnnnnnnnnnnnnnnnnnnnnnnnnnnnnnnnnnnnnnnnnnnnnnnnnnnnnnnnnnnnnnnnnnnnnnnnnnnnnnnnnnnnnnnnnnnnnnngatgctagctaaacagttggaagctcttggtttagctgaaaagcctcagttggtgactcgctttcaagaagtttttcggtcaatgtggtctgtgaatggtgattcaatcagtaagatatatgcaggaactggagctcttgaagggaaagcgaagnaagttaaaagatggtgctcggtctgtcacccggacaattcagaataacttctttgacagctccaagcaagaggccattgatgttttgctgctgggaaatactctgaatagtgatttagctgacaaagctcgagcacttttaactactggaagtttgcgtgngcatcttctaaagtactaaagagcatgtgtgagaatttctacaaatattcaaagcccaagaaaattcgagtatgtgtcggaacctggaatgtgaatggtgggaagcagtttcgcagcatagcttttaaaaatcagacactcactgactggcttcttgatgcacccaagttagctggcatccaggagtttcaagnnnnnnnnnnnnnnnnnnnnnnnnnnnnnnnnnnnnnnnnnnnnnnnnnnnnnnnnnnnnnnnnnnnnnnnnnnnnnnnnnnnnnnnnnnnnnnnnnnnnnnnnnnnnnnnnnnnnnnnnnnnnnnnnnnnnnnnnnnnnnnnnnnnnnnnnnnnnnnnnnnnnnnnnnnnnnnnnnnnnnnnnnnnnnnnnnnnnnnnnnnnnnnnnnnnnnnnnnnnnnnnnnnnnnnnnnnnnnnnnnnnnnnnnnnnnnnnnnnnnnnnnnnnnnnnnnnnnnnnnnnnnnnnnnnnnnnnnnnnnnnnnnnnnnnnnnnnnnnnnnnnnnnnnnnnnnnnnnnnnnnnnnnnnnnnnnnnnnnnnnnnnnnnnnnnnnnnnnnnnnnnnnnnnnnnnnnnnnnnnnnnnnnnnnnnnnnnnnnnngaaggatgctgttttcccatgactatgtattttggtgtggtgatttcaactatcgaattgatctccctaatgaagaagttaaagagctcataagacagcaaaattgggattctcttatagcaggagatcaacttatcaatcagaaaaatgctggacaggtnnnnnnnnnnnnnnnnnnnnnnnnnnnnnnnnnnnnnnnnnnnnnnnnnnnnnnnnnnnnnnnnnnnnnnnnnnnnnnnnnnnnnnnnnnnnnnnnnnnnnnnnnnnnnnnnnnnnnnnnnnnnnnnnnnnnnnnnnnnnnnnnnnnnnnnnnnnnnnnnnnnnnnnnnnnnnnnnnnnnnnnnnnnnnnnnnnnnnnnnnnnnnnnnnnnnnnnnnnnnnnnnnnnnnnnnnnnnnnnnnnnnnnnnnnnnnnnnnnnnnnnnnnnnnnnnnnnnnnnnnnnnnnnnnnnnnnnnnnnnnnnnnnnnnnnnnnnnnnnnnnnnnnnnnnnnnnnnnnnnnnnnnnnnnnnnnnnnnnnnnnnnnnnnnnnnnnnnnnnnnnnnnnnnnnnnnnnnnnnnnnnnnnnnnnnnnnnnnnnnnnnnnnnnnnnnnnnnnnnnnnnnnnnnnnnnnnnnnnnnnnnnnnnnnnnnnnnnnnnnnnnnnnnnnnnnnnnnnnnnnnnnnnnnnnnnnnnnnnnnnnnnnnnnnnnnnnnnnnnnnnnnnnnnnnnnnnnnnnnnnnnnnnnnnnnnnnnnnnnnnnnnnnnnnnnnnnnnnnnnnnnnnnnnnnnnnnnnnnnnnnnnnnnnnnnnnnnnnnnnnnnnnnnnnnnnnnnnnnnnnnnnnnnnnnnnnnnnnnnnnnnnnnnnnnnnnnnnnnnnnnnnnnnnnnnnnnnnnnnnnnnnnnnnnaggtgatgttgatgactatagtgccgaagtggaggaacttcttcctcagcatctccagccatcttcaagttccggccttggtacttcccccagctcttcaccgcgaactagtccctgccagtcacctacgatatcagagggtccggtaccttcccttcccatcagaccaagccgagcaccgtcaagaactcctgggccccccagtgcacagagnnnnnnnnnnnnnnnnnnnnnnnnnnnnnnnnnnnnnnnnnnnnnnnnnnnnnnnnnnnnnnnnnnnnnnnnnnnnnnnnnnnnnnnnnnnnnnnnnnnnnnnnnnnnnnnnnnnnnnnnnnnnnnnnnnnnnnnnnnnnnnnnnnnnnnnnnnnnnnnnnnnnnnnnnnnnnnnnnnnnnnnnnnnnnnnnnnnnnnnnnnnnnnnnnnnnnnnnnnnnnnnnnnnnnnnnnnnnnnnnnnnnnnnnnnnnnnnnnnnnnnnnnnnnnnnnnnnnnnnnnnnnnnnnnnnnnnnnnnnnnnnnnnnnnnnnnnnnnnnnnnnnnnnnnnnnnnnnnnnnnnnnnnnnnnnnnnnnnnnnnnnnnnnnnnnnnnnnnnnnnnnnnnnnnnnnnnnnnnnnnnnnnnnnnnnnnnnnnnnnnnnnnnnnnnnnnnnnnnnnnnnnnnnnnnnnnnnnnnnnnnnnnnnnnnnnnnnnnnnnnnnnnnnnnnnnnnnnnnnnnnnnnnnnnnnnnnnnnnnnnnnnnnnnnnnnnnnnnnnnnnnnnnnnnnnnnnnnnnnnnnnnnnnnnnnnnnnnnnnnnnnnnnnnnnnnnnnnnnnnnnnnnnnnnnnnnnnnnnnnnnnnnnnnnnnnnnnnnnnnnnnnnnnnnnnnnnnnnnnnncgcaggtaaaaacaaatggaatctctggtgtcaaacgagaatcaccgttaaagattgacccatttgaagatctgtcatttaatctgcttgctgtatcaaaggctcagctatctgttcaaacgtcacctgttccaaccccagacccaaagaggttgattcagttgccttctgtaacgcaaagtaatgttaatactttgagttctgtgagttgcatgccaacaatgcctccaattccagctcggagtcagtcccaggaaaatatgcgaagttctccaaacccgtttattaccggcttgaccaggacaaatcctttcagtgacaggactgctgctcctggaaacccatttaaagccgagtctcaagaatcagaggcaacttcatggttctccaaagaagagcccgttactatcaatcctttcccttctctgcagcctctcagtcataacgaaggcaaggcttcatcttcacttgatggctttaaggaaagttttgatctacaggggcagtctacattaaaaattagcaacccaaaaggatgggtaacctttgaggaagaagaggactttggtgtgaaagggaagtcaaagtcagcttgttcagatttactgggtaatctgccaagttcattttccagctccaacctgacattgaatgatgactggaataaaggtacaaatgtctctttctgtgtgttgccatcaagaagacctcctccacctcctgtccctctgctcctgcctggcaccagccctccagtagatcctttcacgaccttggcctctaaggcttcgcccacactggactttacagaaagataacgcc

SEQ ID NO: 26521 - DNA, 150 bp, Macaca Mulatta
gatcaaccccctacgaaaggaggatgagggtgtgtaccagtgccatgcagccaacatggtgggagaggctgagtcccacagcacggtgacggttctagatctgagtaaatacaggagcttccgcttcccagctcccgatgaccgcatgtg

SEQ ID NO: 26522 - DNA, 316 bp, Macaca Mulatta
atagtccaggcccgcacgtgatgattcatttccagtttttactcaatattattcaaagtgttcttactatctttctcccaaaccagccccttcttttggaactaccaggatcatagtatcccaggataaactcaaaatcactttggttcctctcttccttgtgtcctcccatgtggaatcattcattaagctctgtcattccaacattctgaacatcttccatgccttaacttcctctatgttttgtcactgttaattttacccttcatcatggtaagtttgaattcgtgcagtgagtagaattctagcacatcgt

SEQ ID NO: 26523 - DNA, 891 bp, Macaca Mulatta
  misc_feature (1)...(891): n = A,T,C or G
ggaggtgcagggacccagggaaggggccaagtggggggcggcgggcacatgcccggccccagcctcagcactgtacaccggcaccgtgtacggccgaccctctgcactggacaccccaacaactacccatccagctccagctccatgtccgactcccatagcagcttcatggctggctggctgggctcccacagccgggacagtgacctaggtgcccaaggtttaggctcactgccacctgtgaaggacaaactcctgctggagaagaatctcaagcggctgctacagctggagaggaaagggngaaaggcctcagtcagtcctgctccaagagggactccctgctgtgggatttgctgggcagccagaccagctttcagtggacccaggagcagcccctgtcctggttctcggagctgctgggctcaagctctggtgtgcctgaagcatcagagccgaggcctggggaacaggagccgatctgcaaacgagagttcaataaagagatcaagtcgttactgagccagctggagtccctcgacctgcctggctactgtccgctccgtgagccccatcgcacactgaacttcctggctgaccaccgcctcttccctgccctgcagagcgtcgtcaaccaggctgtggataagctccgcggcgcccgctgccgcgacggccgtcctctattccccaccagcttggagcccccctcagagctgcnatctgccgccgctgggctctgagccggctaaacccaccaacagcgggcagcccnnnnnnnnnccccaccccacagtctccagccccaagacgcctcagagaaaacacaaggacagaggaggctccccctccatgtctagtgcccaggtggccaccagattcaagctcaag

SEQ ID NO: 26524 - DNA, 273 bp, Macaca Mulatta
  misc_feature (1)...(273): n = A,T,C or G
gggaccatcccgccgtcatcaagcggcgcttcaccagcgtcctggtggtgtccagtctctcacccctgtgcgtgctgctctggagggaactcacaggcatccagncagccaggcacatccctgctcaccctgatgggcttcaggctggagggcattttcccagcggcgctgctgcccctgttgctgaccatgngattcttttcctgggcccactgatgcagctttctatggattgcccttgtgacctggcagatgggctgaaggttgtcctgg

SEQ ID NO: 26525 - DNA, 1191 bp, Macaca Mulatta
  misc_feature (1)...(1191): n = A,T,C or G
gccactgcgagtgggccggggcgcggagggaggcgcggccggagctcgggtggccgacgctggcccggaccgcgcttcttcgcggcagcaggcggcgcggtccccgtgactctcagaagccgcccaatgtggagccgcgtctttgtcccatacccctgaccattcgtgcgtggcacggagccgggtatctgcgggtacagcgatgaacagggcagacgtggccaggtgagcggcgctgctgaagcctggtgtaacacgaaagnnncactaccatcacccttttctccaaccctgaaaaacagctcctgagacctgaactatagaccatcattttaatcagaccaattgcagctggaacaagcttctctttggggtcacaatgaccacttcaggcaggggaaatttaggcctcatccccaggagtactgctttccagaagcaggaggggcgcctgactgtgaagcaggagccagcgaaccagagctgggggcagggcagcagtctccaaaagaaccatcctcctgtctgcgaaatcttccggctacacttcagacaattatgttaccacgagatgtctgggccacaggaagcgttgagccggctccgggagctctgccactggtggcttatgccagaggtgcacaccaaggagcagatcctggagctgctggtgctcgagcagttcctgagcatcctccctggggagctccgtacctgggtgcagctgcatcaccctgagagtggtgaggaggctgtggctgtggtggaggatttccagagacacctcagtggaccagaggaggtnnnnnnnnnnnnnnnnnnnnnnnnnnnnnnnnnnnnnnnnnnnnnnnnnnnnnnnnnnnnnnnnnnnnnnnnnnnnnnnnnnnnnnnnnnnnnnnnnnnnnnnnnnnnnnnnnnnnnnnnnnnnnnnnnnnnnnnnnnnnnnnnnnnnnnnnnnnnnnnnnnnnnnnnnnnnnnnnnnnnnnnnnnnnnnnnnnnnnnnnnnnnnnnnnnnnnnnnnnnnnnnnnnnnnnnnnnnnnnnnnnnnnnnnnnnnnnnnccaggataccgtggcgtatgaggacctttctgtgggctatactcagaagaaatggaaatgtcccgcactcagtcagagagccctgcagtggaacatgatgccggaaaatgaccgtagcatggcctccttgg

SEQ ID NO: 26526 - DNA, 830 bp, Macaca Mulatta
  misc_feature (1)...(830): n = A,T,C or G
gggggccgctggggtcgttcgtgtctgttgaacggttgtgggagtcttgctgctttgggtagggggttaaaatcgtttcttgagaggaacgactctgtccgaagagataatgagtttagctctgagaagtgagcttgtagtagacaaaacnnnnnnnnnnnnnnnnnnnnnnctgtctgaggaacagaaacaagaaattaaagatgcttttgaactatttgatacagacaaagatgaagcaatagattatcatgaattaaaggtggcaatgagagccttggggtttgatgtaaaaaaagctgatgtactgaagattcttaaagattatgacagagaagccacagggaaaatcacctttgaagattttaatgaagttgtgacagactggatattggaaagagatccccatgaagaaatactcaaggcatttaaactatttgatgatgatgattcaggtaaaataagcttgaggaatttgcgacgtgttgctagagaattgggtgaaaacatgagtgatgaagagcttcgagctatgatagaagaatttgacaaagatggtgatggagaaataaaccaagaggagttcattgctattatgactggtgacatttaaagaattacaaggataaacactaagaatgttgcagttatcatcttatattctatttttgtgccctggagccatttgaaaaaaaccaaacttagttctttttatcccaaaggaccaaaaaataagcatcttaatgtattttggtattttaccaaactgttaaagttttcctttgttatggaagttatgtttgtttagtaacctccagaataggttttat

SEQ ID NO: 26527 - DNA, 689 bp, Macaca Mulatta
ctgctgcgctatgtcagctctccaggcccttcacttctattctggatttattccctccactagggagagtttaaaaataagaaaagaaagcttctgagagtaaacatttggctcctaagctgaagggaatgtacagctatttagtaagtgataagtttcttattttgaggacttgactcccatttgctctcagtgaccccagggcagagcccagagaagtgttccgtacccactgctgatggcttcccagagtccatgctgagttgaagaacctattgttcttgttggcatccttcctatgctacttctcccatcgctcaaaggggttgcctatggccgggtgtgctctgcactaaatgcagcaccactttcaagcttggtaggaccattccaagaaaagcaggtttcttctccccataccacattgtgcctgaagaacaaggcttcccgtccttgcctgcatgtgagtcacttcttggctgtgcagcaggtccccctgtctccgtatgctggaaggtaggattctgcagcccatgttgctctccacctggcagcagactgtgcaggagccccaacctgtcctccaattccagcattcacagctgatgagcagtgcaagagcagggcgacaggaacggagccaatgatgtgtgggttacactgaggagccaaagacaggcccttaggac

SEQ ID NO: 26528 - DNA, 1558 bp, Macaca Mulatta
  misc_feature (1)...(1558): n = A,T,C or G
atgcttggtaatgctcatataagtacaagcaatattcctagtgctgctagtgtgagtgttgggcctggagttaccagtggtgttaatgtgaatatcttgagtggcatgggcaatggtactatttcttcctccgctgccgttagcagtgtccctattgcagctgcagggatgactgggggatcggtttcaagtcagcagcaacaaccaacagttaacacttcgaggttcagagttgtgaagttagattctagttctgagccctttaaaaaaggtagatggacttgcactgagttctatgaaaaagaaaatgctgtacctgctacagaaggtgtgctgataaataaagtggtggagactgtaaagcaaaatccgatagaagtgacttctgaaagggagagcactagtgggagttcagtgagcagtagtgtngtgtgaccctccagcagatggattttggtagcactggtccacagagtattccagcagttagtatgccacagagtatttctcagtcacagatctcacaagtacagttgcagtctcaagaactgagctatcagcaaaagcaaagtcttcagccagtacctctgcaagccactatgagtgctgcaactggtatccagccatcgcctgtaaatgtggttggtgtaacttcagctttaggtcagcagccttccatttccagtttggctcaaccccagctcccatattctcaggcggctcctnnnnnnnnnnnnnnnnnnnnnnnnnnnnnnnnnnnnnnnnnnnnnnnnnnnnnnnnnnnnnnnnnnnnnnnnnnnnnnnnnnnnnnnnnnnnnnnnnnnnnnnnnnnnnnnnnnnnnnnnnnnnnnnnnnnnnnnnnnnnnnnnnnnnnnnnnnnnnnnnnnnnnnnnnnnnnnnnnnnnnnnnnnnnnnnnnnnnnnnnnnnnnnnnnnnnnnnnnnnnnnnnnnnnnnnnnntgtctgctgtacctactggcagtcagattgcaactattggtcagcaagcaaacatacctactgcagtgcagcagccctctacccaggttccaccttcagttattcagcaaggtgctcctccatcttcgcaagtggttccacctgctcaaactgggattattcatcagggagttcaaactagcgctgcaagccttcctcaacaattggttattgcatcccaaagtaccttgttaactgtgcctccccagccacaaggagtagaaccagtagctcaaggagttgtttcacagcagttgcctgcagttagtcctttgccctctgctagcagtatttctgttacaagtcaggttagttcaactggtccttctggaatgccttctgccccagcaaacttggttccaccacaaaatatagcacaaacccctgctacccaaaatggtaatttggttcaaagtgttagtcaatctcccttgatagcaactaatataaatttgcctttggcacaacagataccactaagttctacccagttctctgcacaatcattagctcaggcaattggaagccaaattgaagatgccaggcgcccagcggagccc

SEQ ID NO: 26529 - DNA, 546 bp, Macaca Mulatta
  misc_feature (1)...(546): n = A,T,C or G
ccgcgcaggagcgtgtgtgaattggaagcggtttcggacgtggatgcggcgttttgtcgctgctagtggtgtctggagaggtacgggctcgggnnnnnnnnnnnnnnnnnnnnnnnnnnnnnnnnnnnnnnnnnnnnnnnnnnnnnnnnnnnnnnnnnnnnnnnnnnnnnnnnnnnnnnnnnnnnnnnnnnnnnnnnnnnnnnnnnnnnnnnnnnnnnnnnnnnnnnnnnnnnnnnnnnnnnnnnnnnnnnnnnnnnnnnnnnnnnnnnnnnnnnnnnnnnnnnnnnnnnnnnnnnnnnnnnnnnnnnnnnnnnnnnnnnnnnnnnnnnnnnnnnnnnnnnnnnnnnnnnnnnnnnnnnnnnnnnnnnnnnnnnnnnnnnnnnnnnnnnnnnnnnnnnnnnnnnnnnnnnnnnnnnnnnnnnnnnnnnnnnnnnnnnnnnnnnnnnnnngggtatcaaactagcaaaccagatgtactctccaagttggcgcatggacaagaaccatggataacagttgctaaaatccagaataaaaattgtccag

SEQ ID NO: 26530 - DNA, 213 bp, Macaca Mulatta
ctcaggaaatactgatagactcacttagtaaaaagattactgaagtatacaaagtctgcattggggatgctgaggatgacggcctcaacccaattcaaaagctggtaaaagtagagtctcgcctggtagaactgtgtgatctcatcgaatccattcccagagaaaatgtggaggcaattgagaggatgaaacagaaagaacggcggcaaaagt

SEQ ID NO: 26531 - DNA, 507 bp, Macaca Mulatta
  misc_feature (1)...(507): n = A,T,C or G
agggccaaaagccaaaatgaaattgatggtacttgttttcaccattgggctaactttgctgctagaagttcaagccatgcctacaaatcgactctcttgctacagaaagatactaaaagatcgcaactgtcacaaccttccggaaggagtagctgacctgacagagattgatgtcaatgtccaggatcatttaatgggatgggaagggatgtgagatgatctgttactgcaacatcagtgaactgctctgctgcccaannnnnnnnnnnnnnnnnnnnnnnnnnnnnnnnnnnnnnnnnnnnnnnnnnnnnnnnnnnnnncatgtattctggagaacaccatccctgatttcccacaaactgcaccacatcagtataactgcatttttagtttctatatagtgcaataaagcatagattctataaattcttacttgtctaagacaagtaaatctgtgttaaacaagtagtaataaaagttaatgcagtctaatttttctctgtggac

SEQ ID NO: 26532 - DNA, 675 bp, Macaca Mulatta
  misc_feature (1)...(675): n = A,T,C or G
ggcatctacagctgcttcagcggggtgcagagcctggccagcccaccgcggcagcccagcccggacctcacggccagctcggcccaggccagcgtgctcaagatgctgcaggcggcccgcgacatggtgaccacggcgggcgtgagcagctccctggaccgcgccactcgcaccatcgagaactggggtggcggccgccgtgcgcccccaccgcccccctgcccgaccccgcggtctggtcccagcccatgcctgcccacccccggctcggccccagagccgagccccaggggctggagaccgccaggcgggggtcgcgcggcgcttgtgcgcagggctccgcagcccccgggccgtcccccgacgccggggccgcccctgcccgacgtctcccgagtgtcgcgccgcccagcctgggaggcgcggtggccggtgcgggccgggcactgcgggaggcacctctcggcctccgagcggcngagcggcccctgtcgcccgcgcgctgtcactacagctcctttcctcgagccgaccgatccggccgccccttcctcccgctcttccccgagcccccggagccggaggacctgccgctgctcgggctggagcacctggcccggcgggaggccctgctgcacgcagcttgggcccggggctcgcgcccgcgccacgctt

SEQ ID NO: 26533 - DNA, 801 bp, Macaca Mulatta
gggcttcagtataagcttttatctcagtctggccctgttcatgccccagtcttcacaatgtctgtagatgtagatggcacaacatatgaagcctcaggaccatccaagaagacagcaaaacttcacgtagcggtgaaggtattgcaggcaatgggatatccaacaggctttgatgcagatattgaatgtatgagttccgatgaaaaatcagataatgaaagtaaaaatgaaacagtgtcttcaaactcaagcaataatactggaaattctacaactgaaacctccagtaccttagaggtaagaactcagggccctatcctcacagcaagtggcaaaaaccctgtaatggagctcaatgaaaaaagaagaggtctcaagtatgaactcatctcagagactggtggaagccatgacaagcgctttgtaatggaggtagaagtagatggacagaaattcagaggcgcaggtccaaataagaaagtggcaaaggcgagtgcagctttagctgccttggagaagctgttttctggacccaatgcggcaaataataagaaaaagaagattatccctcaggcaaaaggtgttgtgaatacggctgtgtccgcagcagtcccagctgttccgggcagaggaaaaggaactcttacaagggggagcttttgttggggcaacagctgcctcctggctacattacctccggcctatggaaacaccctatgggttacggcacagcctgccccctgcctatggtttaccccaaaaaaaagggttcctgttacccccttatgaaaatttcccacc

SEQ ID NO: 26534 - DNA, 129 bp, Macaca Mulatta
gggtggagagttctgaggagcctgtatatgagagccttgaagagtttcacgtctttgtccttgctcatgtgcttaggaggcccatagtcgtcgtggcagacaccatgctgagggactccggaggggaag

SEQ ID NO: 26535 - DNA, 161 bp, Macaca Mulatta
gctttgtaattaacctgggccaggggacagacaagctgaacctgcatttcaaccctcgcttcagcgaatccaccattgtctgcaactcactggatggcagcaactaggggcaagaacaacgggaagatcacctgtgcttcagccacagggtcagaggtcaa

SEQ ID NO: 26536 - DNA, 99 bp, Macaca Mulatta
gcaatgagaagagccatctccaggaacactgctatgctcgtctgttctaccccacagtttcctcatggtgtaatagatcctgtccctgaagtggccaag

SEQ ID NO: 26537 - DNA, 1155 bp, Macaca Mulatta
  misc_feature (1)...(1155): n = A,T,C or G
caggaggggaagctggacaggagcagcccctacatccaggtactggaagaggactggcggcaggcactgcgggaccaccaggagcaggccaacaccatcttctccctgcgcaaggacctccgccagggcgaggcccgacgcctccgnnnnnnnnnnnnnnnnnnnnnnnnnnnnnnnnnnnnnnnnnnnnnnnnnnnnnnnnnnnnnnnnnnnnnnnnnnnnnnnnnnnnnnnnnnnnnnnnnnnnnnnnnnnnnnnnnnnnnnnnnnnnnnnnnnnnnnnnnnnnnnnnnnnnnnnnnnnnnnnnnnnnnnnnnnnnnnnnnnnnnnnnnnnnnnnnnnnnnnnnnnnnnnnnnnnnnnnnnnnnnnnnnnnnnnnnnnnnnnnnnnnnnnnnnnnnnnnnnnnnnnnnnnnnnnnnnnnnnnnnnnnnnnnnnnnnnnnnnnnnnnnnnnnnnnnnnnnnnnnnnnnnnnnnnnnnnnnnnnnnnnnnnnnnnnnnnnnnnnnnnnnnnnnnnnnnnnnnnnnnnnnnnnnnnnnnnnnnnnnnnnnnnnnnnnnnnnnnnnnnnnnnnnnnnnnnnnnnnnnnnnnnnnnnnnnnnnnnnnnnnnnnnnnnnnnnnnnnnnnnnnnnnnnnnnnnnnnnnnnnnnnnnnnnnnnnnnnnnnnnnnnnnnnnnnnnnnnnnnnnnnnnnnnnnnnnnnnnnnnnnnnnnnnnnnnnnnnnnnnnnnnnnnnnnnnnnnnnnnnnnnnnnnnnnnnnnnnnnnnnnnnnnnnnnnnnnnnnnnnnnnnnnnnnnnnnnnnnnnnnnnnnnnnnnnnnnnnnnnnnnnnnnnnnnnnnnnnnnnnnnnnnnnnnnnnnnnnnnnnnnnnnnnnnnnnnnnnnnnnnnnnnnnnnnnnnnnnnnnnnnnnnnnnnnnnnnnnnnnnnnnnnnnnnnnnnnnnnnnnnnnnnnnnnnnnnnnnnnnnnnnnnnnnnnnttgttaagcggcactcagcttgaggaggccatgcgggtgctcgccacccccatgcacacgccatctgtgtaacgtcagggtctgttctatttcaccatgtaacacacaatacatgcattcattgtagaagtgtgagaaaacacggcagcttaaataaataaacagcacgggtgacccgc

SEQ ID NO: 26538 - DNA, 146 bp, Macaca Mulatta
agatcctgacagcgagcggcgatggcacgtgtgccctgtgggacgtggagagcgggcagctactgcagagcttccacggacatggggctgacgtcctctgcttggacctggccccctcagaaactggaaacaccttcgtgtctggg

SEQ ID NO: 26539 - DNA, 4031 bp, Macaca Mulatta
  misc_feature (1)...(4031): n = A,T,C or G
ngaaatccacaagtagcttccacttggaatgaagtaaatagtaatagtaatgtacaatgtgtttctaataatagagatgggagaacagttaattctaattgtgaaattaacaacagatctgctgccaacataagggctctaaatgtgcctccttctttannnnnnnnnnnnnnnnnnnnnnnnnnnnnnnnnnnnnnnnnnnnnnnnnnnnnnnnnnnnnnnnnnnnnnnnnnnnnnnnnnnnnnnnnnnnnnnnnnnnnnnnnnnnnnnnnnnnnnnnnnnnnnnnnnnnnnnnnnnnnnnnnnnnnnnnnnnnnnnnnnnnnnnnnnnnnnnnnnnnnnnnnnnnnnnnnnnnnnnnnnnnnnnnnnnnnnnnnnnnnnnnnnnnnnnnnnnnnnnnnnnnnnnnnnnnnnnnnnnnnnnnnnnnnnnnnnnnnnnnnnnnnnnnnnnnnnnnnnnnnnnnnnnnnnnnnnnnnnnnnnnnnnnnnnnnnnnnnnnnnnnnnnnnnnnnnnnnnnnnnnnnnnnnnnnnnnnnnnnnnnnnnnnnnnnnnnnnnnnnnnnnnnnnnnnnnnnnnnnnnnnnnnnnnnnnnnnnnnnnnnnnnnnnnnnnnnnnnnnnnnnnnnnnnnnnnnnnnnnnnnnnnnnnnnnnnnnnnnnnnnnnnnnnnnnnnnnnnnnnnnnnnnnnnnnnnnnnnnnnnnnnnnnnnnnnnnnnnnnnnnnnnnnnnnnnnnnnnnnnnnnnnnnnnnnnnnnnnnnnnnnnnnnnnnnnnnnnnnnnnnnnnnnnnnnnnnnnnnnnnnnnnnnnnnnnnnnnnnnnnnnnnnnnnnnnnnnnnnnnnnnnnnnnnnnnnnnnnnnnnnnnnnnnnnnnnnnnnnnnnnnnnnnnnnnnnnnnnnnnnnnnnnnnnnnnnnnnnnnnnnnnnnnnnnnnnnnnnnnnnnnnnnnnnnnnnnnnnnnnnnnnnnnnnnnnnnnnnnnnnnnnnnnnnnnnnnnnnnnnnnnnnnnnnnnnnnnnnnnnnnnnnnnnnnnnnnnnnnnnnnnnnnnnnnnnnnnnnnnnnnnnnnnnnnnnnnnnnnnnnnnnnnnnnnnnnnnnnnnnnnnnnnnnnnnnnnnnnnnnnnnnnnnnnnnnnnnnnnnnnnnnnnnnnnnnnnnnnnnnnnnnnnnnnnnnnnnnnnnnnnnnnnnnnnnnnnnnnnnnnnnnnnnnnnnnnnnnnnnnnnnnnnnnnnnnnnnnnnnnnnnnnnnnnnnnnnnnnnnnnnnnnnnnnnnnnnnnnnnnnnnnnnnnnnnnnnnnnnnnnnnnnnnnnnnnnnnnnnnnnnnnnnnnnnnnnnnnnnnnnnnnnnnnnnnnnnnnnnnnnnnnnnnnnnnnnnnnnnnnnnnnnnnnnnnnnnnnnnnnnnnnnnnnnnnnnnnnnnnnnnnnnnnnnnnnnnnnnnnnnnnnnnnnnnnnnnnnnnnnnnnnnnnnnnnnnnnnnnnnnnnnnnnnnnnnnnnnnnnnnnnnnnnnnnnnnnnnnnnnnnnnnnnnnnnnnnnnnnnnnnnnnnnnnnnnnnnnnnnnnnnnnnnnnnnnnnnnnnnnnnnnnnnnnnnnnnnnnnnnnnnnnnnnnnnnnnnnnnnnnnnnnnnnnnnnnnnnnnnnnnnnnnnnnnnnnnnnnnnnnnnnnnnnnnnnnnnnnnnnnnnnnnnnnnnnnnnnnnnnnnnnnnnnnnnnnnnnnnnnnnnnnnnnnnnnnnnnnnnnnnnnnnnnnnnnnnnnnnnnnnnnnnnnnnnnnnnnnnnnnnnnnnnnnnnnnnnnnnnnnnnnnnnnnnnnnnnnnnnnnnnnnnnnnnnnnnnnnnnnnnnnnnnnnnnnnnnnnnnnnnnnnnnnnnnnnnnnnnnnnnnnnnnnnnnnnnnnnnnnnnnnnnnnnnnnnnnnnnnnnnnnnnnnnnnnnnnnnnnnnnnnnnnnnnnnnnnnnnnnnnnnnnnnnnnnnnnnnnnnnnnnnnnnnnnnnnnnnnnnnnnnnnnnnnnnnnnnnnnnnnnnnnnnnnnnnnnnnnnnnnnnnnnnnnnnnnnnnnnnnnnnnnnnnnnnnnnnnnnnnnnnnnnnnnnnnnnnnnnnnnnnnnnnnnnnnnnnnnnnnnnnnnnnnnnnnnnnnnnnnnnnnnnnnnnnnnnnnnnnnnnnnnnnnnnnnnnnnnnnnnnnnnnnnnnnnnnnnnnnnnnnnnnnnnnnnnnnnnnnnnnnnnnnnnnnnnnnnnnnnnnnnnnnnnnnnnnnnnnnnnnnnnnnnnnnnnnnnnnnnnnnnnnnnnnnnnnnnnnnnnnnnnnnnnnnnnnnnnnnnnnnnnnnnnnnnnnnnnnnnnnnnnnnnnnnnnnnnnnnnnnnnnnnnnnnnnnnnnnnnnnnnnnnnnnnnnnnnnnnnnnnnnnnnnnnnnnnnnnnnnnnnnnnnnnnnnnnnnnnnnnnnnnnnnnnnnnnnnnnnnnnnnnnnnnnnnnnnnnnnnnnnnnnnnnnnnnnnnnnnnnnnnnnnnnnnnnnnnnnnnnnnnnnnnnnnnnnnnnnnnnnnnnnnnnnnnnnnnnnnnnnnnnnnnnnnnnnnnnnnnnnnnnnnnnnnnnnnnnnnnnnnnnnnnnnnnnnnnnnnnnnnnnnnnnnnnnnnnnnnnnnnnnnnnnnnnnnnnnnnnnnnnnnnnnnnnnnnnnnnnnnnnnnnnnnnnnnnnnnnnnnnnnnnnnnnnnnnnnnnnnnnnnnnnnnnnnnnnnnnnnnnnnnnnnnnnnnnnnnnnnnnnnnnnnnnnnnnnnnnnnnnnnnnnnnnnnnnnnnnnnnnnnnnnnnnnnnnnnnnnnnnnnnnnnnnnnnnnnnnnnnnnnnnnnnnnnnnnnnnnnnnnnnnnnnnnnnnnnnnnnnnnnnnnnnnnnnnnnnnnnnnnnnnnnnnnnnnnnnnnnnnnnnnnnnnnnnnnnnnnnnnnnnnnnnnnnnnnnnnnnnnnnnnnnnnnnnnnnnnnnnnnnnnnnnnnnnnnnnnnnnnnnnnnnnnnnnnnnnnnnnnnnnnnnnnnnnnnnnnnnnnnnnnnnnnnnnnnnnnnnnnnnnnnnnnnnnnnnnnnnnnnnnnnnnnnnnnnnnnnnnnnnnnnnnnnnnnnnnnnnnnnnnnnnnnnnnnnnnnnnnnnnnnnnnnnnnnnnnnnnnnnnnnnnnnnnnnnnnnnnnnnnnnnnnnnnnnnnnnnnnnnnnnnnnnnnnnnnnnnnnnnnnnnnnnnnnnnnnnnnnnnnnnnnnnnnnnnnnnnnnnnnnnnnnnnnnnnnnnnnnnnnnnnnnnnnnnnnnnnnnnnnnnnnnnnnnnnnnnnnnnnnnnnnnnnnnnnnnnnnnnnnnnnnnnnnnnnnnnnnnnnnnnnnnnnnnnnnnnnnnnnnnnnnnnnnnnnnnnnnnnnnnnnnnnnnnnnnnnnnnnnnnnnnnnnnnnnnnnnnnnnnnnnnnnnnnnnnnnnnnnnnnnnnnnnnnnnnnnnnnnnnnnnnnnnnnnnnnnnnnnnnnnnnnnnnnnnnnnnnnnnnnnnnnnnnnnnnnnnnnnnnnnnnnnnnnnnnnnnnnnnnnnnnnnnnnnnnnnnnnnnnnnnnnnnnnnnnnnnnnnnnnnnnnnnnnnnnnnnnnnnnnnnnnnnnnnnnnnnnnnnnnnnnnnnnnnnnnnnnnnnnnnnnnnnnnnnnnnnnnnnnnnnnnnnnnnnnnnnnnnnnnnnnnnnnnnnnnnnnnnnnnnnnnnnnnnnnnnnnnnnnnnnnnnnnnnnnnnnnnnnnnnnnnnnnatgaccaagataactctcctgtgaaaccctgttacctcaatatcttggaagatgagcaacctttaaatagtgcttcccataaggactcacctgctactgttgattcaactgcagagcctaaccctttgccgttaccgttacctgaaatggaacctttagtgcctagagtcaaagaagttaaatctgctcaggaaactcctgaaagctctctggctggaagtcctgatactgaatctccagtgttagtgaatgactat

SEQ ID NO: 26540 - DNA, 666 bp, Macaca Mulatta
tgtgactggaaaggagaacttactccttaccagaaactggaagctaaaaatacagagggtgacacagaaacacgcagacaccattctaaagaaagtaatgatcttgtattaaattgagcagaattctcacggattttaccattcctgttataaactaatatttgtttttcagccaaaacagaaaatgatttcactggacagtagaaaaatatgtgtaaaatagggaagaaagttagtattggatcagcgtgagtcctgaagcactttcagtgctgtgagaacgacatccagtgtgggtttcattcatttataggcagaggagctgtcagtctctcgtgcctctcggtggcctctgagctgtgctgtcgagtaaagagtagttcttgtctgttacagcctccgtgagtcagacatgcctgcagagtgtgctgtgttttagtcctggtaggaatatataccagagttcccagtatttaaaacccaacagcttcaactattgccctttcaacagttttgccactgaccggatgaaaatggtttcacagtctttggatggatgccataagtggattgtaaccattacagtttaaaccatggtttaagaatttgcccaaataacagaaattacgtctgagaagggataactaggtatagcatatagagcct

SEQ ID NO: 26541 - DNA, 221 bp, Macaca Mulatta
  misc_feature (1)...(221): n = A,T,C or G
gcatgacactactgtgagtggcctacaggtggcgctagatgttttcaacggactccttcctccctatgctgcttgccacttgatggaattgtactttgagaagggnggagtactttgtggagatgtactatcggaatgagacgcagcacgagccgtatctactcacgctacctggctgcagctccagctgtcctctggagaggtttgctgagctggttggc

SEQ ID NO: 26542 - DNA, 149 bp, Macaca Mulatta
  misc_feature (1)...(149): n = A,T,C or G
taggttttgcctttggtgttcagcaacnnnnnnnnnnnnnnnnnnnnnnnnnnnnngatacctgcccactatgtctatccgcaggcttttgtgcagccaggagtggtcattccacatgtccagccgacagcagctgccgcctccaccac

SEQ ID NO: 26543 - DNA, 725 bp, Macaca Mulatta
ccctgcagctcccacctctgcctgaccccagccttaaacacagcccctggccagaggccttgctgggtggagcctctgtgtgactccatactccgcccaccacaacactcatctttcgaataccaagcactctcagcctccctgccttcccctgtcagctttccggggctaactgttctctgcctttgtggttggaggcccggggcgcttagaactcttgctaacctgttcagagccgggaaggagactgggcagtttgaaagcacagcccctcaggtccagttctgcgtctccctctctgcagcgtgtgtaagctattataattaaaatggttttccgcgaaaggatgagtgtgatgtccttgagaggaactgaatgtcctggaatgggaccctacacacaggtaggatcccgaggtctctgggaagtgcctcagaaagttgacttgtcagtccatcgatggtagaatgaggctgtgactgagcactgggacctttctaccagacgtggaccccatgcccagccttggaccaggatgcgcttgggtccccgtcagccagaacaggcggagtgtgcagtatgtgaagtctgcagagaaggatgggcttaggggcgggaggggaagtcttgccactcctgctcccttttgacctctcagcaggcatccagggttggcaaaaggatagttcaagaaggaaccaagctgctgcagttgaggggtgggg

SEQ ID NO: 26544 - DNA, 123 bp, Macaca Mulatta
  misc_feature (1)...(123): n = A,T,C or G
tctacatcccagttgtccttggagaagaagctagaacgggaacgaagacgcacacaaaggtatnttatggaagccaaccggaatgccgtcacatgtcaccatgagctggctcttctatctcac

SEQ ID NO: 26545 - DNA, 549 bp, Macaca Mulatta
aggttctaaggtcttctactggagttttcacgaagtagggaaagaggaagagccaattccatccccgggaactatgttctttagctgtagccccacaaaagcggggtcttcaaagccacataaagtatatcacgtatgacatatatatttccatttctttctctttcatgtagctgaaattgaaagatgaggctctgcttgcagagatccacacactacaggaaacagttggctttggaaatccatctttctgatacccctccagctgaacaattttccgtatgggactcttgagttcctttccttcccagagagtttcaccatatcaagtctgcagctggagaatgaaagaatcttcaccataaacagagacccattcatttatttccattggctgtgttactggatgttttactggttgacaagaaactgggtcacaataaaaaatgaagatatgaaactcaaaattcatcagtgtggttctggagttaacgtatactgaattatatgtaggtatttagttatataaataactatagtgtaattgct

SEQ ID NO: 26546 - DNA, 198 bp, Macaca Mulatta
gtggaggacggacgagtgagctatcaagaagaggggtgccgcccccacagatctatccttttgcttcatctggagcccctcctccctcacacctccatccacacacagcagctccaacctggaggctggaccagctgctttctgttttggctgctctcctcctcttgtaccagcccaggcaatagtgttgatgaggga

SEQ ID NO: 26547 - DNA, 129 bp, Macaca Mulatta
gcccctggccacaggcccaccaccaaccccaatgcatccaaatttgcccagaagattggtggctctgagcgctgcccccgatgcagccaggcagtctatgctgcggagaaggtgattggtgctgggaag

SEQ ID NO: 26548 - DNA, 771 bp, Macaca Mulatta
cagcgtcagtgagtgccgtctcacgtttgagcagttgtcagggtgcactttcactttgccattaactctcttgcttacttttacgtgggactcactctcaagttctttttttgaggcaaagtcaagaacctgaactcgcccaccagccatagcaggggagaccgtgtgggccgcgatgcaggcaacactcatgccgggaacggtcaggatggcaccagcttattggatttttttgttggcatttgtgtttgtttctctactcaccacccaagtgataaaataggattcttggtgcggaacttaaattatcccagaaagccaacagttgcccgccttggggacttgtctttaaattgcctggtttgtacgtttctggccggacgcatgaagaaacaatctgtgacaagtctgagggtcttcctttcagcctgcctcccacgctaagaaaagtcggtgtttccctcctggcaattgttgtaaatttctctttatctgggaactgttttggttttgtttttagttgctctgtgctccctctgaatcaaagcttctagcgctgccggtgaaaaccacaaagggtcctgctttgaggcgccattcctggcccaagagagccaaactttgcaggaggttttggtaaatgggacctcggttctcctgccaaaaccgctgtggcacctaatttagggagaatgaaaaccgtttggtccaccaaccccagaagggccacctaaaaagccccccaaaaatttggctccggggtggaaatca

SEQ ID NO: 26549 - DNA, 1376 bp, Macaca Mulatta
  misc_feature (1)...(1376): n = A,T,C or G
tgtttccaaggtttcctcatatttgggctgttccgcagcggcaggtcccgggaaccaaggcaacagattatcttcctaggctcgcgagagcgccaccttctcccactgctgctggggccccccagtagcaatggctccggtgtccggctcgcgcaccccggatagggaggcctcgggctcggggggaagacgtcgcagttcgtccaagagtccgaagcccagcaaatctgcccgctctccgcggggccgccgctctcgctcgcgctcttgctctcggtccggggaccggaatggactcagccatcagttgggtggcctcagccaaggctcccgaaaccagtcctaccgctcacgctcccggtcgcgttctcgagagcggccctctgcaccccggggcatccccttcgcttctgcctcctcgtcagtctattatggcagctactcgcgcccctacgggagcgacaagccttggcctagcctcctcgacaaggagagggaggagagcctgcggcagaagnnnnnnnnnnnnnnnnnnnnnnnnnnnnnnnnnnnnnnnnnnnnnnnnnnnnnnnnnnnnnnnnnnnnnnnnnnnnnnnnnnnnnnnnnnnnnnnnnnnnnnnnnnnnnnnnnnnnnnnnnnnnnnnnnnnnnnnnnnnnnnnnnnnnnnnnnnnnnnnnnnnnnnnnnnnnnnnnnnnnnnnnnnnnnnnnnnnnnnnnnnnnnnnnnnnnnnnnnnnnnnnnnnnnnnnnnnnnnnnnnnnnnnnnnnnnnnnnnnnnnnnnnnnnnnnnnnnnnnnnnnnnnnnnnnnnnnnnnnnnnnnnnnnnnnnnnnnnnnnnnnnnnnnnnnnnnnnnnnnnnnnnnnnnnnnnnnnnnnnnnnnnnnnnnnnnnnnnnnnnnnnnnnnnnnnnnnnnnnnnnnnnnnnnnnnnnnnnnnnnnnnnnnnnnnnnnnnnnnnnnnnnnnnnnnnnnnnnnnnnaggctgaagaaccctcagatttaattggcccagaggctccaaaaacacttacctctcaagatgataaacctttgannnnnnnnnnnnnnnnnnnnnnnnnnnnnnnnnnnnnnnnnnnnnnnnnnnnnnnnnnnnnnnnnnnnnnnnnnnnnnnnnnnnnnnnnnnnnnnnnnnnnnnnnnnnnnnnnnnnnnnnnnnnnnnnnnnnnnnnnnnnnnnnnnnaggcatcgccgaatggaggctgtgcgactgcgaaaagagaaccagatctatagtgctgatgagaagagagcccttgcatcctttaaccaagaagagagacgaaagagagagaacaagattctggccagttttcgggaaatggtttacagaaagaccaaagggaaggatgacaaataa

SEQ ID NO: 26550 - DNA, 2145 bp, Macaca Mulatta
  misc_feature (1)...(2145): n = A,T,C or G
atgatgcaggaatctgcgacagagacaataagcaacagttcaatgaatcaaaatggaatgagcactctaagcagccaattagatgctggcagcagagatggaagatcaagtggtgacaccagctctgaagtaagcacagtagaactgctgcatctgcaacaacagcaggctctccaggcagcaagacaacttcttttacagcagcaaacaagtggattgaaatctcctaagagcagtgataaacagagaccactgcaggtgcctgtgtcagtggccatgatgactccccaggtgatcacccctcagcaaatgcagcagatccttcagcaacaagtcctgtctcctcagcagctccaagcccttctccaacagcagcaggccgtcatgctgcagcagcaacaactacaagagttttacaagaaacagcaagagcagttacatcttcagctttnnnnnnnnnnnnnnnnnnnnnnnnnnnnnnnacagcagcaannnnnnnnnnnnnnnnnnnnnnnnnnnnnnnnnnnnnnnnnnnnnnnnnnnnnnnnnnnnnnnnnnnnnnnnnnnnnnnntcctggaaagcaagcgaaagnnnnnnnnnnnnnnnnnnnnnnnnnnnnnnnnttggcagcccagcagcttgtcttccagcagcagcttctccagatgcaacaactccagcagcagcagcatctgctcagccttcagcgtcagggactcatctccattccacctggccaggcggcacttcctgtccaatcgctgcctcaagctggcttaagtcctgctgagattcagcagttatggaaagaagtgactggagttcacagtatggaagacaatggcattaaacatggagggctagacctcactactaacaattcctcctcgactacctcctccaccacttccaaagcatcaccaccaataactcatcattccatagtgaatggacagtcttcagttctaaatgcaagacgagacagctcgtcacatgaggagactggggcctctcacactctctatggccatggagtttgcaaatggccaggctgtgaaagcatttgtgaagattttggacagtttttaaagcaccttaacaatgaacacgcattggatgaccgaagcaccgctcagtgtcgagtgcaaatgcaggtggtgcaacagttagaaatacagctttctaaagaacgcgaacgtcttcaagcaatgatgacccacttgcacatgcgaccctcagagcccaaaccatctcccaaacctctaaatctggtgtctagtgtcaccatgtcgaagaatatgttggagacatccccacagagcttacctcaaacccctaccacaccaacggccccagtcaccccgattacccagggaccctcagtaatcaccccagccagtgtgcccaatgtgggagccatacgaaggcgacattcagacaaatacaacattcccatgtcatcagaaattgccccaaactacgaattttataaaaatgcagatgtcagacctccatttacttatgcaactctcataaggcaggctatcatggagtcatctgacaggcagttaacacttaatgaaatttacagctggtttacacggacatttgcttacttcaggcgtaatgcagcaacttggaagaatgcagtacgtcataatcttagcctgcacaagtgttttgttcgagtagaaaatgttaaaggagcagtatggactgtggatgaagtagaataccagaagcgaaggtcacaaaagataacaggaagtccaaccttagtaaaaaatatacctaccagtttaggctatggagcagctcttaatgccagtttgcaggctgccttggcagagagcagtttacctttgctaagtaatcctggactgatcaataatgcatccagtggcctactgcaggctgtccacgaagacctcaatggttctctggatcacattgacagcaacggaaacagtagtccgggctgctcgcctcagccgcacatacattcaatccatgtcaaggaagagccagtgattgcagaggatgaagactgtccaatgtccttagtgacaacagctaatcacagtccagaattagaagacgacagagagattgaagaagagcctttatctgaagatctggaatga

SEQ ID NO: 26551 - DNA, 390 bp, Macaca Mulatta
ccactggctctccaggccacccccgggacgcagggcagacgaaacccacccctagcacacagcaggaccccccaaattactcactatagggggtctgtgccacaggccacacagagctaccttgtggggacttaccgggggtgtcccccgtatgcctgtaccccagatgagtaggggccggccttgcccatcctgccctcctccggccaagggaccctggtgggggtggtcccttcccactgctggatccggactttttaaataaaaacaagtaaaatttgtgttttaagcttgtgagtgtgtaaggttgtttggggtgatgtggagggttcagaaggtgcagcctgggcccccatgacatccctgctgggggcgccaggcctgctctct

SEQ ID NO: 26552 - DNA, 750 bp, Macaca Mulatta
ttgaaaatgtaaatattttatatatctacaataaaataaaaacagctaatagcagagccctgataaaatatctttatgaccaccttgcttcattttctcgaaactcaggcttataaatttgtgcctgcctcgttatttgtgaggtgattaaagcatttctgattgtttggcttcatgtcgatttatagtggggtggcttggaatctgtctgtgcctgctggattccagcaggctaatttgtgctgcctgaaaaagtgtccagtctggcagtgaccttcattgacatcattggtttcagctgtgattaggatagttatgtagcagaaaacattagtgatgcgtcaagcttcctatgaggacccagggatttgaagtgtcctcccatcaccatgatatgcggaatcgagacagtgatgcatgccctgcagtgtcttcttcctcagttaattgcctttaccttcctcctttcatacttcttgatgattcccttctaacccttgctatttcagctcctcacttgttggtgtgcctacgactattccacctaacccatatcccccaccaccaccatattccagttctttctcagaacttttgtctctctgtcctgtaagtctctttatctcagagtctcactttgttctcgtggcttctttctgctgtcttgtcaaatatatagtcccccttaaaggcacctgcctctggcatctcaaccagccaccatttacaacctttgatcgaggtctcctg

SEQ ID NO: 26553 - DNA, 380 bp, Macaca Mulatta
  misc_feature (1)...(380): n = A,T,C or G
agcccattctcatgtttacagcggttgggggtgtggagggggtctgtgaatctganagtcattcaggtgacctcctgcagggagccttctgccaccagcccctccccagaccctcaggtagagccaacaaagtcatgtgctgccctgtcaccgagcccagctgcaggtggctcctggtgctaacagcaaagtcacactcccaggcctgcctgattcccaccccaaggccacagggagcccattcagcttctcccaagcccagtttttgcctggcctcatctcagaccctgcttaggatgggggatgtggctggagagctcctgtgctcaacccttcttaatgcatttttttggaacaataaaattgcctttctctttgta

SEQ ID NO: 26554 - DNA, 384 bp, Macaca Mulatta
tacaattttatctgacttgtaaaagaagtttctagtttgtcatcataaaacatagatatatctcattctagatcaatttagaagatccaatttggggtttattacagcatttgaaatttgagagttagaagtgacacctgtcttgaagtattaaaacaacaggctggctctccctaagttattagaaacatccagaaaaagaacaaaattcaagataagtacaggtgtagaaatatagaagccacagacatagggaaatggtcttatggtcctgaatgggttgggtagacaggatagtttgggaataattttcccaagtacaaaagaaaaataaattgttcaatagcctcatatctcttggtaattttctaaataattctatta

SEQ ID NO: 26555 - DNA, 251 bp, Macaca Mulatta
gtacaagggtcaggtgcctgagaaccaggcgaacttcgtaatcaccacactgaaagtgactgatgctgatgcccccaataccccagcgtgggaggctgtatacactatattgaatgataatgacggacaatttgttgtcaccacaaatccagtgaccaacgatggcattttgaaaacagcaaaggtttgtatggtatatggcaagatgcagaaactggcatccttgaagctgttcatgcccttgttccctg

SEQ ID NO: 26556 - DNA, 519 bp, Macaca Mulatta
taactctaaccaaaattaagatatgtttggaccttaaagaatccaacaactgaagattcaaaaacatcccttctgtattcctatagtgtccatcttaaaatcataactaggtagttctacctgctgcaattgcactgaagtgattagttccctctggctttctataattttaagtctttattatggcatgatggcaaggttgtatcctaaagctcatcacttttgtaggtggtgttagtttttagactagcttttataaatactaattgacataaagcatcaaagactatttatatatttaggctaaaaataatgtttatctccttatgcaatcctgatcatgtgaaaatatggttgctgtttaagtgatgctgaatttgctgtgtgtttataacttaagtgctatatatatatttcgatatgtcttacgtattctctattaatataaagaaccaaattttgtccgctattttgtaacaataaactacaaagcctgaatgagaaaataaactatgtttt

SEQ ID NO: 26557 - DNA, 766 bp, Macaca Mulatta
cttttcagaaacataggcttagatgactgaacagctttcctttaggaaaactcccgagggccaaactggaaacataagagtgactgcttgatgggatagatttcacaggaaccgtcatgtttgttccttcctctcccctgtaacctctcttcttattgattcctatgaagatagaccaactttttatgtcggtttaggtgttcgtgagtttggggagccatttttataaaagaaaaactttattctcctcttttgaaaaggtaagaccttgttttagtgttaactgtttaaaaaataacacttggaataagatttgtaagctcacaaagtctttttctgaagttgcttgagccaagtgcttaaaaagttaataaaataaaatgatctgtatgatacctgcagttgaaaagccaaaaagattatactgtccagtccagtaaatgacatttttagagatgcttttgtagacaagcttatggaatatgtgattgtatttattttccgcaactaaaaaaggaataaaaacttgtgtttgtgtgtttttctaaaactttgtgttttggcaatcgttttataactaaaataaaatgaaagctgaatctacacactgtgaatgttgaaatgtttatcagcttgttttctcttctgcagcattgtgcggggatgcagtagcctcccagagatgtgtaatatacgctgttctgacaatttgtccaaggccctgaaagttcccaacgggttgtcatttgattgaggagggagagga

SEQ ID NO: 26558 - DNA, 602 bp, Macaca Mulatta
tgtcgccatgtgtcttgctgaaggagaacgactttgacaggctggtgctacagtacgctcccagcgcctgaggctggcccagagctgtcaggaccacgaagccaggacagaggccaggagccctgcagccctccccgcctggcacacaccccacatcccctctgggggcaggagcccgcccccagcactcccatctgtgaataaatatctcaacgccagcgtgttcccacctgaggatgtgctctggccactttgctggggggtgtgggggctgacgctcagggagagtcccagggcactggcccccagggctgttcccggagaccagggtctgtgacgagcagcagctgtgcagacccccaccccgcccctcacacagccacaacctgctcctgccaagccagaggcagcacagccctgtccccacacttcaccttggccccgagaggccactgagcagcccaggttggcatcgggggaaactgaggcacagagcggtcatgccactatcatgaggggcaccaagattcaaaatgagaacccctgagtggtctggaggtagcgggagccagggcaggaagcactcaggcctcagctcagca

SEQ ID NO: 26559 - DNA, 3671 bp, Macaca Mulatta
  misc_feature (1)...(3671): n = A,T,C or G
tttgtgaatgacatgcgcatcccggaccagaagtacgtcacgctgaagctcaatgacgtcatccgcttcggctacgatatcctgcccctgannnnnnnnnnnnnnnnnnnnnnnnnnnnnnnnnnnnnnnnnnnagtacaccagccagctgcaggtgagtgtgaagggcttggcacccaagaggagcgaggcgctgccggaacacacaccgtactgcgaggcctcgaaccccaggccagagaagggggaccggagaccaggaacagnnnnnnnnnnnnnnnnnnnnnnnnnnnnnnnnnnnnnnnnnnnnnnnnnnnnnnnnnnnnnnnnnnnnnnnnnnnnnnnnnnnnnnnnnnnnnnnnnnnnnnnnnnnnnnnnnnnnnnnnnnnnnnnnnnnnnnnnnnnnnnnnnnnnnnnnnnnnnnnnnnnnnnnnnnnnnnnnnnnnnnnnnnnnnnnnnnnnnnnnnnnnnnnnnnnnnnnnnnnnnnnnnnnnnnnnnnnnnnnnnnnnnnnnnnnnnnnnnnnnnnnnnnnnnnnnnnnnnnnnnnnnnnnnnnnnnnnnnnnnnnnnnnnnnnnnnnnnnnnnnnnnnnnnnnnnnnnnnnnnnnnnnnnnnnnnnnnnnnnnnnnnnnnnnnnnnnnnnnnnnnnnnnnnnnnnnnnnnnnnnnnnnnnnnnnnnnnnnnnnnnnnnnnnnnnnnnnnnnnnnnnnnnnnnnnnnnnnnnnnnnnnnnnnnnnnnnnnnnnnnnnnnnnnnnnnnnnnnnnnnnnnnnnnnnnnnnnnnnnnnnnnnnnnnnnnnnnnnnnnnnnnnnnnnnnnnnnnnnnnnnnnnnnnnnnnnnnnnnnnnnnnnnnnnnnnnnnnnnnnnnnnnnnnnnnnnnnnnnnnnnnnnnnnnnnnnnnnnnnnnnnnnnnnnnnnnnnnnnnnnnnnnnnnnnnnnnnnnnnnnnnnnnnnnnnnnnnnnnnnnnnnnnnnnnnnnnnnnnnnnnnnnnnnnnnnnnnnnnnnnnnnnnnnnnnnnnnnnnnnnnnnnnnnnnnnnnnnnnnnnnnnnnnnnnnnnnnnnnnnnnnnnnnnnnnnnnnnnnnnnnnnnnnnnnnnnnnnnnnnnnnnnnnnnnnnnnnnnnnnnnnnnnnnnnnnnnnnnnnnnnnnnnnnnnnnnnnnnnnnnnnnnnnnnnnnnnnnnnnnnnnnnnnnnnnnnnnnnnnnnnnnnnnnnnnnnnnnnnnnnnnnnnnnnnnnnnnnnnnnnnnnnnnnnnnnnnnnnnnnnnnnnnnnnnnnnnnnnnnnnnnnnnnnnnnnnnnnnnnnnnnnnnnnnnnnnnnnnnnnnnnnnnnnnnnnnnnnnnnnnnnnnnnnnnnnnnnnnnnnnnnnnnnnnnnnnnnnnnnnnnnnnnnnnnnnnnnnnnnnnnnnnnnnnnnnnnnnnnnnnnnnnnnnnnnnnnnnnnnnnnnnnnnnnnnnnnnnnnnnnnnnnnnnnnnnnnnnnnnnnnnnnnnnnnnnnnnnnnnnnnnnnnnnnnnnnnnnnnnnnnnnnnnnnnnnnnnnnnnnnnnnnnnnnnnnnnnnnnnnnnnnnnnnnnnnnnnnnnnnnnnnnnnnnnnnnnnnnnnnnnnnnnnnnnnnnnnnnnnnnnnnnnnnnnnnnnnnnnnnnnnnnnnnnnnnnnnnnnnnnnnnnnnnnnnnnnnnnnnnnnnnnnnnnnnnnnnnnnnnnnnnnnnnnnnnnnnnnnnnnnnnnnnnnnnnnnnnnnnnnnnnnnnnnnnnnnnnnnnnnnnnnnnnnnnnnnnnnnnnnnnnnnnnnnnnnnnnnnnnnnnnnnnnnnnnnnnnnnnnnnnnnnnnnnnnnnnnnnnnnnnnnnnnnnnnnnnnnnnnnnnnnnnnnnnnnnnnnnnnnnnnnnnnnnnnnnnnnnnnnnnnnnnnnnnnnnnnnnnnnnnnnnnnnnnnnnnnnnnnnnnnnnnnnnnnnnnnnnnnnnnnnnnnnnnnnnnnnnnnnnnnnnnnnnnnnnnnnnnnnnnnnnnnnnnnnnnnnnnnnnnnnnnnnnnnnnnnnnnnnnnnnnnnnnnnnnnnnnnnnnnnnnnnnnnnnnnnnnnnnnnnnnnnnnnnnnnnnnnnnnnnnnnnnnnnnnnnnnnnnnnnnnnnnnnnnnnnnnnnnnnnnnnnnnnnnnnnnnnnnnnnnnnnnnnnnnnnnnnnnnnnnnnnnnnnnnnnnnnnnnnnnnnnnnnnnnnnnnnnnnnnnnnnnnnnnnnnnnnnnnnnnnnnnnnnnnnnnnnnnnnnnnnnnnnnnnnnnnnnnnnnnnnnnnnnnnnnnnnnnnnnnnnnnnnnnnnnnnnnnnnnnnnnnnnnnnnnnnnnnnnnnnnnnnnnnnnnnnnnnnnnnnnnnnnnnnnnnnnnnnnnnnnnnnnnnnnnnnnnnnnnnnnnnnnnnnnnnnnnnnnnnnnnnnnnnnnnnnnnnnnnnnnnnnnnnnnnnnnnnnnnnnnnnnnnnnnnnnnnnnnnnnnnnnnnnnnnnnnnnnnnnnnnnnnnnnnnnnnnnnnnnnnnnnnnnnnnnnnnnnnnnnnnnnnnnnnnnnnnnnnnnnnnnnnnnnnnnnnnnnnnnnnnnnnnnnnnnnnnnnnnnnnnnnnnnnnnnnnnnnnnnnnnnnnnnnnnnnnnnnnnnnnnnnnnnnnnnnnnnnnnnnnnnnnnnnnnnnnnnnnnnnnnnnnnnnnnnnnnnnnnnnnnnnnnnnnnnnnnnnnnnnnnnnnnnnnnnnnnnnnnnnnnnnnnnnnnnnnnnnnnnnnnnnnnnnnnnnnnnnnnnnnnnnnnnnnnnnnnnnnnnnnnnnnnnnnnnnnnnnnnnnnnnnnnnnnnnnnnnnnnnnnnnnnnnnnnnnnnnnnnnnnnnnnnnnnnnnnnnnnnnnnnnnnnnnnnnnnnnnnnnnnnnnnnnnnnnnnnnnnnnnnnnnnnnnnnnnnnnnnnnnnnnnnnnnnnnnnnnnnnnnnnnnnnnnnnnnnnnnnnnnnnnnnnnnnnnnnnnnnnnnnnnnnnnnnnnnnnnnnnnnnnnnnnnnnnnnnnnnnnnnnnnnnnnnnnnnnnnnnnnnnnnnnnnnnnnnnnnnnnnnnnnnnnnnnnnnnnnnnnnnnnnnnnnnnnnnnnnnnnnnnnnnnnnnnnnnnnnnnnnnnnnnnnnnnnnnnnnnnnnnnnnnnnnnnnnnnnnnnnnnnnnnnnnnnnnnnnnnnnnnnnnnnnnnnnnnnnnnnnnnnnnnnnnnnnnnnnnnnnnnnnnnnnnnnnnnnnnnnnnnnnnnnnnnnnnnnnnnnnnnnnnnnnnnnnnnnnnnnnnnnnnnnnnnnnnnnnnnnnnnnnnnnnnnnnnnnnnnnnnnnnnnnnnnnnnnnnnnnnnnnnnnttctctggccgcagtgtggagttgtgctgtgccagccgcaagcccaccatggccgaagcacgggctgtcgccaggaaggctgccaccacagccaccagcacgggtccccgccagcccttcagcagagcccgctcgggcagcgctcgatacacctccccactcagaccccgagggctggaagctccagtcgggctcgttcccgggtccctggtccccgggacacggacgatgatgaggaggaacctgacccttatggtttcatcgtgcagacggcagagattgcggagatcgccag

SEQ ID NO: 26560 - DNA, 2025 bp, Macaca Mulatta
  misc_feature (1)...(2025): n = A,T,C or G
tggtgactgcctggccccttgtgacccccactccagcagggaccctcaaccccgctgagaaacaagaaacaggncaggctgtcctcctttgggtctagagtccctgcgagtttcagatagccggcttgaggcatccagcagccagtcctttggtcttggaccacaccgaggacggctcaacattcagnnnnnnnnnnnnnnnnnnnnnnnnnnnnnnnnnnnnnnnnnnnnnnnnnnnnnnnnnnnnnnnnnnnnnnnnnnnnnnnnnnnnnnnnnnnnnnnnnnnnnnnnnnnnnnnnnnnnnnnnnnnnnnnnnnnnnnnnnnnnnnnnnnnnnnnnnnnnnnnnnnnnnnnnnnnnnnnnnnnnnnnnnnnnnnnnnnnnnnnnnnnnnnnnnnnnnnnnnnnnnnnnnnnnnnnngtatttcctgccaattcagacccagaaactccagtgctgaacctcctgccggagccccaggtggcccgcttcattcgcctgctgccccagacctggctccagggaggcacaccttgcctccgggcagagatcctggcctgcccagtctcannnnnnnnnnnnnnnnnnnnnnnnnnnnnnnnnnnnnnnnnnnnnnnnnnnnnnnnnnnnnnnnnnnnnnnnnnnnnnnnnnnnnnnagctgatgaagcaggtccacgagcaatgccccaacatcacccgcatctacagcatcgggaagagctaccagggcctgaagctgtatgtgatggaaatgtcggaccagcctggggagcatgagctggnnnnnnnnnnnnnnnnnnnnnnnnnnnnnnnnnnnnnnnnnnnnnnnnnnnnnnnnnnnnnnnnnnnnnnnnnnnnnnnnnnnnnnnnnnnnnnnnnnnnnnnnnnnnnnnnnnnnnnnnnnnnnnnnnnnnnnnnnnnnnnnnnnnnnnnnnnnnnnnnnnnnnnnnnnnnnnnnnnnnnnnnnnnnnnnnnnnnnnnnnnnnnnnnnnnnnnnnnnnnnnnnnnnnnnnnnnnnnnnnnnnnnnnnnnnnnnnnnnnnnnnnnnnnnnnnnnnnnnnnnnnnnnnnnnnnnnnnnnnnnnnnnnnnnnnnnnnnnnnnnnnnnnnnnnnnnnnnnnnnnnnnnnnnnnnnnnnnnnnnnnnnnnnnnnnnnnnnnnnnnnnnnnnnnnnnnnnnnnnnnnnnnnnnnnnnnnnnnnnnnnnnnnnnnnnnnnnnnnnnnnnnnnnnnnnnnnnnnnnnnnnnnnnnnnnnnnnnnnnnnnnnnnnnnnnnnnnnnnnnnnnnnnnnnnnnnnnnnnnnnnnnnnnnnnnnnnnnnnnnnnnnnnnnnnnnnnnnnnnnnnnnnnnnnnnnnnnnnnnnnnnnnnnnnnnnnnnnnnnnnnnnnnnnnnnnnnnnnnnnnnnnnnnnnnnnnnnnnnnnnnnnnnnnnnnnnnnnnnnnnnnnnnnnnnnnnnnnnnnnnnnnnnnnnnnnnnnnnnnnnnnnnnnnnnnnnnnnnnnnnnnnnnnnnnnnnnnnnnnnnnnnnnnnnnnnnnnnnnnnnnnnnnnnnnnnnnnnnnnnnnnnnnnnnnnnnnnnnnnnnnnnnnnnnnnaggtgcgcatgggcattgcaggagtggtgcgggacaaggacacggagcttgggattgctgatgctgtcattgccgtggatgggattaaccatgatgtgacaacggngcgtggggcggggattattggcgtctgctgaccccaggggactacatggtgactgccagtgccgagggctaccattcagtgacacggaactgtcgggtcacctttgaagagggccccttcccctgcaatttcgtgctcaccaagactcccaaacagagactgcgcgagctgctggcagctggggccaaggtgcccccagaccttcgcaggcgcctggagcggctaaggggacagaaggattgatacctgcggtttaagagccctagggcaggctggacctgtcaagacgggaaggggaagagtagagagggagggacaaagtgagg

SEQ ID NO: 26561 - DNA, 1593 bp, Macaca Mulatta
  misc_feature (1)...(1593): n = A,T,C or G
gcagctggactctctgcgggagaggctgcagcggaggcggaagcaggactcggggcatttggnnnnnnnnnnnnnnnnnnnnnnnnnnnnnnnnnnnnnnnnnnnnnnnnnnnnnnnnnnnnnnnnnnnnnnnnnnnnnnnnnnnnnnnnnnnnnnnnnnnnnnnnnnnnnnnnnnnnnnnnnnnnnnnnnnnnnnnnnnnnnnnnnnnnnnnnnnnnnnnnnnnnnnnnnnnnnnnnnnnnnnnnnnnnnnnnnnnnnnnnnnnnnnnnnnnnnnnnnnnnnnnnnnnnnnnnnnnnnnnnnnnnnnnnnnnnnnnnnnnnnnnnnnnnnnnnnnnnnnnnnnnnnnnnnnnnnnnnnnnnnnnnnnnnnnnnnnnnnnnnnnnnnnnnnnnnnnnnnnnnnnnnnnnnnnnnnnnnnnnnnnnnnnnnnnnnnnnnnnnnnnnnnnnnnnnnnnnnnnnnnnnnnnnnnnnnnnnnnnnnnnnnnnnnnnnnnnnnnnnnnnnnnnnnnnnnnnnnnnnnnnnnnnnnnnnnnnnnnnnnnnnnnnnnnnnnnnnnnnnnnnnnnnnnnnnnnnnnnnnnnnnnnnnnnnnnnnnnnnnnnnnnnnnnnnnnnnnnnnnnnnnnnnnnnnnnnnnnnnnnnnnnnnnnnnnnnnnnnnnnnnnnnnnnnnnnnnnnnnnnnnnnnnnnnnnnnnnnnnnnnnnnnnnnnnnnnnnnnnnnnnnnnnnnnnnnnnnnnnnnnnnnnnnnnnnnnnnnnnnnnnnnnnnnnnnnnnnnnnnnnnnnnnnnnnnnnnnnnnnnnnnnnnnnnnnnnnnnnnnnnnnnnnnnnnnnnnnnnnnnnnnnnnnnnnnnnnnnnnnnnnnnnnnnnnnnnnnnnnnnnnnnnnnnnnnnnnnnnnnnnnnnnnnnnnnnnnnnnnnnnnnnnnnnnnnnnnnnnnnnnnnnnnnnnnnnnnnnnnnnnnnnnnnnnnnnnnnnnnnnnnnnnnnnnnnnnnnnnnnnnnnnnnnnnnnnnnnnnnnnnnnnnnnnnnnnnnnnnnnnnnnnnnnnnnnnnnnnnnnnnnnnnnnnnnnnnnnnnnnnnnnnnnnnnnnnnnnnnnnnnnnnnnnnnnnnnnnnnnnnnnnnnnnnnnnnnnnnnnnnnnnnnnnnnnnnnnnnnnnnnnnnnnnnnnnnnnnnnnnnnnnnnnnnnnnnnnnnnnnnnnnnnnnnnnnnnnnnnnnnnnnnnnnnnnnnnnnnnnnnnnnnnnnnnnnnnnnnnnnnnnnnnnnnnnnnnnnnnnnnnnnnnnnnnnnnnnnnnnnnnnnnnnnnnnnnnnnnnnnnnnnnnnnnnnnnnnnnnnnnnnnnnnnnnnnnnnnnnnnnnnnnnnnnnnnnnnnnnnnnnnnnnnnnnnnnnnnnnnnnnnnnnnnnnnnnnnnnnnnnnnnnnnnnnnnnnnnnnnnnnnnnnnnnnnnnnnnnnnnnnnnnnnnnnnnnnnnnnnnnnnnnnnnnnnnnnnnnnnnnnnnnnnnnnnnnnnnnnnnnattgaaagactatctcccggcactcgcaagattgagttatttggacgaccacacaatgtgcaacccaactg

SEQ ID NO: 26562 - DNA, 456 bp, Macaca Mulatta
  misc_feature (1)...(456): n = A,T,C or G
gatacatttcatattgctcttcagtcgacaagggaaattacggctacagaaatggtacatcactctgcctgacaaagagaggaagaagatcacccgggaaattgttcagattattctctcccgtggtcacaggacaagcagttttgttgactggaaggaactaaaacttgtttataaaaggnnnnnnnnnnnnnnnnnnnnnnnnnnnnnnnnnnnnnnnnnnnnnnnnnnnnnnnnnnnnnnnnnnnnnnnnnnnnnnnnnnnnnnnnnnnnnnnnnnnnnnnnnnntctgcgagctggatattatctttaattttgaaaaggcttatttcatcctggacgagtttataataggtggagaaattcaggaaacatccaagaaaattgctgtcaaagccattgaagactctgatatgttacaggaggtcagtacagtttcccaaaccatgagagaaa

SEQ ID NO: 26563 - DNA, 184 bp, Macaca Mulatta
gcccctctcagggcagaagacatgcctggagagacatcggactgcaaagactttttatcttgcaactctcgataaaggctgtttgccatggagtctgcttgtgtgttgtgtgtctcagctggtttgctgccccacggtggggagtgggttgtgccgtttggtcggggtgccacccatgcctgtt

SEQ ID NO: 26564 - DNA, 639 bp, Macaca Mulatta
tccttctcccagccttcctctgcctggggcccactgcatctgattggcagtcacttcccatgagggcctggcccacccgctgcagttgccctaaggagaaataaagccgcctttcccctgtcctgctgtggccaaagtgtccttgctccaggttcctgtcctgggcttgggcctctgtctgggccgctcacaagaccttcttttcgggagacagaagccatgtagccctccactcgtccacctctagctggtgcttctcggtcttccagccagcatcctgcagtcctggggagagatcatgggtgctgccgggaatgctggggacaagggtaaggagaggcacaggctgggtgcaggctttgtgcactactggggctcccactgcctctgctgggtgagtctggcataaaatgaggctgaaaccacacctggctgcaggaagaattcattgaaatggcacgcagaagagcgctgggatggaacaggcaccagacaaaacgtcctcatcagtcaatgtgagggcctccccactccatcctcccatttcctacatgccagcggggattacacagactgtccacgctgataccacctcagagaccattctaagctctccatcctatagacagggaaactgag

SEQ ID NO: 26565 - DNA, 660 bp, Macaca Mulatta
  misc_feature (1)...(660): n = A,T,C or G
aataaactatcaatcttgcccagactggagaaaggactgcagcaacaaccctgtttcggtattctggaaaacggtttcccgcaggtttgcagaaactgcctgtggtgtggtccatgtgatgctcaatggatcccgcagtaaaatctttgacaaaaacagnnnnnnnnnnnnnnnnnnnnnnnnnnnnnnnnnnnnnnnnnnnnnnnnnnnnnnnnnnnnnnnnnnnnnnnnnnnnnnnnnnnnnnnnnnnnnnnnnnnnnnnnnnnnnnnnnnnnnnnnnnnnnnnnnnnnnnnnnnnnnnnnnnnnnnnnnnnnnnnnnnnnnnnnnnnnnnnnacagacctgacaagtttcttcagtgtgtgaaaaatcctgaggattcttcttgcctatctgggatctgagccagttgccatggtggttttagctccttgactccttgtggtttatgtcaacaatacatgacttggcctacttgctggtgcagagctgaagattttggagggtcctccacaataaggtcaatgccagagatggaagcctttttccccaaagtcttaaaataacttgtatcatcagcatagcttttattgtgatctatcaatcgtcaagacaaattattgtataagattagaatgaaaattgtgtattaagttacttc

SEQ ID NO: 26566 - DNA, 1505 bp, Macaca Mulatta
ggcattctgcctaggctttgttttgcccacgggctccctctttttctagaagagcagtattcaaccttttagctatgacgacatgtaacaaaagctgcttatgtactaatagttgaaagtctgccttttcaaattcaataaggcatacaaatatctgagagtgactttgttgtatagctacccttgtgatctacagtaatttaatctttctaaaagtaaagcatttacaaaattcagtatgtaaaccactaaccagaaacattatttgggatgcatctctaatactatgtttgagcgcctctgctctaggttgagaatgacattttattgtgaagatgagtgtggtccctcttcccttgaaatcttgtggtttctttttatattaactccccactgctacagcctagaaggtgagaagcagatttttaaccccatctggcagccactcaaggaaaacccagccctggctgtttacctaggctctcttggaatgagagtgcagggtgtaggttatgagggttaggcctttgccagattatacgcgagtttatattttccttcatctggacaggtaactttcttcctttgttcataggcaagaagatctttaatggatagtatctttgactgaacctactaggcatggtcctcatggagtttttgttcaactggaatctctgtgccaacccaggatacaaacttccatccagatgcctctatttccatagctccggggctgctctaacagtttgataccagcagacgtgtttaagccttcaacttgatttccaattattccatcatttctattctgaaatgactcaccgtcatagaaggaagtttattatataatcaaggtttcagatatcctcctgtaaccacctctaccattcaggaggcctaaagttgaaataagtactaaatagaagcctcaccatctgaagtcccttccgttgttttctagttgcttcctccttcctttactcccattctttctaagggctcccccactgcagtgcaaactggccttgggcacacttttgcaaccaacctactgccctggaaaggtggcttccttctccaatcagcctgaatgagcttcagtaagcaattgagagaactgtgtttttccaacaaacggtcacatgtccattgttatggcatctagagaaaaacagagttatccaatcaagtcaggagcataacccaagtagatgcctctaggggcacatggcccctcacatcacaagccagaacctaaataagaattttttaaaacgagtttgagactagcctgtgcaacacagtgagactccatctctatttaaaaaatgaataaaattacctgggcatggtggtgtatacctgtagtccctgctccttgggatgctaaagtgggaggatcacttgagccccagagatggtggctgcagtaagccagatcacaccactggcactccagcctggggcaacagagtgataccttgtctcaaacacaacaacaa

SEQ ID NO: 26567 - DNA, 571 bp, Macaca Mulatta
  misc_feature (1)...(571): n = A,T,C or G
aatggagaagagagatncaaagtaatagctttattccaggacttggcacaaagctggtgctcactaagggtgagctgaagggccaggggctgtgttgctaactttcctaaggtattttagcaatgaggaaatagcttctcctgatgcagtctaaaatcacaatagcatataaagctgcatactgtgtttttctattataacattaactgttcaatatactgaaccaatccccttttccctctgattgtaggtttggtttaagaataaaagggccagatgtaggcgatatcagagggaattaatgctcgccaatgaactacttgctgacccagacaactgtgtctacatcatcttggacgagccctagaatgccatccttcttcaggagctagtttggagatgggtttttctggtgccactgacacctgggctgcccatgccgctcaggctacccttattctcctctgaacttatgttatcaataaagaggcaaattcgcaatatatttgtttttgtgtgccaattgtggttagtatggtataggtgcaaattgtttttaaaaagccattta

SEQ ID NO: 26568 - DNA, 128 bp, Macaca Mulatta
gactccttcgaccacaaaaagttcttccaaatggtcggcctgaagaaaaagagtgcggatgatgtgaagaaggtgtttcatatcctggacaaggacaaaagtggcttcatcgaggaggatgagctggg

SEQ ID NO: 26569 - DNA, 3186 bp, Macaca Mulatta
  misc_feature (1)...(3186): n = A,T,C or G
tggggccggcgccaactggagagcagctgtgcggagcgattggagagccagaggtgnnnnnnnnnnnnnnnnnnnnnnnnnnnnnnnnnnnnnnnnnnnnnnnnnnnnnnnnnnnnnnnnnnnnnnnnnnnnnnnnnnnnnnnnnnnnnnnnnnnnnnnnnnnnnnnnnnnnnnnnnnnnnnnnnnnnnnnnnnnnnnnnnnnnnnnnnnnnnnnnnnnnnnnnnnnnnnnnnnnnnnnnnnnnnnnnnnnnnnnnnnnnnnnnnnnnnnnnnnnnnnnnnnnnnnnnnnnnnnnnnnnnnnnnnnnnnnnnnnnnnnnnnnnnnnnnnnnnnnnnnnnnnnnnnnnnnnnnnnnnnnnnnnnnnnnnnnnnnnnnnnnnnnnnnnnnnnnnnnnnnnnnnnnnnnnnnnnnnnnnnnnnnnnnnnnnnnnnnnnnnnnnnnnnnnnnnnnnnnnnnnnnnnnnnnnnnnnnnnnnnnnnnnnnnnnnnnnnnnnnnnnnnnnnnnnnnnnnnnnnnnnnnnnnnnnnnnnnnnnnnnnnnnnnnnnnnnnnnnnnnnnnntcctacaggacaaggatgggctgaaccagcgctacttccgcaagcgtgccctctacctggcccacttggctcaccacctggcccaggaccccctctttggcagtgtttgcttctcctacacaaatggctgccacctgaaaccctcactgttgctgcggccgcgtgnnnnnnnnnnnnnnnnnnnnnnnnnnnnnnnnnnnnnnnnnnnnnnnnnnnnnnnnnnnnnnnnnnnnnnnnnnnnnnnnnnnnnnnnnnnnnnnnnnnnnnnnnnnnnnnnnnnnnnnnnnnnnnnnnnnnnnnnnnnnnnnnnnnnnnnnnnnnnnnnnnnnnnnnnnnnnnnnnnnnnnnnnnnnnnnnnnnnnnnnnnnnnnnnnnnnnnnnnnnnnnnnnnnnnnnnnnnnnnnnnnnnnnnnnnnnnnnnnnnnnnnnnnnnnnnnnnnnnnnnnnnnnnnnnnnnnnnnnnnnnnnnnnnnnnnnnnnnnnnnnnnnnnnnnnnnnnnnnnnnnnnnnnnnnnnnnnnnnnnnnnnnnnnnnnnnnnnnnnnnnnnnnnnnnnnnnnnnnnnnnnnnnnnnnnnnnnnnnnnnnnnnnnnnnnnnnnnnnnnnnnnnnnnnnnnnnnnnnnnnnnnnnnnnnnnnnnnnnnnnnnnnnnnnnnnnnnnnnnnnnnnnnnnnnnnnnnnnnnnnnnnnnnnnnnnnnnnnnnnnnnnnnnnnnnnnnnnnnnnnnnnnnnnnnnnnnnnnnnnnnnnnnnnnnnnnnnnnnnnnnnnnnnnnnnnnnnnnnnnnnnnnnnnnnnnnnnnnnnnnnnnnnnnnnnnnnnnnnnnnnnnnnnnnnnnnnnnnnnnnnnnnnnnnnnnnnnnnnnnnnnnnnnnnnnnnnnnnnnnnnnnnnnnnnnnnnnnnnnnnnnnnnnnnnnnnnnnnnnnnnnnnnnnnnnnnnnnnnnnnnnnnnnnnnnnnnnnnnnnnnnnnnnnnnnnnnnnnnnnnnnnnnnnnnnnnnnnnnnnnnnnnnnnnnnnnnnnnnnnnnnnnnnnnnnnnnnnnnnnnnnnnnnnnnnnnnnnnnnnnnnnnnnnnnnnnnnnnnnnnnnnnnnnnnnnnnnnnnnnnnnnnnnnnnnnnnnnnnnnnnnnnnnnnnnnnnnnnnnnnnnnnnnnnnnnnnnnnnnnnnnnnnnnnnnnnnnnnnnnnnnnnnnnnnnnnnnnnnnnnnnnnnnnnnnnnnnnnnnnnnnnnnnnnnnnnnnnnnnnnnnnnnnnnnnnnnnnnnnnnnnnnnnnnnnnnnnnnnnnnnnnnnnnnnnnnnnnnnnnnnnnnnnnnnnnnnnnnnnnnnnnnnnnnnnnnnnnnnnnnnnnnnnnnnnnnnnnnnnnnnnnnnnnnnnnnnnnnnnnnnnnnnnnnnnnnnnnnnnnnnnnnnnnnnnnnnnnnnnnnnnnnnnnnnnnnnnnnnnnnnnnnnnnnnnnnnnnnnnnnnnnnnnnnnnnnnnnnnnnnnnnnnnnnnnnnnnnnnnnnnnnnnnnnnnnnnnnnnnnnnnnnnnnnnnnnnnnnnnnnnnnnnnnnnnnnnnnnnnnnnnnnnnnnnnnnnnnnnnnnnnnnnnnnnnnnnnnnnnnnnnnnnnnnnnnnnnnnnnnnnnnnnnnnnnnnnnnnnnnnnnnnnnnnnnnnnnnnnnnnnnnnnnnnnnnnnnnnnnnnnnnnnnnnnnnnnnnnnnnnnnnnnnnnnnnnnnnnnnnnnnnnnnnnnnnnnnnnnnnnnnnnnnnnnnnnnnnnnnnnnnnnnnnnnnnnnnnnnnnnnnnnnnnnnnnnnnnnnnnnnnnnnnnnnnnnnnnnnnnnnnnnnnnnnnnnnnnnnnnnnnnnnnnnnnnnnnnnnnnnnnnnnnnnnnnnnnnnnnnnnnnnnnnnnnnnnnnnnnnnnnnnnnnnnnnnnnnnnnnnnnnnnnnnnnnnnnnnnnnnnnnnnnnnnnnnnnnnnnnactgcagcagcagcacccagccttctctggtgtggcacggctggccaagcggtgggtgcgtgcccagcttcttggtgaggatttcactgatgagagcctgtatctggtggccgctgcccttttcctgcaccctgagcccttcacccctccnagttccccccaggttggcttccttcgattcctttacttggtatcaacgtttgattggaagaataaccccctcattgtcnnnnnnnnnnnnnnnnnnnnngtggaggagcaggtggagatccgcagtggcttcctggcagctcggacacaacttcccgtcatggtcattgttaccccccaagaccgaaagcactctgtgtggacacaggatggaccctcagcccannnnnnnnnnnnnnnnnnnnnnnnnnnnnnnnnnnnnnnnnnnnnnnnnnnnnnnnnnnnnnnnnnnnnnnnnnnnnnnnnnnnnnnnnnnnnnntgttccggccacccttggacatttacgatgtgctgattcgcctgtctcctcgccatatcccacggcaccgccaggccgtggactcgccagctgcctccttctgccgaggcctgctcagccagccggggccctcatccctgatgcccgtgctgggctacgatcctcctcagctctatctgatgcagctcagg

SEQ ID NO: 26570 - DNA, 133 bp, Macaca Mulatta
  misc_feature (1)...(133): n = A,T,C or G
gggaagagctgggcaggagccaccggggaccgtttggactccatataaagcggcagggtgggtgggttgcccaagcaggaaacaccatgccttgtgcccccccccgtgtgtgtctttcagctgagggnccagg

SEQ ID NO: 26571 - DNA, 195 bp, Macaca Mulatta
  misc_feature (1)...(195): n = A,T,C or G
ctttgggaagatccaagctttaatatccanncaagggctaagagcaaaccaatactcagtgggtgattgcagtctaaaattggcatatgtgttattntcaggttaagagcatcactttcaattccataccttcaccaaatattctcagtatacacgcagtcatgattacatgtatcaatttcactaattatgact

SEQ ID NO: 26572 - DNA, 778 bp, Macaca Mulatta
  misc_feature (1)...(778): n = A,T,C or G
ggggtgcgcggtcggtgaccttcctgacgactgcaggtttgtggtggtctctgaggcgtctgtcctgcgccaagatgcttcaaagttttattaaaaatgtgtggatccccatgaagccctactacgccaaagtttaccaggagatttggataggaatggggctgatgggcttcatcgtttataaaatccgggccgctgataaaagaagtaaggctttgaaaggtaagatttttgcttctgaaaatggttgggaatggaaaacaccatcatgtcttttcgggacaaggcatatcattgttctgaattgaaattgatacatggttcagtacatatgtaagatgcagttgaaatgcttcacagcttgaagtttgctgtgcctgctggaaaacagaattctgaatttctgctttttatagtcaagtggatcaagtaaaacttcccaggagtaatagaggaatggatgaattagaggtagtcgatagcatcaccaatagggaagcgcaggtgagctgtgtgagcgtgctgtcctagaaattccctaatgatgtggtttgaatggttttggtttgnnnnnnnnnnnnnnnnnnnnnnnnnnctttgttgttttgaaacgggaagtgtcgccttttttgcgccaggtgggattgcattggcccggattcttggcttactggcaaagctctgcccttcccggggttcacaaccaattcttccggccctcaaacccttcgggggttggccttgaaaaacttacaggggctatctccaccagacaaat

SEQ ID NO: 26573 - DNA, 323 bp, Macaca Mulatta
  misc_feature (1)...(323): n = A,T,C or G
cccggccgcgaccctctgagcccctcgagtccgggtaaccaagcagccagcgccggctcgctgggacccgccaccctggaagccccgcgcccgcagcgcgttcctggcgagtcggaggcagggtggggnnnnnnnnnnnnnnnnnnnnnnnnnnnnnnnnnnnnnnnnnnnnnnnnnnnnnnnnnnnnnnnnnnnnnnnnnnnnnnnnnnnnnnnnnnnnnnnnnnnnnnnnnnnnnnnnnnnnnnnnnnnnnnnnnnnnnnnnnnnnnncaggaaccttgggatcttgcactgcttgcaaagaactggtacacaaacctaga

SEQ ID NO: 26574 - DNA, 6187 bp, Macaca Mulatta
  misc_feature (1)...(6187): n = A,T,C or G
tgcagacagacctttctgtccttcatgaacacacgtgtggtagacagatgactgtcctgcaccccgtgctgctctaggtgtgccagacgtggagctgtccagttgggagaagatggattccaaagatgaaagctcgcacgtgtggccgacgtctgcagagcacgaacagaatgctgcacaggtgaannnnnnnaggtgcactttgttccggacactggaacggtggctcagatcgtctatgctgatgaccaggttcgcccaccccagcaggtggtgtacacggcagatggtgcctcctacacatcagtggatggtccagagcacacgctggtgtacatccacccagtggaagccgcgcaggcatnnnnnnnnnnnnnnnnnnnnnnnnnnnnnnnnnnnnnnnnnnnnnnnnnnnnnnnnnnnnnnnnnnnnnnnnnnnnnnnnnnnnnnnnnnnnnnnnnnnnnnnnnnnnnnnnnnnnnnnnnnnnnnnnnnnnnnnnnnnnnnnnnnnnnnnnnnnnnnnnnnnnnnnnnnnnnnnnnnnnnnnnnnnnnnnnnnnnnnnnnnnnnnnnnnnnnnnnnnnnnnnnnnnnnnnnnnnnnnnnnnnnnnnnnnnnnnnnnnnnnnnnnnnnnnnnnnnnnnnnnnnnnnnnnnnnnnnnnnnnnnnnnnnnnnnnnnnnnnnnnnnnnnnnnnnnnnnnnnnnnnnnnnnnnnnnnnnnnnnnnnnnnnnnnnnnnnnnnnnnnnnnnnnnnnnnnnnnnnnnnnnnnnnnnnnnnnnnnnnnnnnnnnnnnnnnnnnnnnnnnnnnnnnnnnnnnnnnnnnnnnnnnnnnnnnnnnnnnnnnnnnnnnnnnnnnnnnnnnnnnnnnnnnnnnnnnnnnnnnnnnnnnnnnnnnnnnnnnnnnnnnnnnnnnnnnnnnnnnnnnnnnnnnnnnnnnnnnnnnnnnnnnnnnnnnnnnnnnnnnnnnnnnnnnnnnnnnnnnnnnnnnnnnnnnnnnnnnnnnnnnnnnnnnnnnnnnnnnnnnnnnnnnnnnnnnnnnnnnnnnnnnnnnnnnnnnnnnnnnnnnnnnnnnnnnnnnnnnnnnnnnnnnnnnnnnnnnnnnnnnnnnnnnnnnnnnnnnnnnnnnnnnnnnnnnnnnnnnnnnnnnnnnnnnnnnnnnnnnnnnnnnnnnnnnnnnnnnnnnnnnnnnnnnnnnnnnnnnnnnnnnnnnnnnnnnnnnnnnnnnnnnnnnnnnnnnnnnnnnnnnnnnnnnnnnnnnnnnnnnnnnnnnnnnnnnnnnnnnnnnnnnnnnnnnnnnnnnnnnnnnnnnnnnnnnnnnnnnnnnnnnnnnnnnnnnnnnnnnnnnnnnnnnnnnnnnnnnnnnnnnnnnnnnnnnnnnnnnnnnnnnnnnnnnnnnnnnnnnnnnnnnnnnnnnnnnnnnnnnnnnnnnnnnnnnnnnnnnnnnnnnnnnnnnnnnnnnnnnnnnnnnnnnnnnnnnnnnnnnnnnnnnnnnnnnnnnnnnnnnnnnnnnnnnnnnnnnnnnnnnnnnnnnnnnnnnnnnnnnnnnnnnnnnnnnnnnnnnnnnnnnnnnnnnnnnnnnnnnnnnnnnnnnnnnnnnnnnnnnnnnnnnnnnnnnnnnnnnnnnnnnnnnnnnnnnnnnnnnnnnnnnnnnnnnnnnnnnnnnnnnnnnnnnnnnnnnnnnnnnnnnnnnnnnnnnnnnnnnnnnnnnnnnnnnnnnnnnnnnnnnnnnnnnnnnnnnnnnnnnnnnnnnnnnnnnnnnnnnnnnnnnnnnnnnnnnnnnnnnnnnnnnnnnnnnnnnnnnnnnnnnnnnnnnnnnnnnnnnnnnnnnnnnnnnnnnnnnnnnnnnnnnnnnnnnnnnnnnnnnnnnnnnnnnnnnnnnnnnnnnnnnnnnnnnnnnnnnnnnnnnnnnnnnnnnnnnnnnnnnnnnnnnnnnnnnnnnnnnnnnnnnnnnnnnnnnnnnnnnnnnnnnnnnnnnnnnnnnnnnnnnnnnnnnnnnnnnnnnnnnnnnnnnnnnnnnnnnnnnnnnnnnnnnnnnnnnnnnnnnnnnnnnnnnnnnnnnnnnnnnnnnnnnnnnnnnnnnnnnnnnnnnnnnnnnnnnnnnnnnnnnnnnnnnnnnnnnnnnnnnnnnnnnnnnnnnnnnnnnnnnnnnnnnnnnnnnnnnnnnnnnnnnnnnnnnnnnnnnnnnnnnnnnnnnnnnnnnnnnnnnnnnnnnnnnnnnnnnnnnnnnnnnnnnnnnnnnnnnnnnnnnnnnnnnnnnnnnnnnnnnnnnnnnnnnnnnnnnnnnnnnnnnnnnnnnnnnnnnnnnnnnnnnnnnnnnnnnnnnnnnnnnnnnnnnnnnnnnnnnnnnnnnnnnnnnnnnnnnnnnnnnnnnnnnnnnnnnnnnnnnnnnnnnnnnnnnnnnnnnnnnnnnnnnnnnnnnnnnnnnnnnnnnnnnnnnnnnnnnnnnnnnnnnnnnnnnnnnnnnnnnnnnnnnnnnnnnnnnnnnnnnnnnnnnnnnnnnnnnnnnnnnnnnnnnnnnnnnnnnnnnnnnnnnnnnnnnnnnnnnnnnnnnnnnnnnnnnnnnnnnnnnnnnnnnnnnnnnnnnnnnnnnnnnnnnnnnnnnnnnnnnnnnnnnnnnnnnnnnnnnnnnnnnnnnnnnnnnnnnnnnnnnnnnnnnnnnnnnnnnnnnnnnnnnnnnnnnnnnnnnnnnnnnnnnnnnnnnnnnnnnnnnnnnnnnnnnnnnnnnnnnnnnnnnnnnnnnnnnnnnnnnnnnnnnnnnnnnnnnnnnnnnnnnnnnnnnnnnnnnnnnnnnnnnnnnnnnnnnnnnnnnnnnnnnnnnnnnnnnnnnnnnnnnnnnnnnnnnnnnnnnnnnnnnnnnnnnnnnnnnnnnnnnnnnnnnnnnnnnnnnnnnnnnnnnnnnnnnnnnnnnnnnnnnnnnnnnnnnnnnnnnnnnnnnnnnnnnnnnnnnnnnnnnnnnnnnnnnnnnnnnnnnnnnnnnnnnnnnnnnnnnnnnnnnnnnnnnnnnnnnnnnnnnnnnnnnnnnnnnnnnnnnnnnnnnnnnnnnnnnnnnnnnnnnnnnnnnnnnnnnnnnnnnnnnnnnnnnnnnnnnnnnnnnnnnnnnnnnnnnnnnnnnnnnnnnnnnnnnnnnnnnnnnnnnnnnnnnnnnnnnnnnnnnnnnnnnnnnnnnnnnnnnnnnnnnnnnnnnnnnnnnnnnnnnnnnnnnnnnnnnnnnnnnnnnnnnnnnnnnnnnnnnnnnnnnnnnnnnnnnnnnnnnnnnnnnnnnnnnnnnnnnnnnnnnnnnnnnnnnnnnnnnnnnnnnnnnnnnnnnnnnnnnnnnnnnnnnnnnnnnnnnnnnnnnnnnnnnnnnnnnnnnnnnnnnnnnnnnnnnnnnnnnnnnnnnnnnnnnnnnnnnnnnnnnnnnnnnnnnnnnnnnnnnnnnnnnnnnnnnnnnnnnnnnnnnnnnnnnnnnnnnnnnnnnnnnnnnnnnnnnnnnnnnnnnnnnnnnnnnnnnnnnnnnnnnnnnnnnnnnnnnnnnnnnnnnnnnnnnnnnnnnnnnnnnnnnnnnnnnnnnnnnnnnnnnnnnnnnnnnnnnnnnnnnnnnnnnnnnnnnnnnnnnnnnnnnnnnnnnnnnnnnnnnnnnnnnnnnnnnnnnnnnnnnnnnnnnnnnnnnnnnnnnnnnnnnnnnnnnnnnnnnnnnnnnnnnnnnnnnnnnnnnnnnnnnnnnnnnnnnnnnnnnnnnnnnnnnnnnnnnnnnnnnnnnnnnnnnnnnnnnnnnnnnnnnnnnnnnnnnnnnnnnnnnnnnnnnnnnnnnnnnnnnnnnnnnnnnnnnnnnnnnnnnnnnnnnnnnnnnnnnnnnnnnnnnnnnnnnnnnnnnnnnnnnnnnnnnnnnnnnnnnnnnnnnnnnnnnnnnnnnnnnnnnnnnnnnnnnnnnnnnnnnnnnnnnnnnnnnnnnnnnnnnnnnnnnnnnnnnnnnnnnnnnnnnnnnnnnnnnnnnnnnnnnnnnnnnnnnnnnnnnnnnnnnnnnnnnnnnnnnnnnnnnnnnnnnnnnnnnnnnnnnnnnnnnnnnnnnnnnnnnnnnnnnnnnnnnnnnnnnnnnnnnnnnnnnnnnnnnnnnnnnnnnnnnnnnnnnnnnnnnnnnnnnnnnnnnnnnnnnnnnnnnnnnnnnnnnnnnnnnnnnnnnnnnnnnnnnnnnnnnnnnnnnnnnnnnnnnnnnnnnnnnnnnnnnnnnnnnnnnnnnnnnnnnnnnnnnnnnnnnnnnnnnnnnnnnnnnnnnnnnnnnnnnnnnnnnnnnnnnnnnnnnnnnnnnnnnnnnnnnnnnnnnnnnnnnnnnnnnnnnnnnnnnnnnnnnnnnnnnnnnnnnnnnnnnnnnnnnnnnnnnnnnnnnnnnnnnnnnnnnnnnnnnnnnnnnnnnnnnnnnnnnnnnnnnnnnnnnnnnnnnnnnnnnnnnnnnnnnnnnnnnnnnnnnnnnnnnnnnnnnnnnnnnnnnnnnnnnnnnnnnnnnnnnnnnnnnnnnnnnnnnnnnnnnnnnnnnnnnnnnnnnnnnnnnnnnnnnnnnnnnnnnnnnnnnnnnnnnnnnnnnnnnnnnnnnnnnnnnnnnnnnnnnnnnnnnnnnnnnnnnnnnnnnnnnnnnnnnnnnnnnnnnnnnnnnnnnnnnnnnnnnnnnnnnnnnnnnnnnnnnnnnnnnnnnnnnnnnnnnnnnnnnnnnnnnnnnnnnnnnnnnnnnnnnnnnnnnnnnnnnnnnnnnnnnnnnnnnnnnnnnnnnnnnnnnnnnnnnnnnnnnnnnnnnnnnnnnnnnnnnnnnnnnnnnnnnnnnnnnnnnnnnnnnnnnnnnnnnnnnnnnnnnnnnnnnnnnnnnnnnnnnnnnnnnnnnnnnnnnnnnnnnnnnnnnnnnnnnnnnnnnnnnnnnnnnnnnnnnnnnnnnnnnnnnnnnnnnnnnnnnnnnnnnnnnnnnnnnnnnnnnnnnnnnnnnnnnnnnnnnnnnnnnnnnnnnnnnnnnnnnnnnnnnnnnnnnnnnnnnnnnnnnnnnnnnnnnnnnnnnnnnnnnnnnnnnnnnnnnnnnnnnnnnnnnnnnnnnnnnnnnnnnnnnnnnnnnnnnnnnnnnnnnnnnnnnnnnnnnnnnnnnnnnnnnnnnnnnnnnnnnnnnnnnnnnnnnnnnnnnnnnnnnnnnnnnnnnnnnnnnnnnnnnnnnnnnnnnnnnnnnnnnnnnnnnnnnnnnnnnnnnnnnnnnnnnnnnnnnnnnnnnnnnnnnnnnnnnnnnnnnnnnnnnnnnnnnnnnnnnnnnnnnnnnnnnnnnnnnnnnnnnnnnnnnnnnnnnnnnnnnnnnnnnnnnnnnnnnnnnnnnnnnnnnnnnnnnnnnnnnnnnnnnnnnnnnnnnnnnnnnnnnnnnnnnnnnnnnnnnnnnnnnnnnnnnnnnnnnnnnnnnnnnnnnnnnnnnnnnnnnnnnnnnnnnnnnnnnnnnnnnnnnnnnnnnnnnnnnnnnnnnnnnnnnnnnnnnnnnnnnnnnnnnnnnnnnnnnnnnnnnnnnnnnnnnnnnnnnnnnnnnnnnnnnnnnnnnnnnnnnnnnnnnnnnnnnnnnnnnnnnnnnnnnnnnnnnnnnnnnnnnnnnnnnnnnnnnnnnnnnnnnnnnnnnnnnnnnnnnnnnnnnnnnnnnnnnnnnnnnnnnnnnnnnnnnnnnnnnnnnnnnnnnnnnnnnnnnnnnnnnnnnnnnnnnnnnnnnnnnnnnnnnnnnnnnnnnnnnnnnnnnnnnnnnnnnnnnnnnnnnnnnnnnnnnnnnnnnnnnnnnnnnnnnnnnnnnnnnnnnnnnnnnnnnnnnnnnnnnnnnnnnnnnnnnnnnnnnnnnnnnnnnnnnnnnnnnnnnnnnnnnnnnnnnnnnnnnnnnnnnnnnnnnnnnnnnnnnnnnnnnnnnnnnnnnnnnnnnnnnnnnnnnnnnnnnnnnnnnnnnnnnnnnnnnnnnnnnnnnnnnnnnnnnnnnnnnnnnnnnnnnnnnnnnnnnnnnnnnnnnnnnnnnnnnnnnnnnnnnnnnnnnnnnnnnnnnnnnnnnnnnnncttcatgagatgctgaagctgactggttaaaaatgttgaccctatcctgtnatttacctgtgaacatttattgtacattcagtgagttatagtgttaatagtcttgtgctatgcagcaggtgtaaaaattaataaatatattttttaataagcctgtttgtat

SEQ ID NO: 26575 - DNA, 361 bp, Macaca Mulatta
ggactatggaaaggagtctcaggccaaggatgttatcgaagagtacttcaaatgcaagaaatgaataaataaatctttggctcacattcctcatgtctggctttttatttggggcagtaaaataaggtccctgttagcaaagtaaaataaaatcttcacaaagtgattactacagatgaactggaaatgtgctctcaaagtcttctccccaaccaatgactgcatcgtggggcgattcaaacctgaacagccctagcaaagagaggtctgccatgcactattggtgatggccagggttacttagctatgggcatttatccctggctagactcgtctagaatctggagagagaggctgtgtg

SEQ ID NO: 26576 - DNA, 360 bp, Macaca Mulatta
agggtgactccgggggacccctggtctgtgggggcgtcctgcagggcattgtgtcctggggtgatgtgccttgtgacaacaccaccaagcctggtgtttataccaaagtttgccactacttgaagtggatcagggaaaccatgaagaggaactgatttttttggcctattacctgtgcccctgactgagcagaggcctccacagctggccagcagccccccctgacatggaacagaagggagccatcccccaagaccctgtccaaggcccagatgttagccaaggattgtcccccctgaggacaaagctggtgctcaaggtcacctgtttaatgccaagataacaaagcactgatccaag

SEQ ID NO: 26577 - DNA, 317 bp, Macaca Mulatta
aagaagctgatccgatacatcgacaaccaggtagtgagcaccaaaggggagcgattcaaagacgtgcggaaccctgaggccgaggagatgaaagccacatacatcaacctcaagccggccagaaagtaccgcttccattgaggcactcgctggactctgcccgagccttttaggctcagatcccagagggatgcaggagccctatacccctacacaggggccccttaactcctgtcccccttctctatttctttgctccatagtgttaacctactctcggagctgcctccatgggcacagtaaaggtggcccaagga

SEQ ID NO: 26578 - DNA, 638 bp, Macaca Mulatta
  misc_feature (1)...(638): n = A,T,C or G
gggatttagcaaaatgtttgcatgtgtgacaagacaatgagagtaattgcttgataacaacctatgcgccaggtaaagtcaacatatgcaaaatactgtacattgtgaacagaagtttaattcatagtaatttcactctctgcatcgacttatgagataattaatgataaaactattaacgataaaaataatgcatttgtattgttcataatatcatatgcacttcaagaaaatggaatgctactcttttgtggtttacgtgtattattttcaatatcttaataccctaataaacagtnnnnnnnnnnnnnnnnnnnnnnnnnnnnnnnnnnnnnnnnnnnnnnnnnnnnnnnnnnnnnnnnnnnnnnnnnnnnnnnnnnnnnnnnnnnnnnnnnnnnnnnnnnnnnnnnntttcccttggccctccctgtcccctaaaaaatttttggccctctctttttgtgtggggtccccctaaaaaaaaagtcccgggggaaaccgttctatcaaaaaaactccggatgcacttttgtcggaatcacccgcaaaaaaaccggtcgcggagcaacccctttaaaacaacgcgcagggcttctgagcctttaaggcctttaaaacaataaccacctgccccatca

SEQ ID NO: 26579 - DNA, 3805 bp, Macaca Mulatta
  misc_feature (1)...(3805): n = A,T,C or G
atgaattgcccggttctttcattgggctctggcttcttgtttcaggtcattgacatgttgatctttgcctattttgcttcgatatccttggctgactcacgaggtcttttcccaagactggagaacgtgggagctttcaagaatgtttccatcgtgccaacgcaagcagtatgtggactcccagacagaagcactttttgtcatagctctgctgctgctgaaagtattcagttctgttcccagcggttttgtattcaggattgcccatacagatcttcacaccctacctacactgccctttctcagcaggcctcagnnnnnnnnnnnnnnnnnnnnnnnnnnnnnnnnnnnnnnnnnnnnnnnnnnnnnnnnnnnnnnnnnnnnnnnnnnnnnnnnnnnnnnnnnnnnnnnnnnnnnnnnnnnnnnnnnnnnnnnnnnnnnnnnnnnnnnnnnnnnnnnnnnnnnnnnnnnnnnnnnnnnnnnnnnnnnnnnnnnnnnnnnnnnnnnnnnnnnnnnnnnnnnnnnnnnnnnnnnnnnnnnnnnnnnnnnnnnnnnnnnnnnnnnnnnnnnnnnnnnnnnnnnnnnnnnnnnnnnnnnnnnnnnnnnnnnnnnnnnnnnnnnnnnnnnnnnnnnnnnnnnnnnnnnnnnnnnnnnnnnnnnnnnnnnnnnnnnnnnnnnnnnnnnnnnnnnnnnnnnnnnnnnnnnnnnnnnnnnnnnnnnnnnnnnnnnnnnnnnnnnnnnnnnnnnnnnnnnnnnnnnnnnnnnnnnnnnnnnnnnnnnnnnnnnnnnnnnnnnnnnnnnnnnnnnnnnnnnnnnnnnnnnnnnnnnnnnnnnnnnnnnnnnnnnnnnnnnnnnnnnnnnnnnnnnnnnnnnnnnnnnnnnnnnnnnnnnnnnnnnnnnnnnnnnnnnnnnnnnnnnnnnnnnnnnnnnnnnnnnnnnnnnnnnnnnnnnnnnnnnnnnnnnnnnnnnnnnnnnnnnnnnnnnnnnnnnnnnnnnnnnnnnnnnnnnnnnnnnnnnnnnnnnnnnnnnnnnnnnnnnnnnnnnnnnnnnnnnnnnnnnnnnnnnnnnnnnnnnnnnnnnnnnnnnnnnnnnnnnnnnnnnnnnnnnnnnnnnnnnnnnnnnnnnnnnnnnnnnnnnntcaggtgttttatattatcattcagttctttagtccacaaccaacggaaataaggattcaaaggaagaaggaaaacagcttagattgggaggactggcaatattttgccagaaattgtggtgcttttggaatgaaaaacaatggagatttggagaaacctgattctgtcaactgtcttcagctttccaanttttactccatattcccgtggcaatgtcacatttagcatcctgacacctggaccaaattatcgtcctggatacaatgacttctataataccccatctcttcaagagttcgtaaaagccacgcaaataaggtttcattttcatgggcagtactatacaactgagactgctgtcaacttcagacacagatattatgcagtggacgaaatcaccattagtgggagnnnnnnnnnnnnnnnnnnnnnnnnnnnnnnnnnnnnnnnnnnnnnnnnnnnnnnnnnnnnnnnnnnnnnnnnnnnnnnnnnnnnnnnnnnnnnntgtgatcgctgcttgcctctttataatgacaagcctttccgccaaggtgatcaagttcacgctttcaattgtaaacgttgtcagtgcaacagccattccaaaagctgctattacaacgtctctgtagacccatttccttttgagcacttcagagggggaggaggagtttgtaatgattgtgagcataacactacaggncaggaaggaactgtgagctgtgcaaggattactttttccgacaagttggtgcagatccttcagccatagatgtttgcaaaccctgtgactgtgataaagttggtgctagaaatggtagcattctttgcgatcaggtgagtttttctgagtatttaagnaagactgcatttaccaggaaatcctctatgtgcatttgcatttcaaagagatggttgttcctgtgcaactttnnnnnnnnnnnnnnnnnnnnnnnnnnnnnnnnnnnnnnnnnnnnnnnnnnnnnnnnnnnnnnnnnnnnnnnnnnnnnnnnnnnnnnnnnnnnnnnnnnnnnnnnnnnnnnnnnnnnnnnnnnnnnnnnnnnnnnnnnnnnnnnnnnnnnnnnnnnnnnnnnnnnnnnnnnnnnnnnnnnnnnnnnnnnnnnnnnnnnnnnnnnnnnnnnnnnnnnnnnnnnnnnnnnnnnnnnnnnnnnnnnnnnnnnnnnnnnnnnnnnnnnnnnnnnnnnnnnnnnnnnnnnnnnnnnnnnnnnnnnnnnnnnnnnnnnnnnnnnnnnnnnnnnnnnnnnnnnnnnnnnnnnnnnnnnnnnnnnnnnnnnnnnnnnnnnnnnnnnnnnnnnnnnnnnnnnnnnnnnnnnnnnnnnnnnnnnnnnnnnnnnnnnnnnnnnnnnnnnnnnnnnnnnnnnnnnnnnnnnnnnnnnnnnnnnnnnnnnnnnnnnnnnnnnnnnnnnnnnnnnnnnnnnnnnnnnnnnnnnnnnnnnnnnnnnnnnnnnnnnnnnnnnnnnnnnnnnnnnnnnnnnnnnnnnnnnnnnnnnnnnnnnnnnnnnnnnnnnnnnnnnnnnnnnnnnnnnnnnnnnnnnnnnnnnnnnnnnnnnnnnnnnnnnnnnnnnnnnnnnnnnnnnnnnnnnnnnnnnnnnnnnnnnnnnnnnnnnnnnnnnnnnnnnnnnnnnnnnnnnnnnnnnnnnnnnnnnnnnnnnnnnnnnnnnnnnnnnnnnnnnnnnnnnnnnnnnnnnnnnnnnnnnnnnnnnnnnnnnnnnnnnnnnnnnnnnnnnnnnnnnnnnnnnnnnnnnnnnnnnnnnnnnnnnnnnnnnnnnnnnnnnnnnnnnnnnnnnnnnnnnnnnnnnnnnnnnnnnnnnnnnnnnnnnnnnnnnnnnnnnnnnnnnnnnnnnnnnnnnnnnnnnnnnnnnnnnnnnnnnnnnnnnnnnnnnnnnnnnnnnnnnnnnnnnnnnnnnnnnnnnnnnnnnnnnnnnnnnnnnnnnnnnnnnnnnnnnnnnnnnnnnnnnnnnnnnnnnnnnnnnnnnnnnnnnnnnnnnnnnnnnnnnnnnnnnnnnnnnnnnnnnnnnnnnnnnnnnnnnnnnnnnnnnnnnnnnnnnnnnnnnnnnnnnnnnnnnnnnnnnnnnnnnnnnnnnnnnnnnnnnnnnnnnnnnnnnnnnnnnnnnnnnnnnnnnnnnnnnnnnnnnnnnnnnnnnnnnnnnnnnnnnnnnnnnnnnnnnnnnnnnnnnnnnnnnnnnnnnnnnnnnnnnnnnnnnnnnnnnnnnnnnnnnnnnnnnnnnnnnnnnnnnnnnnnnnnnnnnnnnnnnnnnnnnnnnnnnnnnnnnnnnnnnnnnnnnnnnnnnnnnnnnnnnnnnnnnnnnnnnnnnnnnnnnnnnnnnnnnnnnnnnnnnnnnnnnnnnnnnnnnnnnnnnnnnnnnnnnnnnnnggaataattataaggtatgaactatacatgagaagactgagatctactaaagaaaccacatctgaggaaagtcgagtttttcagagcagtggttggctcagtcctcagtcatttgcagaatcggccaatgaaaatgcattaaaacctcctcaaacaatgacaaccatcactggcttggagccatataccaagtatgagtttagagtcttagctgtgaatatggctggaagtgtgtcttctgcctgggtctcagaaagaacgggagaatcag

SEQ ID NO: 26580 - DNA, 456 bp, Macaca Mulatta
  misc_feature (1)...(456): n = A,T,C or G
ttttgaaacacctctctccatacaaatgaaataattcagcaaaattctagaaaatgctggtgtagcagctcagtggaaatctcctgtaagtgctgtgagaaattataaattctggggactccaactgatgcagtgtgcattcacttacagcttcctttgcccctttgtatactgcagcacaacaggaaatattggcttatctctgtaggaagtgtctctataggagttgcttactgaactgaatatctttgtttggaactaattgacctttctaaaacagcattttaaaagagcttactcaaagaaggcagactttagccatctgataagtcagagacaaatcagtcctcttttaagcaaagttgacagtcattgcaacagaanagaaagcacagaaagaaaggcaccatcagacaaaagaccagagtattagtaaaaactagataattaagaaat

SEQ ID NO: 26581 - DNA, 608 bp, Macaca Mulatta
tgcatttaaagggcagatttttaaaaaagatactactataataaacatttccagttggtcattctaagcatttacccgtttgatactctagctagtcaggtactttaaattgactttgcagcagggtggcagggtcaggagagtctggttctgcctagctcagatttcatggcacctgcacttgaagcaagtcacttctttatcacaggtgtcttgaaacattggcttcttttaccaacctgagaaaattaggatgacctggcaaataagatcttgaataggccaaaagcaagtatcttgctgtgtgtagtctcttggttaaagtgaagaaacagtactgttcacacctacagacccctttcttcactgagattccagtgtacgtgagaacatatatttattgcatgattttctaggtacacagtctatgcattattcatatacatttattttagcctgaagtggttttcaaatccaattctttaagccataaatgaccaagatccaagcaatctgaattcgtttttgtgattatttgactggaatgcttcttaagtggaataactatactccgttatccacccgatttcctaatgtaattgaaacat

SEQ ID NO: 26582 - DNA, 1880 bp, Macaca Mulatta
  misc_feature (1)...(1880): n = A,T,C or G
ggcccaggacgtgacggtcgcctccccgctatgggggacttctggagtctgagaagtcatcggtccggttgctgcggtcgccgtgctctccgggccgaggggatggagaatggagcggtggacagccccactacggatgaggacccgggccccgtcagaggcccccggagnnnnnnnnnnnnnnnnnnnnnnnnnnnnnnnnnnnnnnnnnnnnnnnnnnnnnnnnnnnnnnnnnnnnnttgctgtctctgctggccttcatctgtgaagaagttgtgtcgcagtgtactttgtgtggaggactttatttttttgagtttgtaagctgcagtgcctttcttctgagtctccttatactgattgtgtattgcactccattttacgagaaagttgatactacaaaagtaaaatcatcggnnnnnnnnnnnnnnnnnnnnnnnnnnnnnnnnnnnnnnnnnnnnnnnnnnnnnnnnnnnnnnnnnnnnnnnnnnnnnnnnnnnnnnnnnnnnnnnnnnnnnnnnnnnnnnnnnnnnnnnnnnnnnnnnnnnnnnnnnnnnnnnnnnnnnnnnnnnnnnnnnnnnnnnnnnnnnnnnnnnnnnnnnnnnnnnnnnnnnnnnnnnnnnnnnnnnnnnnnnnnnnnnnnnnnnnnnnnnnnnnnnnnnnnnnnnnnnnnnnnnnnnnnnnnnnnnnnnnnnnnnnnnnnnnnnnnnnnnnnnnnnnnnnnnnnnnnnnnnnnnnnnnnnnnnnnnnnnnnnnnnnnnnnnnnnnnnnnnnnnnnnnnnnnnnnnnnnnnnnnnnnnnnnnnnnnnnnnnnnnnnnnnnnnnnnnnnnnnnnnnnnnnnnnnnnnnnnnnnnnnnnnnnnnnnnnnnnnnnnnnnnnnnnnnnnnnnnnnnnnnnnnnnnnnnnnnnnnnnnnnnnnnnnnnnnnnnnnnnnnnnnnnnnnnnnnnnnnnnnnnnnnnnnnnnnnnnnnnnnnnnnnnnnnnnnnnnnnnnnnnnnnnnnnnnnnnnnnnnnnnnnnnnnnnnnnnnnnnnnnnnnnnnnnnnnnnnnnnnnnnnnnnnnnnnnnnnnnnnnnnnnnnnnnnnnnnnnnnnnnnnnnnnnnnnnnnnnnnnnnnnnnnnnnnnnnnnnnnnnnnatatttaaaatgttggtctaggtttttttccttaacacatattaccaggctttactgtatttcactcagccttaaatgttacaatatttttggataactgttattaattctttctgagaccttggttatagcctaaaaacgtatggagatgttggtattttgtgtgtataaaagcaacaatatcagcaacttcgtgtttatactgcaccttggttgttgatgtcaagtgagaaagagattgttttgtaacacatacaaaaatggaagaaactgataccacacctaagtgccggagataagaaagactttttgcccaagacagtgaaagtaattataacaacaagctttgaccacttaccaagtatctgaagagatgagttcatactgtgatttagaaagtggttcaattctcgtgttggcatatgattatttgtactaaaattaatacagctctgtgggtcttccttagcgttttcttcgaagcnnnnnnnnnnnnnnnggaccccagcctttcgtttttcatagttcaagatgcctcttttctgtcgccttatcagatagaaatggagctatgtgctgctgcttcatctagcagaggttggcctctggctctgacgcttaccttttgtcagttgtctttaggtggtcctgaatcttgngcccttttaattgtgaatactgtgtagcaggatcttgagagtccttgttcttacataggcgttgctctagtttgtctttggcaa

SEQ ID NO: 26583 - DNA, 747 bp, Macaca Mulatta
actcctgtcccttgttgggatgggaatgaaagcttaagctgctcattggaccagaagtcctactgactttatacagaactgaattaagttattgatttttgtaataaaaggtatgaaacacttggagcctgatactgttgtttgtgcatatagaagggactgtctcacctccagggcccaccctgctcctatcagaggtagcccaagggaaaaaatccacagggttgctggaactaattttccagggaacagtatcagttcacaatcccatcacctcattgcctttatcctcaggggaaggaggttgctctcctgttcccaaacccttcactaaccactctcctggctcctacccacttcatgcgccctctcaccacagttaaagcccaatcacagccaatcaggaagcagtccattcccgaattgaaacagacaaggtcactgccatttctgcagtttaagatcattcacttcccccattcttgcagatgacaaaagacggtggtccattattttcccaaagggaagggacaagggcacccagggctggcctggcaactacttgaacgccaaggcagagcaaggtttagctggaccaccaggatttgaatacatcagttgtttaagtctgaaacccttccaggacacttggatcatagccaccgccctgaggcctcccaaagtccttccctgcccctctgccccagcccctctcctgggattgtcctcccagacattcccactgtc

SEQ ID NO: 26584 - DNA, 5719 bp, Macaca Mulatta
  misc_feature (1)...(5719): n = A,T,C or G
gacgcacaggcggtccccgcgtccctccagccctcgccgccctctccaccgctcccggccgccgcgctccggtccacacaggnnaggatccctgctgggcaccaacagctccaccatggggctggcctggggactaggcgtcctaatcctgttgcatgtgtgcggcaccaaccgcattccannnnnnnnnnnnnnnnnnnnnnnnnnnnnnnnnnnnnnnnnnnnnnnnnnnnnnnnnnnnnnnnnnnnnnnnnnnnnnnnnnnnnnnnnnnnnnnnnnnnnnnnnnnnnnnnnnnnnnnnnnnnnnnnnnnnnnnnnnnnnnnnnnnnnnnnnnnnnnnnnnnnnnnnnnnnnnnnnnnnnnnnnnnnnnnnnnnnnnnnnnnnnnnnnnnnnnnnnnnnnnnnnnnnnnnnnnnnnnnnnnnnnnnnnnnnnnnnnnnnnnnnnnnnnnnnnnnnnnnnnnnnnnnnnnnnnnnnnnnnnnnnnnnnnnnnnnnnnnnnnnnnnnnnnnnnnnnnnnnnnnnnnnnnnnnnnnnnnnnnnnnnnnnnnnnnnnnnnnnnnnnnnnnnnnnnnnnnnnnnnnnnnnnnnnnnnnnnnnnnnnnnnnnnnnnnnnnnnnnnnnnnnnnnnnnnnnnnnnnnnnnnnnnnnnnnnnnnnnnnnnnnnnnnnnnnnnnnnnnnnnnnnnnnnnnnnnnnnnnnnnnnnnnnnnnnnnnnnnnnnnnnnnnnnnnnnnnnnnnnnnnnnnnnnnnnnnnnnnnnnnnnnnnnnnnnnnnnnnnnnnnnnnnnnnnnnnnnnnnnnnnnnnnnnnnnnnnnnnnnnnnnnnnnnnnnnnnnnnnnnnnnnnnnnnnnnnnnnnnnnnnnnnnnnnnnnnnnnnnnnnnnnnnnnnnnnnnnnnnnnnnnnnnnnnnnnnnnnnnnnnnnnnnnnnnnnnnnnnnnnnnnnnnnnnnnnnnnnnnnnnnnnnnnnnnnnnnnnnnnnnnnnnnnnnnnnnnnnnnnnnnnnnnnnnnnnnnnnnnnnnnnnnnnnnnnnnnnnnnnnnnnnnnnnnnnnnnnnnnnnnnnnnnnnnnnnnnnnnnnnnnnnnnnnnnnnnnnnnnnnnnnnnnnnnnnnnnnnnnnnnnnnnnnnnnnnnnnnnnnnnnnnnnnnnnnnnnnnnnnnnnnnnnnnnnnnnnnnnnnnnnnnnnnnnnnnnnnnnnnnnnnnnnnnnnnnnnnnnnnnnnnnnnnnnnnnnnnnnnnnnnnnnnnnnnnnnnnnnnnnnnnnnnnnnnnnnnnnnnnnnnnnnnnnnnnnnnnnnnnnnnnnnnnnnnnnnnnnnnnnnnnnnnnnnnnnnnnnnnnnnnnnnnnnnnnnnnnnnnnnnnnnnnnnnnnnnnnnnnnnnnnnnnnnnnnnnnnnnnnnnnnnnnnnnnncaggatggcggctggagccactggtcaccttggtcttcatgctctgtgacctgtgnnnnnnnnnnnnnnnnnnnnnnnnnnnnnnnnnnnnnnnnnnnnnnnnnnnnnnnnnnnnnnnnnnnnnnnnnnnnnnnnnnnnnnnnnnnnnnnnnnnnnnnnnnnnnnnnnnnnnnnnnnnnnnnnnnnnnnnnnnnnnnnnnnnnnnnnnnnnnnnnnnnnnnnnnnnnnnnnnnnnnnnnnnnnnnnnnnnnnnnnnnnnnnnnnnnnnnnnnnnnnnnnnnnnnnnnnnnnnnnnnnnnnnnnnnnnnnnnnnnnnnnnnnnnnnnnnnnnnnnnnnnnnnnnnnnnnnnnnnnnnnnnnnnnnnnnnnnnnnnnnnnnnnnnnnnnnnnnnnnnnnnnnnnnnnnnnnnnnnnnnnnnnnnnnnnnnnnnnnnnnnnnnnnnnnnnnnnnnnnnnnnnnnnnnnnnnnnnnnnnnnnnnnnnnnnnnnnnnnnnnnnnnnnnnnnnnnnnnnnnnnnnnnnnnnnnnnnnnnnnnnnnnnnnnnnnnnnnnnnnnnnnnnnnnnnnnnnnnnnnnnnnnnnnnnnnnnnnnnnnnnnnnnnnnnnnnnnnnnnnnnnnnnnnnnnnnnnnnnnnnnnnnnnnnnnnnnnnnnnnnnnnnnnnnnnnnnnnnnnnnnnnnnnnnnnnnnnnnnnnnnnnnnnnnnnnnnnnnnnnnnnnnnnnnnnnnnnnnnnnnnnnnnnnnnnnnnnnnnnnnnnnnnnnnnnnnnnnnnnnnnnnnnnnnnnnnnnnnnnnnnnnnnnnnnnnnnnnnnnnnnnnnnnnnnnnnnnnnnnnnnnnnnnnnnnnnnnnnnnnnnnnnnnnnnnnnnnnnnnnnnnnnnnnnnnnnnnnnnnnnnnnnnnnnnnnnnnnnnnnnnnnnnnnnnnnnnnnnnnnnnnnnnnnnnnnnnnnnnnnnnnnnnnnnnnnnnnnnnnnnnnnnnnnnnnnnnnnnnnnnnnnnnnnnnnnnnnnnnnnnnnnnnnnnnnnnnnnnnnnnnnnnnnnnnnnnnnnnnnnnnnnnnnnnnnnnnnnnnnnnnnnnnnnnnnnnnnnnnnnnnnnnnnnnnnnnnnnnggtatcctcaatgaacgggacaactgccagtacgtctacaatgtggaccagagagacactgacatggatggggttggagatcagtgtgacaactgccccttggaacacaatccagatcannnnnnnnnnnnnnnnnnnnnnnnnnnnnnnnnnnnnnnnnnnnnnnnnnnnnnnnnnnnnnnnnnnnnnnnnnnnnnnnnnnnnnnnnnnnnnnnnnnnnnnnnnnnnnnnnnnnnnnnnnnnnnnnnnnnnnnnnnnnnnnnnnnnnnnnnnnnnnnnnnnnnnnnnnnnnnnnnnnnnnnnnnnnnnnnnnnnnnnnnnnnnnnnnnnnnnnnnnnnnnnnnnnnnnnnnnnnnnnnnnnnnnnnnnnnnnnnnnnnnnnnnnnnnnnnnnnnnnnnnnnnnnnnnnnnnnnnnnnnnnnnnnnnnnnnnnnnnnnnnnnnnnnnnnnnnnnnnnnnnnnnnnnnnnnnnnnnnnnnnnnnnnnnnnnnnnnnnnnnnnnnnnnnnnnnnnnnnnnnnnnnnnnnnnnnnnnnnnnnnnnnnnnnnnnnnnnnnnnnnnnnnnnnnnnnnnnnnnnnnnnnnnnnnnnnnnnnnnnnnnnnnnnnnnnnnnnnnnnnnnnnnnnnnnnnnnnnnnnnnnnnnnnnnnnnnnnnnnnnnnnnnnnnnnnnnnnnnnnnnnnnnnnnnnnnnnnnnnnnnnnnnnnnnnnnnnnnnnnnnnnnnnnnnnnnnnnnnnnnnnnnnnnnnnnnnnnnnnnnnnnnnnnnnnnnnnnnnnnnnnnnnnnnnnnnnnnnnnnnnnnnnnnnnnnnnnnnnnnnnnnnnnnnnnnnnnnnnnnnnnnnnnnnnnnnnnnnnnnnnnnnnnnnnnnnnnnnnnnnnnnnnnnnnnnnnnnnnnnnnnnnnnnnnnnnnnnnnnnnnnnnnnnnnnnnnnnnnnnnnnnnnnnnnnngagtggtgatgtatgaagggaagaaaatcatggctgactcaggacccatctatgataaaacctatgctggtggtagactagggttgtttgtcttctctcaagaaatggtgttcttctccgacctgaaatacgaatgtagannnnnnnnnnnnnnnnnnnnnnnnnnnnnnnnnnnnnnnnnnnnnnnnnnnnnnnnnnnnnnnnnnnnnnnnnnnnnnnnnnnnnnnnnnnnnnnnnnnnnnnnnnnnnnnnnnnnnnnnnnnnnnnnnnnnnnnnnnnnnnnnnnnnnnnnnnnnnnnnnnnnnnnnnnnnnnnnnnnnnnnnnnnnnnnnnnnnnnnnnnnnnnnnnnnnnnnnnnnnnnnnnnnnnnnnnnnnnnnnnnnnnnnnnnnnnnnnnnnnnnnnnnnnnnnnnnnnnnnnnnnnnnnnnnnnnnnnnnnnnnnnnnnnnnnnnnnnnnnnnnnnnnnnnnnnnnnnnnnnnnnnnnnnnnnnnnnnnnnnnnnnnnnnnnnnnnnnnnnnnnnnnnnnnnnnnnnnnnnnnnnnnnnnnnnnnnnnnnnnnnnnnnnnnnnnnnnnnnnnnnnnnnnnnnnnnnnnnnnnnnnnnnnnnnnnnnnnnnnnnnnnnnnnnnnnnnnnnnnnnnnnnnnnnnnnnnnnnnnnnnnnnnnnnnnnnnnnnnnnnnnnnnnnnnnnnnnnnnnnnnnnnnnnnnnnnnnnnnnnnnnnnnnnnnnnnnnnnnnnnnnnnnnnnnnnnnnnnnnnnnnnnnnnnnnnnnnnnnnnnnnnnnnnnnnnnnnnnnnnnnnnnnnnnnnnnnnnnnnnnnnnnnnnnnnnnnnnnnnnnnnnnnnnnnnnnnnnnnnnnnnnnnnnnnnnnnnnnnnnnnnnnnnnnnnnnnnnnnnnnnnnnnnnnnnnnnnnnnnnnnnnnnnnnnnnnnnnnnnnnnnnnnnnnnnnnnnnnnnnnnnnnnnnnnnnnnnnnnnnnnnnnnnnnnnnnnnnnnnnnnnnnnnnnnnnnnnnnnnnnnnnnnnnnnnnnnnnnnnnnnnnnnnnnnnnnnnnnnnnnnnnnnnnnnnnnnnnnnnnnnnnnnnnnnnnnnnnnnnnnnnnnnnnnnnnnnnnnnnnnnnnnnnnnnnnnnnnnnnnnnnnnnnnnnnnnnnnnnnnnnnnnnnnnnnnnnnnnnnnnnnnnnnnnnnnnnnnnnnnnnnnnnnnnnnnnnnnnnnnnnnnnnnnnnnnnnnnnnnnnnnnnnnnnnnnnnnnnnnnnnnnnnnnnnnnnnnnnnnnnnnnnnnnnnnnnnnnnnnnnnnnnnnnnnnnnnnnnnnnnnnnnnnnnnnnnnnnnnnnnnnnnnnnnnnnnnnnnnnnnnnnnnnnnnnnnnnnnnnnnnnnnnnnnnnnnnnnnnnnnnnnnnnnnnnnnnnnnnnnnnnnnnnnnnnnnnnnnnnnnnnnnnnnnnnnnnnnnttttttctttgttttatcttttcaagtggaattagttggttatccatttgcaaatgttttaaattgcaaagaaagccatgaggtcttcaatcttgttttaccccatcccttgtgcctatttccagggagaaggaaagcatatacacttttttctttgatttttccaaaagagaaaaaaatgacaaaggtgaaacttacatacaaatattacctcatttgttgtgtgactgagtaaagaatttttggatcaagcagaaagagtttaagtgtctaacaaacttaaagctactgtagtacctaaaaagtcaatgttgtacatagtataaaaactctgcagagaagtattcccaataaggaaatagcattgaaatgttaaatacaatttctgaaagttnnnnnnnnnnnctatcatcttgtataccattgctttatttttataaattattttctcattgccattggaatagagatctcagattgtgtagatatgctatttaaataatttatcaggaaatactgcctgtagcgttactatttctatttttatataatgtttgcacactgaattgaagaattgttgnnnnnnnnnnnnnnnnnnnnnnnnnnnnnnnnnnnnnnnnnnngcttttgacctccccctatttttactatttgccaatacctttttctaggaatgtgctttttttgtacacatttttatccattttacattctaaagcagtgtaagaaggatattactgtttcttatgtacaaggaacaacaataaataatatggaaatttatatt

SEQ ID NO: 26585 - DNA, 7502 bp, Macaca Mulatta
  misc_feature (1)...(7502): n = A,T,C or G
gagtaccaggtggatgcccagccccttcgtccctgtgagctgcagagggaaagggcctttctgaagcaagcagactacgtgccccagtgcgcagaggacggcagcttccannnnnnnnnnnnnnnnnnnnnnnnnnnnnnnnnnnnnnnnnnnnnnnnnnnnnnnnnnnnnnnnnnnnnnnnnnnnnnnnnnnnnnnnnnnnnnnnnnnnnnnnnnnnnnnnnnnnnnnnnnnnnnnnnnnnnnnnnnnnnnnnnnnnnnnnnnnnnnnnnnnnnnnnnnnnnnnnnnnnnnnnnnnnnnnnnnnnnnnnnnnnnnnnnnnnnnnnnnnnnnnnnnnnnnnnnnnnnnnnnnnnnnnnnnnnnnnnnnnnnnnnnnnnnnnnnnnnnnnnnnnnnnnnnnnnnnnnnnnnnnnnnnnnnnnnnnnnnnnnnnnnnnnnnnnnnnnnnnnnnnnnnnnnnnnnnnnnnnnnnnnnnnnnnnnnnnnnnnnnnnnnnnnnnnnnnnnnnnnnnnnnnnnnnnnnnnnnnnnnnnnnnnnnnnnnnnnnnnnnnnnnnnnnnnnnnnnnnnnnnnnnnnnnnnnnnnnnnnnnnnnnnnnnnnnnnnnnnnnnnnnnnnnnnnnnnnnnnnnnnnnnnnnnnnnnnnnnnnnnnnnnnnnnnnnnnnnnnnnnnnnnnnnnnnnnnnnnnnnnnnnnnnnnnnnnnnnnnnnnnnnnnnnnnnnnnnnnnnnnnnnnnnnnnnnnnnnnnnnnnnnnnnnnnnnnnnnnnnnnnnnnnnnnnnnnnnnnnnnnnnnnnnnnnnnnnnnnnnnnnnnnnnnnnnnnnnnnnnnnnnnnnnnnnnnnnnnnnnnnnnnnnnnnnnnnnnnnnnnnnnnnnnnnnnnnnnnnnnnnnnnnnnnnnnnnnnnnnnnnnnnnnnnnnnnnnnnnnnnnnnnnnnnnnnnnnnnnnnnnnnnnnnnnnnnnnnnnnnnnnnnnnnnnnnnnnnnnnnnnnnnnnnnnnnnnnnnnnnnnnnnnnnnnnnnnnnnnnnnnnnnnnnnnnnnnnnnnnnnnnnnnnnnnnnnnnnnnnnnnnnnnnnnnnnnnnnnnnnnnnnnnnnnnnnnnnnnnnnnnnnnnnnnnnnnnnnnnnnnnnnnnnnnnnnnnnnnnnnnnnnnnnnnnnnnnnnnnnnnnnnnnnnnnnnnnnnnnnnnnnnnnnnnnnnnnnnnnnnnnnnnnnnnnnnnnnnnnnnnnnnnnnnnnnnnnnnnnnnnnnnnnnnnnnnnnnnnnnnnnnnnnnnnnnnnnnnnnnnnnnnnnnnnnnnnnnnnnnnnnnnnnnnnnnnnnnnnnnnnnnnnnnnnnnnnnnnnnnnnnnnnnnnnnnnnnnnnnnnnnnnnnnnnnnnnnnnnnnnnnnnnnnnnnnnnnnnnnnnnnnnnnnnnnnnnnnnnnnnnnnnnnnnnnnnnnnnnnnnnnnnnnnnnnnnnnnnnnnnnnnnnnnnnnnnnnnnnnnnnnnnnnnnnnnnnnnnnnnnnnnnnnnnnnnnnnnnnnnnnnnnnnnnnnnnnnnnnnnnnnnnnnnnnnnnnnnnnnnnnnnnnnnnnnnnnnnnnnnnnnnnnnnnnnnnnnnnnnnnnnnnnnnnnnnnnnnnnnnnnnnnnnnnnnnnnnnnnnnnnnnnnnnnnnnnnnnnnnnnnnnnnnnnnnnnnnnnnnnnnnnnnnnnnnnnnnnnnnnnnnnnnnnnnnnnnnnnnnnnnnnnnnnnnnnnnnnnnnnnnnnnnnnnnnnnnnnnnnnnnnnnnnnnnnnnnnnnnnnnnnnnnnnnnnnnnnnnnnnnnnnnnnnnnnnnnnnnnnnnnnnnnnnnnnnnnnnnnnnnnnnnnnnnnnnnnnnnnnnnnnnnnnnnnnnnnnnnnnnnnnnnnnnnnnnnnnnnnnnnnnnnnnnnnnnnnnnnnnnnnnnnnnnnnnnnnnnnnnnnnnnnnnnnnnnnnnnnnnnnnnnnnnnnnnnnnnnnnnnnnnnnnnnnnnnnnnnnnnnnnnnnnnnnnnnnnnnnnnnnnnnnnnnnnnnnnnnnnnnnnnnnnnnnnnnnnnnnnnnnnnnnnnnnnnnnnnnnnnnnnnnnnnnnnnnnnnnnnnnnnnnnnnnnnnnnnnnnnnnnnnnnnnnnnnnnnnnnnnnnnnnnnnnnnnnnnnnnnnnnnnnnnnnnnnnnnnnnnnnnnnnnnnnnnnnnnnnnnnnnnnnnnnnnnnnnnnnnnnnnnnnnnnnnnnnnnnnnnnnnnnnnnnnnnnnnnnnnnnnnnnnnnnnnnnnnnnnnnnnnnnnnnnnnnnnnnnnnnnnnnnnnnnnnnnnnnnnnnnnnnnnnnnnnnnnnnnnnnnnnnnnnnnnnnnnnnnnnnnnnnnnnnnnnnnnnnnnnnnnnnnnnnnnnnnnnnnnnnnnnnnnnnnnnnnnnnnnnnnnnnnnnnnnnnnnnnnnnnnnnnnnnnnnnnnnnnnnnnnnnnnnnnnnnnnnnnnnnnnnnnnnnnnnnnnnnnnnnnnnnnnnnnnnnnnnnnnnnnnnnnnnnnnnnnnnnnnnnnnnnnnnnnnnnnnnnnnnnnnnnnnnnnnnnnnnnnnnnnnnnnnnnnnnnnnnnnnnnnnnnnnnnnnnnnnnnnnnnnnnnnnnnnnnnnnnnnnnnnnnnnnnnnnnnnnnnnnnnnnnnnnnnnnnnnnnnnnnnnnnnnnnnnnnnnnnnnnnnnnnnnnnnnnnnnnnnnnnnnnnnnnnnnnnnnnnnnnnnnnnnnnnnnnnnnnnnnnnnnnnnnnnnnnnnnnnnnnnnnnnnnnnnnnnnnnnnnnnnnnnnnnnnnnnnnnnnnnnnnnnnnnnnnnnnnnnnnnnnnnnnnnnnnnnnnnnnnnnnnnnnnnnnnnnnnnnnnnnnnnnnnnnnnnnnnnnnnnnnnnnnnnnnnnnnnnnnnnnnnnnnnnnnnnnnnnnnnnnnnnnnnnnnnnnnnnnnnnnnnnnnnnnnnnnnnnnnnnnnnnnnnnnnnnnnnnnnnnnnnnnnnnnnnnnnnnnnnnnnnnnnnnnnnnnnnnnnnnnnnnnnnnnnnnnnnnnnnnnnnnnnnnnnnnnnnnnnnnnnnnnnnnnnnnnnnnnnnnnnnnnnnnnnnnnnnnnnnnnnnnnnnnnnnnnnnnnnnnnnnnnnnnnnnnnnnnnnnnnnnnnnnnnnnnnnnnnnnnnnnnnnnnnnnnnnnnnnnnnnnnnnnnnnnnnnnnnnnnnnnnnnnnnnnnnnnnnnnnnnnnnnnnnnnnnnnnnnnnnnnnnnnnnnnnnnnnnnnnnnnnnnnnnnnnnnnnnnnnnnnnnnnnnnnnnnnnnnnnnnnnnnnnnnnnnnnnnnnnnnnnnnnnnnnnnnnnnnnnnnnnnnnnnnnnnnnnnnnnnnnnnnnnnnnnnnnnnnnnnnnnnnnnnnnnnnnnnnnnnnnnnnnnnnnnnnnnnnnnnnnnnnnnnnnnnnnnnnnnnnnnnnnnnnnnnnnnnnnnnnnnnnnnnnnnnnnnnnnnnnnnnnnnnnnnnnnnnnnnnnnnnnnnnnnnnnnnnnnnnnnnnnnnnnnnnnnnnnnnnnnnnnnnnnnnnnnnnnnnnnnnnnnnnnnnnnnnnnnnnnnnnnnnnnnnnnnnnnnnnnnnnnnnnnnnnnnnnnnnnnnnnnnnnnnnnnnnnnnnnnnnnnnnnnnnnnnnnnnnnnnnnnnnnnnnnnnnnnnnnnnnnnnnnnnnnnnnnnnnnnnnnnnnnnnnnnnnnnnnnnnnnnnnnnnnnnnnnnnnnnnnnnnnnnnnnnnnnnnnnnnnnnnnnnnnnnnnnnnnnnnnnnnnnnnnnnnnnnnnnnnnnnnnnnnnnnnnnnnnnnnnnnnnnnnnnnnnnnnnnnnnnnnnnnnnnnnnnnnnnnnnnnnnnnnnnnnnnnnnnnnnnnnnnnnnnnnnnnnnnnnnnnnnnnnnnnnnnnnnnnnnnnnnnnnnnnnnnnnnnnnnnnnnnnnnnnnnnnnnnnnnnnnnnnnnnnnnnnnnnnnnnnnnnnnnnnnnnnnnnnnnnnnnnnnnnnnnnnnnnnnnnnnnnnnnnnnnnnnnnnnnnnnnnnnnnnnnnnnnnnnnnnnnnnnnnnnnnnnnnnnnnnnnnnnnnnnnnnnnnnnnnnnnnnnnnnnnnnnnnnnnnnnnnnnnnnnnnnnnnnnnnnnnnnnnnnnnnnnnnnnnnnnnnnnnnnnnnnnnnnnnnnnnnnnnnnnnnnnnnnnnnnnnnnnnnnnnnnnnnnnnnnnnnnnnnnnnnnnnnnnnnnnnnnnnnnnnnnnnnnnnnnnnnnnnnnnnnnnnnnnnnnnnnnnnnnnnnnnnnnnnnnnnnnnnnnnnnnnnnnnnnnnnnnnnnnnnnnnnnnnnnnnnnnnnnnnnnnnnnnnnnnnnnnnnnnnnnnnnnnnnnnnnnnnnnnnnnnnnnnnnnnnnnnnnnnnnnnnnnnnnnnnnnnnnnnnnnnnnnnnnnnnnnnnnnnnnnnnnnnnnnnnnnnnnnnnnnnnnnnnnnnnnnnnnnnnnnnnnnnnnnnnnnnnnnnnnnnnnnnnnnnnnnnnnnnnnnnnnnnnnnnnnnnnnnnnnnnnnnnnnnnnnnnnnnnnnnnnnnnnnnnnnnnnnnnnnnnnnnnnnnnnnnnnnnnnnnnnnnnnnnnnnnnnnnnnnnnnnnnnnnnnnnnnnnnnnnnnnnnnnnnnnnnnnnnnnnnnnnnnnnnnnnnnnnnnnnnnnnnnnnnnnnnnnnnnnnnnnnnnnnnnnnnnnnnnnnnnnnnnnnnnnnnnnnnnnnnnnnnnnnnnnnnnnnnnnnnnnnnnnnnnnnnnnnnnnnnnnnnnnnnnnnnnnnnnnnnnnnnnnnnnnnnnnnnnnnnnnnnnnnnnnnnnnnnnnnnnnnnnnnnnnnnnnnnnnnnnnnnnnnnnnnnnnnnnnnnnnnnnnnnnnnnnnnnnnnnnnnnnnnnnnnnnnnnnnnnnnnnnnnnnnnnnnnnnnnnnnnnnnnnnnnnnnnnnnnnnnnnnnnnnnnnnnnnnnnnnnnnnnnnnnnnnnnnnnnnnnnnnnnnnnnnnnnnnnnnnnnnnnnnnnnnnnnnnnnnnnnnnnnnnnnnnnnnnnnnnnnnnnnnnnnnnnnnnnnnnnnnnnnnnnnnnnnnnnnnnnnnnnnnnnnnnnnnnnnnnnnnnnnnnnnnnnnnnnnnnnnnnnnnnnnnnnnnnnnnnnnnnnnnnnnnnnnnnnnnnnnnnnnnnnnnnnnnnnnnnnnnnnnnnnnnnnnnnnnnnnnnnnnnnnnnnnnnnnnnnnnnnnnnnnnnnnnnnnnnnnnnnnnnnnnnnnnnnnnnnnnnnnnnnnnnnnnnnnnnnnnnnnnnnnnnnnnnnnnnnnnnnnnnnnnnnnnnnnnnnnnnnnnnnnnnnnnnnnagattctgacatggggtctcggcccgagtctatgggatgtagaaaagacacagtgtcaagaccagcatctccaacagnnnnnnnnnnnnnnnnnnnnnnnnnnnnnnnnnnnnnnnnnnnnnnnnnnnnnnnnnnnnnnnnnnnnnnnnnnnnnnnnnnnnnnnnnnnnnnnnnnnnnnnnnnnnnnnnnnnnnnnnnnnnnnnnnnnnnnnnnnnnnnnnnnnnnnnnnnnnnnnnnnnnnnnnnnnnnnnnnnnnnnnnnnnnnnnnnnnnnnnnnnnnnnnnnnnnnnnnnnnnnnnnnnnnnnnnnnnnnnnnnnnnnnnnnnnnnnnnnnnnnnnnnnnnnnnnnnnnnnnnnnnnnnnnnnnnnnnnnnnnnnnnnnnnnnnnnnnnnnnnnnnnnnnnnnnnnnnnnnnnnnnnnnnnnnnnnnnnnnnnnnnnnnnnnnnnnnnnnnnnnnnnnnnnnnnnnnnnnnnnnnnnnnnnnnnnnnnnnnnnnnnnnnnnnnnnnnnnnnnnnnnnnnnnnnnnnnnnnnnnnnnnnnnnnnnnnnnnnnnnnnnnnnnnnnnnnnnnnnnnnnnnnnnnnnaggaggagaggtaacgtgtctcactctgaacagcctgggacttcagatgtgcagtgaggagaatggaggagcctggcgcattttggactgtggctctcctgacattgaagtccacacctatccctttggatggtaccagaagcccnnnnnnnnnnnnnnnnnnnnnnnnnnnnnnnnnnnnnnnnnnnnnnnnnnnnnnnnnnnnnnnnnnnnnnnnnnnnnnnnnnnnnnnnnnnnnnnnnnnnnnnnnnnnnnnnnnnnnnnnnnnnnnnnnnnnnnnnnnnnnnnnnnnnnnnnnnnnnnnnnnnnnnnnnnnnnnnnnnnnnnnnnnnnnnnnnnnnnnnnnnnnnnnnnnnnnnnnnnnnnnnnnnnnnnnnnnnnnnnnnnnnnnnnnnnnnnnnnnnnnnnnnnnnnnnnnnnnnnnnnnnnnnnnnnnnnnnnnnnnnnnnnnnnnnnnnnnnnnnnnnnnnnnnnnnnnnnnnnnnnnnnnnnnnnnnnnnnnnnnnnnnnnnnnnnnnnnnnnnnnnnnnnnnnnnnnnnnnnnnnnnnnnnnnnnnnnnnnnnnnnnnnnnnnnnnnnnnnnnnnnnnnnnnnnnnnnnnnnnnnnnnnnnnnnnnnnnnnnnnnnnnnnnnnnnnnnnnnnnnnnnnnnnnnnnnnnnnnnnnnnnnnnnnnnnnnnnnnnnnnnnnnnnnnnnnnnnnnnnnnnnnnnnnnnnnnnnnnnnnnnnnnnnnnnnnnnnnnnnnnnnnnnnnnnnnnnnnnnnnnnnnnnnnnnnnnnnnnnnnnnnnnnnnnnnnnnnnnnnnnnnnnnnnnnnnnnnnnnnnnnnnnnnnnnnnnnnnnnnnnnnnnnnnnnnnnnnnnnnnnnnnnnnnnnnnnnnnnnnnnnnnnnnnnnnnnnnnnnnnnnnnnnnnnnnnnnnnnnnnnnnnnnnnnnnnnnnnnnnnnnnnnnnnnnnnnnnnnnnnnnnnnnnnnnnnnnnnnnnnnnnnnnnnnnnnnnnnnnnnnnnnnnnnnnnnnnnnnnnnnnnnnnnnnnnnnnnnnnnnnnnnnnnnnnnnnnnnnnnnnnnnnnnnnnnnnnnnnnnnnnnnnnnnnnnnnnnnnnnnnnnnnnnnnnnnnnnnnnnnnnnnnnnnnnnnnnnnnnnnnnnnnnnnnnnnnnnnnnnnnnnnnnnnnnnnnnnnnnnnnnnnnnnnnnnnnnnnnnnnnnnnnnnnnnnnnnnnnnnnnnnnnnnnnnnnnnnnnnnnnnnnnnnnnnnnnnnnnnnnnnnnnnnnnnnnnnnnnnnnnnnnnnnnnnnnnnnnnnnnnnnnnnnnnnnnnnnnnnnnnnnnnnnnnnnnnnnnnnnnnnnnnnnnnnngccgtgagtagccctttccactactggggtcctgtgatcgatggccagttcttccgtgagcctccagccagagcactgaagaggtctttacgggcagaggtcgatctgctcatcggagtttctcaggacgacgggctcatcaacagagcaaaggctgtgaa

SEQ ID NO: 26586 - DNA, 742 bp, Macaca Mulatta
atctagaatcactctaacctgctaaggaaggatgcagagttccctagagagacttgcactgatggggtgacttctgcttttgtccttccaccacccccaccaagtaaaccacctgtggaagcggctgttccctcaacctgctacttctgcgtccataagggtcctgcacgttgcctcccaccaccccagctctgccagaataaaattgtttccaatagaggtggcaaagtgcttctgaaatagttgagttaaagacaaattccaaccttctcagtccagccactgagacctgatgttggaacgcatcaactccttccagttccatgaacgtggctcatagacaaagccttgctttaggccggttataaaaggtcatctagtgtgaaccttaactttttattcaaaggacagttttgtcaagaactccacgtaaggcctgatgtgctcctggttgtactttctcatcactggtttgacttcattgttttgcagaaattaccttaatctgtgggaactgcaacaaagaaaaacttcctaatatataaaaaagaggagctgctttgctttggctccaggtttagcagacaagaaatgtctcctgaagcttctccttaaaggatgctattatggaacggcttttcccatttctgaccagttaacggtttcatagacctcaagtaacagtttgaggtatcaaacatagtataccgatagggggtgctacctgcacgtatctgttcta

SEQ ID NO: 26587 - DNA, 4965 bp, Macaca Mulatta
  misc_feature (1)...(4965): n = A,T,C or G
gtccccctccggatgattgacagtgtggagagccgtgatatgttccagttgcacatttcctgcaaggactccaaagtggtgaggtnnnnnaggtgtcacttctccactntcaagcagtgccaagagtggctctcacggctaagccgagccacagcaagacctgccaagcctgaggacctctttgcctttgcctaccatgcctggtgcctggggctgactgaggaggaccagcacactcacctatgtcagccaggtgannnnnnnnnnnnnnnnnnnnnnnnnnnnnnnnnnnnnnnnnnnnnnnnnnnnnnnnnnnnnnnnnnnnnnnnnnnnnnnnnnnnnnnnnnnnnnnnnnnnnnnnnnnnnnnnnnnnnnnnnnnnnnnnnnnnnnnnnnnnnnnnnnnnnnnnnnnnnnnnnnnnnnnnnnnnnnnnnnnnnnnnnnnnnnnnnnnnnnnnnnnnnagacacttgcgcaatggggctgccattgcccgctgcagccagccagagatcagctggtggggctggcgcaatgctgatgatgagtatctggtcacgtccatcgctaaagcctgtgccctggacccggggacaagggccactgggggctccctcagcaccgggaataatgataccagcgaggcgtgtgatgcagactttnnnnnnnnnnnnnnnnnnnnnnnnnnnnnnnnnnnnnnnnnnnnnnnnnnnnnnnnnnnnnnnnnnnnnnnnnnnnnnnnnnnnnnnnnnnnnnnnnnnnnnnnnnnnnnnnnnnnnnnnnnnnnnnnnnnnnnnnnnnnnnnnnnnnnnnnnnnnnnnnnnnnnnnnnnnnnnnnnnnnnnnnnnnnnnnnnnnnnnnnnnnnnnnnnnnnnnnnnnnnnnnnnnnnnnnnnnnnnnnnnnnnnnnnnnnnnnnnnnnnnnnnnnnnnnnnnnnnnnnnnnnnnnnnnnnnnnnnnnnnnnnnnnnnnnnnnnnnnnnnnnnnnnnnnnnnnnnnnnnnnnnnnnnnnnnnnnnnnnnnnnnnnnnnnnnnnnnnnnnnnnnnnnnnnnnnnnnnnnnnnnnnnnnnnnnnnnnnnnnnnnnnnnnnnnnnnnnnnnnnnnnnnnnnnnnnnnnnnnnnnnnnnnnnnnnnnnnnnnnnnnnnnnnnnnnnnnnnnnnnnnnnnnnnnnnnnnnnnnnnnnnnnnnnnnnnnnnnnnnnnnnnnnnnnnnnnnnnnnnnnnnnnnnnnnnnnnnnnnnnnnnnnnnnnnnnnnnnnnnnnnnnnnnnnnnnnnnnnnnnnnggtaaaactggtgcaacacacatactcctgcctctatggcaccttcctggccaacaacccctgtgagcgagagaagcgcaacatctacaagcggacctggtcagaatgggcgctccttcgagctggcaataaaaactttcataacttcctctacacagccagnnnnnnnnnnnnnnnnnnnnnnnnnnnnnnnnnnnnnnnnnnnnnnnnnnnnnnnnnnnnnnnnnnnnnnnnnnnnnnnnnnnnnnnnnnnnnnnnnnnnnnnnnnnnnnnnnnnnnnnnnnnnnnnnnnnnnnnnnnnnnnnnnnnnnnnnnnnnnnnnnnnnnnnnnnnnnnnnnnnnnnnnnnnnnnnnnnnnnnnnnnnnnnnnnnnnnnnnnnnnnnnnnnnnnnnnnnnnnnnnnnnnnnnnnnnnnnnnnnnnnnnnnnnnnnnnnnnnnnnnnnnnnnnnnnnnnnnnnnnnnnnnnnnnnnnnnnnnnnnnnnnnnnnnnnnnnnnnnnnnnnnnnnnnctcagcagactgtgggagaagtgggtcttcctcctcctctgcccagcagccagaaagactacttgtgcaataaacctttcaagagtcacaaaaactgttctccaagttacaaattgcttaataccgcagtgcctcgggaaatgaagagcaacacctctgatcctgagatcaaagtcctggaagagactaagggaccagctcccaacccttctgcccagaatgaggtgggtaggactttagatggcacaggggagccacctgaacattgtcctgaaacagaagctgtcagtgcactctccaaggtcatttctaataagtgtgatggagtttgtaattttcctgagtcttcccaggactcttctacaggtgcgccccaacaggcccagccagactccttgctaggtgtgccctacaaatgtgttctcgatcacagcctcagcaccctttgcaacccaccaagtgctgcctgccaaactcctctaggcccaagggctgacttcctcaaccaagatccctcagggtctgtggcaagtatctcccaccaggagcaaccgagttctgtgccagatctgactcatggggaggaagacattggtaaaagaggaaataataggaatgggcagttattggaaaatcctcgctttgggaaaatgccattggaattggtccggaagccaatttctcagagccagattagtgagttctcttttctagggtccaactgggacagcttccaagggatggtgacttcattcnnnnnnnnnnnnnnnnnnnnnnnnnnnnnnnnnnnnnnnnnnnnnnnnnnnnnnnnnnnnnnnnnnnnnnnnnnnnnnnnnnnnnnnnnnnnnnnnnnnnnnnnnnnnnnnnnnnnnnnnnnnnnnnnnnnnnnnnnnnnnnnnnnnnnnnnnnnnnnnnnnnnnnnnnnnnnnnnnnnnnnnnnnnnnnnnnnnnnnnnnnnnnnnnnnnnnnnnnnnnnnnnnnnnnnnnnnnnnnnnnnnnnnnnnnnnnnnnnnnnnnnnnnnnnnnnnnnngatgatgatggactcccctttcccacggatgtgatccagcataggttacggcaaatcgaagcagggtacaagcaagaggtagagcagctacgtcgacaggtgcgtgagcttcagatgaggctggatatccgtcactgctgtgcccctccagcagagcctcccatggactatgaggatgatttnnnnnnnnnnnnnnnnnnnnnnnnnnnnnnnnnnnnnnnnnnnnnnnnnnnnnnnnnnnnnnnnnnnnnnnnnnnnnnnnnnnnnnnnnnnnnnnnnnnnnnnnnnnnnnnnnnnnnnnnnnnnnnnnnnnnnnnnnnnnnnnnnnnnnnnnnnnnnnnnnnnnnnnnnnnnnnnnnnnnnnnnnnnnnnnnnnnnnnnnnnnnnnnnnnnnnnnnnnnnnnnnnnnnnnnnnnnnnnnnnnnnnnnnnnnnnnnnnnnnnnnnnnnnnnnnnnnnnnnnnnnnnnnnnnnnnnnnnnnnnnnnnnnnnnnnnnnnnnnnnnnnnnnnnnnnnnnnnnnnnnnnnnnnnnnnnnnnnnnnnnnnnnnnnnnnnnnnnnnnnnnnnnnnnnnnnnnnnnnnnnnnnnnnnnnnnnnnnnnnnnnnnnnnnnnnnnnnnnnnnnnnnnnnnnnnnnnnnnnnnnnnnnnnnnnnnnnnnnnnnnnnnnnnnnnnnnnnnnnnnnnnnnnnnnnnnnnnnnnnnnnnnnnnnnnnnnnnnnnnnnnnnnnnnnnnnnnnnnnnnnnnnnnnnnnnnnnnnnnnnnnnnnnnnnnnnnnnnnnnnnnnnnnnnnnnnnnnnnnnnnnnnnnnnnnnnnnnnnnnnnnnnnnnnnnnnnnnnnnnnnnnnnnnnnnnnnnnnnnnnnnnnnnnnnnnnnnnnnnnnnnnnnnnnnnnnnnnnnnnnnnnnnnnnnnnnnnnnnnnnnnnnnnnnnnnnnnnnnnnnnnnnnnnnnnnnnnnnnnnnnnnnnnnnnnnnnnnnnnnnnnnnnnnnnnnnnnnnnnnnngagatgaactatatcctgtacctctgtgctctgtgtctgtgcatgaaggctcagtctttagaggcactccctctagttgcattagtactgtctttctgtggagtttggtttgaagactggttcagcaagtggaggtttcaatgtatttttcagttggctcatcagccagcgttggtgaatattcagtttagggggacagttctagggagcaagccatttttgggagcagaggaaaactctgctgannnnnnnnnnnnnnnnnattgagttattttgagctgtgaaggcagtcgtctctgttacacagtggcagctcttgagttacgcactgtgaagaatgagaagggaaaagtaaaaattatccttgtgaaacatctgctgattgtgccctaccctttgcgcctgacttttcctagttgtcctggtgctaacacaggagctacaccttgatcctctcctggcatgaaaataaaacaaaggttttcgttgttgttccattgcccgtttcccccatgttgtctttcccttggctgctgcctcctctgggtcacattgcttcttatcctgaacacttgacaccttgagggtagaatttagcgtttggtttttacctcctagcatatgctgtttggnnnnnnnnnnnnnnnnnnnnnnnnnnnnnnnnnnnnnnnnnnnnnnnnnnnnnnnnnnnnnnnnnnnnnnnnnnnnnnnnnnnnnnnnnnnnnnnnnnnnnnnnnnnnnnnnnnnnnnnnnnnnnnnnnnnnnnnnnnnnnnnnnnnnnnnnnnnnnnnnnnnnnnnnnnnnnnnnnnnnnatcttaatatgtaccagtggcacttaaccaacttttacagtgatatagccatgtactgtgggtgggacagatacagtctcattggcctataatgaaaccactagtactttatacattttccttaatttgttgacatataaatggtaaattacatttaggcttatcctgttttgaaatgatggtagtcatctttctcactgctactttcatgttgctttatagaaaacagcatttcattccaaaataactaggatctgcatttagaacaagaatcattatttccctgaccttttcagtcctacagagaagcatctgtggttctttt

SEQ ID NO: 26588 - DNA, 656 bp, Macaca Mulatta
caggccctaagggagacccagtcctacctggtggaggacctggagcggagctgaggctctttcccagcaacactccagtcagcccctggcaatcccaacaaactcatcctgcatctgatgtttttgtacacaatacatgaaaagccagcttgaacttgtgtgttttcctgcttctagcctgctggcatgtgcagagctcagctatgcttcagaggccgcccagcctccagctccatgtcccttatgcctcctgcaccccaaatgcttcctccatccttcctggtacggccatggactatccctcctcattcaccaggtggtgctccttgagtgctcccctaaagggtctaaccttgccattatagacaacagcctgtggcccagttccaaaggttaaaagaggcatgtacgaaagggcacgaactgtggtgggcagctctgtccgaggcatttagaaacacactagtcttcatagctcccctacattccacattctccacaggagaaaaatgcaaaattagagacattttcaggggcagacacattagagcattatctaaacataggacagaagagcacaagtcaccaaattactcgagggctccttctggccctggctctaacaggcttaaatgccccctctgccccaccccatt

SEQ ID NO: 26589 - DNA, 535 bp, Macaca Mulatta
aatccaggagctgatgttgccaagggatcccatcaaggccaaactcagggaggatgaggccatggcattcttcccctagcccctcccacctgcttgcctctgagactcagaagcacctcctgtccctgtgtgggctgacctccctgggggagatctcagaccaataacaaagtctgttgctatacttttccttgaggttgtctgaaaactttcttccagaactacttggaacatttagattttgtgtctgtccatgttacatggccaagaatggcagaaaagtggtctgaattacagttctgctggggatgatctcagcccctctggcctcagttagccaggggcattgcccttctgcctcctgggggctagttcttccttgctcaggcaatagccatgccccaccgtgttccctaggggacatgcattatgccagggtttgcattcagaaagatttgggatagggattaataactgacacgcacaggcttgggaggagagtgggagcagtaggtaacgcagaggaattaagcaa

SEQ ID NO: 26590 - DNA, 192 bp, Macaca Mulatta
  misc_feature (1)...(192): n = A,T,C or G
aggagctagaaaaaactcaagatgnncntgatgnaacatcaacccaacatttagcgagctaaaaagacctttcttagaaacctcaccagacactgccatancgaatgatgggagaagagctttccacttcnccggtgcgactgccgccaggcaggaggatgcccccatgatcgaaccacttgtccctgaaga

SEQ ID NO: 26591 - DNA, 746 bp, Macaca Mulatta
  misc_feature (1)...(746): n = A,T,C or G
ggggaaggcaccttgctgaagcccaatatggtcaccccaggccacgcttgcacccagaagttttctcatgaggagattgccatggcgaccgtcacagcgctgcgccgcacagtccccccggctgtcactgggatcaccttcctgtctggaggccagagtgaggaggaggcatccatcaacctcaatgccattaacaagtgccccctgctgaagccctgggccctgaccttctcttatggccgagccctgcaggcctctgccctgaaggcctggggtgggaagaaggagaacctgaaggctgcacaggaggagtacgtcaagcgagccctggccaacagccttgcctgtcaaggaaagtacaccccgagcggtcatgctggagctgctgctagcgagtccctcttcgtctctaaccacgcctattaagcggaggtgttcccaggctgcccccaacactccaggccccgccccctcccactcttgaagagggggcctcctcctcggggctccagactggcttgcccgcgctcttgcctccctcgtgacagtggtgtatggtgtcgtctgtgaatgctaagtccatcacccttttcagcacactggccaaataaacagctattttagnnnnnnnnnnnnnnnnnnnnnnnnnnnnnnnnnnnnnnnnttgtccggcccgccctcgggcccttcgaaaaaagcttttcttagaaccatttcgttttggcgcggcgccggggccccaagtt

SEQ ID NO: 26592 - DNA, 195 bp, Macaca Mulatta
gaaataccagaggtggacagccatctggtagagaagttgggccagcacctcttgccttggatggaccggctttccccggagcacctgaaccccagcatctatgtgggcctgcgcctctccagcctgcaggcggggaccaaggaggacctctacctgcacagcctcaagcttggttaccagcagtgcctcctaggg

SEQ ID NO: 26593 - DNA, 2033 bp, Macaca Mulatta
  misc_feature (1)...(2033): n = A,T,C or G
agacaccggggatggcttgcaagacgcctttcttatgttctttttattcaagagcgagatgtgcataagggcatgtttgccaccaatgtgactgaaaatgtgctgaacagcagtannnnnnnnnnnnnnnnnnnnnnnnnnnnnnnnnnnnnnnnnnnnnnnnnnnnnnnnnnnnnnnnnnnnnnnnnnnnnnnnnnnnnnnnnnnnnnnnnnnnnnnnnnnnnnnnnnnnnnnnnnnnnnnnnnnnnnnnnnnnnnnnnnnnnnnnnnnnnnnnnnnnnnnnnnnnnnnnnnnnnnnnnnnnnnnnnnnnnnnnnnnnnnnnnnnnnnnnnnnnnnnnnnnnnnnnnnnnnnnnnnnnnnnnnnnnnnnnnnnnnnnnnnnnnnnnnnnnnnnnnnnnnnnnnnnnnnnnnnnnnnnnnnnnnnnnnnnnnnnnnnnnnnnnnnnnnnnnnnnnnnnnnnnnnnnnnnnnnnnnnnnnnnnnnnnnnnnnnnnnnnnnnnnnnnnnnnnnnnnnnnnnnnnnnnnnnnnnnnnnnnnnnnnnnnnnnnnnnnnnnnnnnnnnnnnnnnnnnnnnnnnnnnnnnnnnnnnnnnnnnnnnnnnnnnnnnnnnnnnnnnnnnnnnnnnnnnnnnnnnnnnnnnnnnnnnnnnnnnnnnnnnnnnnnnnnnnnnnnnnnnnnnnnnnnnnnnnnnnnnnnnnnnnnnnnnnnnnnnnnnnnnnnnnnnnnnnnnnnnnnnnnnnnnnnnnnnnnnnnnnnnnnnnnnnnnnnnnnnnnnnnnnnnnnnnnnnnnnnnnnnnnnnnnnnnnnnnnnnnnnnnnnnnnnnnnnnnnnnnnnnnnnnnnnnnnnnnnnnnnnnnnnnnnnnnnnnnnnnnnnnnnnnnnnnnnnnnnnnnnnnnnnnnnnnnnnnnnnnnnnnnnnnnnnnnnnnnnnnnnnnnnnnnnnnnnnnnnnnnnnnnnnnnnnnnnnnnnnnnnnnnnnnnnnnnnnnnnnnnnnnnnnnnnnnnnnnnnnnnnnnnnnnnnnnnnnnnnnnnnnnnnnnnnnnnnnnnnnnnnnnnnnnnnnnnnnnnnnnnnnnnnnnnnnnnnnnnnnnnnnnnnnnnnnnnnnnnnnnnnnnnnnnnnnnnnnnnnnnnnnnnnnnnnnnnnnnnnnnnnnnnnnnnnnnnnnnnnnnnnnnnnnnnnnnnnnnnnnnnnnnnnnnnnnnngggaattgatctctccacattggtggaagacttctttgtgatgaaagaggaagtcctggctcgtgattttgacctggggttctcaggaaattcagaagatgtagtaatgcatgccatacagctgctgggaaattgcgtcacaatcactcacactagcaggaacgatgagttttttatcacccccagcacaactgtcccagcagtcttcgaactcaacttctacagcaatggggtacttcatgtctttatcatggaggccatcatagntagcttgcagcctttatgcagttctgaacaagaggggattaggggggcccactggcaccccacctaacctgatcagccaggagcagctggtgcggaaggcggccagcctgtgctaccttctctccaatgagggcaccatctcactgnnnnnnnnnnnnnnnnnnnnnnnnnnnnnnnnnnnnnnnnnnnnnnnnnnnnnnnnnnnnnnnnnnnnnnnnnnnnagcacgatgaccaggaagatatcagtcctagtcttgctgagcagcagtgggacaagaagcttcctgaacctttgtcttggagaagtgatgaagaagatgaagacagtgactttggggaggaacagcgagattgctacctgaaggnnnaggtgagccaatccaaggagcaccagcagtttatcaccttcttacagagactccttgggcctttgctggaggcctacagctctgctgccatctttgttcacaactttagcggtcctgttccagaacctgaatatctgcaaaagttgcacaaatacctagtaaccagaacagaaagaaatgttgcagtatat

SEQ ID NO: 26594 - DNA, 760 bp, Macaca Mulatta
  misc_feature (1)...(760): n = A,T,C or G
aggaagaggaatgnntgaggctcagtttatacatatttagatcagcaatggtgtgccgctggcaggagcagagcgagcctggagatttgggtggctgcagttggtaagtgtttgcaatccagagagtgggactgagatcctcccttgtcatgttagcatcccgtttcctgggcgtggctctgacatcctgcaggtggtcatttcactcatggaggctttgtctctcttctatcaccccagactcagcttcacactccagggctgcacaccaccagccaccgtcatgttaaccccttcctaggtcaatgtgtccctcacctggagcccaatctgctggacagcctgggaccgtccattttcggggtggtgggcaacctggtggccatcgtgttgctgtgcaagtcgcgcgaggagcagaaggagaccgccttctacacactggtatgcggctggccaccaacgacctgttgttcactttgctggtgagccaggtgaccatcgccacgtacatgaaggacgggtagccggggccagcccctgtgccagtacagcatcttcatcctgctcttcttcagccagcccggcctcagcatcatctgcaccctgatatctatacaggtaatttgtgttcgacattctcagaggagtttcataagctttatgttttatctgggttataaaccgagtcctcaaatgcataaaaaagaaatcatgccaggattgaatttcagcaggaataagtttattttacctattcaaa

SEQ ID NO: 26595 - DNA, 1196 bp, Macaca Mulatta
  misc_feature (1)...(1196): n = A,T,C or G
cggcacgaggcttgttttaaagtttttttatttgggagaatttaaaacataaatgaaagcagaatagtatataaacccacatgtacctatcaccagtttcaacgattatcaattcatggccaacttcgatccatctatatccctgtctactccccactcctctattactttaaagcaaaactccccagacatcagatcatttcatctataaatatttcagtatgtatctccaaaagataagactcatttaaacataaaaacaaaaccatcatcacatctaaaaataaattaacaaacaatagttccttaatatcaagaatctagtcaacaacacatgcatttttctgttactcaacttcacaaatgacaagtgactttgagataaaaaagaaaaatattagtgcttttaaaatatcacagccgaaagcgaagaaggaagctcctgcccctcctaaagccgaagccaaagcgaaggctttaaaggccaagaaggcagtgttgaaaggtgtccacagccacaaaaaaaagaagatccgcacgtcacccaccttccggcggcccaagacactgcgactccggaggcagcccaaatatcctcggaagagcgcccccaggagaaacaagcttgaccactatgctatcatcaagtttccgctgactactgagtctgccatgaagaagatagaagacaacaacacacttgtgttcattgtggatgttaaagccaacaagcaccagattaaacaggctgtgaagaagctctatgacattgatgtggccaaggtcaacaccctgattcggcctgatggagagaaaaaggcgtatgttcgactggctcctgattacgacgctttggatgttgccaacaaaattgggatcatctaaactgagtccagctgcctaattctnnnnnnnnnnnnnnnnnncttttcaacacnnantanntncctcttatctataaattntccctgtcgggccgcccttgggccctcgaaaaagtttttttagaaccatttcgttttggcccgcgccgggccccatgttaggtaaaggggaacctggggccaataaccggttttccccagggaaattcctggggccaaggaaccaagggggcttgggaattcctccccccnnnnnnnnnnnnnnnnnnnncgggggggaaaacccgaagcggtttttgtaaaaaaatttcc

SEQ ID NO: 26596 - DNA, 556 bp, Macaca Mulatta
gagaagtgtaggggcctacctgacatgaagggagtacagtctcagctctgccttttatgagctctgtcactctagacaaactacttagcctcactgagtctcaggctttctgtggatcagatgttgaactcgtgccttacatcaaggctgtaatatttgaatgagtttgatatctgaaccttgtaactgttcagtgtgctttgaaatcctttttctctccagaaatggctagttattttagttcttgtggggcagccttcttacccattttcaaagctctgaatcttagggtctcaattaaagaggttcagtttggaacaaacatcactaaacctggcttcctctctcaggagcacggtctgaatctgcacagagcaagatgctgagtggagttgggggctttgtgctgggcctgctcttccttggggcccgggctgttcatctacttcaggaatcagaaaggaccctctggacttcagccagcaggactcctgaggctgaagtgcaggtgagcacattcaacgaagaatcttctgccagaactttgcaggatgaa

SEQ ID NO: 26597 - DNA, 800 bp, Macaca Mulatta
ggcttccacactagcagctggtttgtctgtggcagtgccttgttgctcgtcagcttatcaattgcgttttactgcatagtctacctggaatggtattgtggaattcgagaatatgatgtcaggtatccagccttgatacctattaccactgcctcctttattgcagcaggaatttgcttcaacattgctctatggcatgtgtggtcatttttcactccgttgttgttgtttacccagtttatgggggttgtaatgtttatcacactccttggatgatttttgaagagacagggtcttctgtgtttccaggctggctttgaactcctgggatcaagtgaccctcctgcctcagccttcaaaggagttgggactacaggcccacgccaccgtgcctggctggacatgtaaattggaagtgaatggttaaacatccagctggctgaaagtatggcggaccctcacagaaaagctacagtgtgtttttgcaactatgaagtgaatggtttcctggaaaaattgtgactttgtataactgttgttgaaatcagaataaattatatttcacttgcatattcttaaattattaaaattttcagaagtcagtgatataggaatactattttgcaatgcgaatccatttgaatatttggaggaaggtggtttcattataggtgcataatgcactcttaatattttaacaaatagttcactctttcatttaaaggatagcagttccttatataaaatgactggatgtgtataaaaggaatatgtttgcctgtgccttttacccagcttta

SEQ ID NO: 26598 - DNA, 359 bp, Macaca Mulatta
tacatgtaacttacataactgttaagaataacactctgatttaataaatggttcattttaaaagttcatcagtctttctgtttgaataaaatgatttatcataatttatcaaatactctatggtaggctttaaatagtgaatgaaaatttaaaaaacacttaagctacataatttcctcttaattgcacagcttcatattgtctactgtgtaaggtagcttttatgtcattttcctcctaagttcataaactctatatttctcaactgtttgtggttttaaattaaaacctcaacttgtcatctaatttcagcaaaccttaatttcagtttaacagtgttcttgaaattacgttttgca

SEQ ID NO: 26599 - DNA, 527 bp, Macaca Mulatta
  misc_feature (1)...(527): n = A,T,C or G
agtgaggtcctttggcactgaagaccgtcccacagataggcctgcgccccccagagaggagatttatgagtacatcattttccggggaagtgacatcaaagatatcactgtgtgtgaacctccaaaagctcagcacacactcccacaggatcctgccattgttcannnnnnnnnnnnnnnnnnnnnnnnnnnnnnnnnnnnnnnnnnnnnnnnnnnnnnnnnnnnnnnnnnnnnnnnnnnnnnnnnnnnnnnnnnnnnnnnnnnnnnnnnnnnnnnnnnnnnnnnnnnnnnnnnnnnnnnnnnnnnnnnnnnnnnnnnnnnnnnnnnnnnnnnnnnnnnnnnnnnnnnnnnnnnnnnnnnnnnnnnnnnnnnnnnnnnnnnnnnnnnnnnnnnnnnnnnnnnnnnnnnnnnnnnnnnnnnnccttttctgtttcagatctctattcacttaacacccagtcccacattgtcctgtttagagtccccacaggtcctggaactttggaaagggaggagatggagagagg

SEQ ID NO: 26600 - DNA, 488 bp, Macaca Mulatta
ccccaattattctgacagcaaacctcttcctcctcattgaagccatgccatcaccttggtttggagagagacatttttttcccattcataagctttctttttcccattttcatgtgaagccccttctgcttttcagctggtgattgctctggtgagactgaatggacttgctggtgaaatgaaatctcttctttcctgtcttggtcctgcctaaattcctacaaatatatttaagtcaaggactcaggctaattcctaagttgatcacattaatttgtcactcctagggggaaaaagatcaattcccttgaagcatggggagtacctcctgtgacagctgacttgccaggggactccctacagaattctgtgatatacattttacttctgtgtatgtatggtatatatggtatgtataccatgtacacacatgttacattgagtatgaatgactgtggttggaaaccacacacacactcaagtctgta

SEQ ID NO: 26601 - DNA, 2216 bp, Macaca Mulatta
  misc_feature (1)...(2216): n = A,T,C or G
agaagggaaggtgcacagccattcatttttgctgccacccagggagccactgagattgttaaattgatgatatcgtcctattctggtagcgtggatattgttaacacaaccgatggaagtcatgagaccatgcttcacaggcaagtttcctacctatcattctnnnnnnnnnnnnnnnnnnnnnnnnnnnnnnnnnnnnnnnnnnnnnngggagcagatattaataagatcgattctgaaggacgctctccacttatattagcaactgcttctgcatcttggaatattgtaaatttgctactctctaaaggtnnnnnnnnnnnnnnnnnnnnnnnnnnnnnnnnnnnnnnnnnnnnnnnnnnnnnnnnnnnnnnnnnnnnnnnnnnnnnnnnnnnnnnnnnnnnnnnnnnnnnnnnnnnnnnnnnnnnnnnnnnnnnnnnnnnnnnnnnnnnnnnnnnnnnnnnnnnnnnnnnnnnnnnnnnnnnnnnnnnnnnnnnnnnnnnnnnnnnnnnnnnnnnnnnnnnnnnnnnnnnnnnnnnnnnnnnnnnnnnnnnnnnnnnnnnnnnnnnnnnnnnnnnnnnnnnnnnnnnnnnnnnnnnnnnnnnnnnnnnnnnnnnnnnnnnnnnnnnnnnnnnnnnnnnnnnnnnnnnnnnnnnnnnnnnnnnnnnnnnnnnnnnnnnnnnnnnnnnnnnnnnnnnnnnnnnnnnnnnnnnnnnnnnnnnnnnnnnnnnnnnnnnnnnnnnnnnnnnnnnnnnnnnnnnnnnnnnnnnnnnnnnnnnnnnnnnnnnnnnnnnnnnnnnnnnnnnnnnnnnnnnnnnnnnnnnnnnnnnnnnnnnnnnnnnnnnnnnnnnnnnnnnnnngaacactgcactgcactttgctgcaagggaaggccacgccaaagccgttgcgcttcttctgagccacaatgctgacatagtcctgaacaagcagcaggcctcctttttgcaccttgcacttcacaataagaggaaggaggtggttcttacaatcatcaggagcaaaagnnnnnnnnnnnnnnnnnnnnnnnnnnnnnnnnnnnnnnnnnnnnnnnnnnnnnnnnnnnnnnnnnnnnnnnnnnnnnnnnnnnnnnnnnnnnnnnnnnnnnnnnnnnnnnnnnnnnnnnnnnnnnnnnnnnnnnnnnnnnnnnnnnnnnnnnnnnnnnnnnnnnnnnnnnnnnnnnnnnnnnnnnnnnnnnnnnnnnnnnnnnnnnnnnnnnnnnnnnnnnnnnnnnnnnnnnnnnnnnnnnnnnnnnnnnnnnnnnnnnnnnnnnnnnggttggcttatggatttagagctcatatgatgaatttaggatcttactgtcttggtctcatacctatgaccattctcgttgtcaatataaaaccaggaatggctttcaactcacccagaatcatcaatgaaactagtgatctttcagaaatactagataccacgnnnnnnnnnnnnnnnnnnnnnnnnnnnnnnnnnnnnnnnnnnnnnnnnnnnnnnnnnnnnnnnnnnnnnnnnnnnnnnnnnnnnnnncagaaaaggaattattttatggatatgaacaatgttttggaatggattatctacacaacgggcatcatttttgtgctgcccttgttcgttgaaataccagctcatctgcagtggcaatgtggagcaattgctgtttacctctattggatgaatttcttattgtatcttcaaagnagatttgaaaattgtggaatttttattgttatgttggaggtaattttgaaaactttattgaggtctacagttgtatttatcttccttcttctggcttttggactcagcttttacatcctcctgaatttacaggnnnnnttcagctctccattgcttttctataatccagacctttcagcatgatgtttaggagatatcaatttatcgagagtccttcctaagaaccatatnnnnnnnnnnnnnnnnnnnnnnnnnnnnnnnnnnnnnnnnnnnnnnnnnnnnnnnnnnnnnnnnnnnnnnnnnnnnnnnnnnnnnnnnnnnnnnnnnnnnnnnnnnnnnnnnnnnnnnnnnnnnnnnnnnnnnnnnnnnnnnnnnnnnnnnnnnnnnaggtggaacttcataccagcttagagaagaagctgccactttggtttctacgcaaagtggatcagaaatccatcatcgtgtatcccaacaaacccagatgtggtggg

SEQ ID NO: 26602 - DNA, 134 bp, Macaca Mulatta
ggtgacatcatccggaaaatcatccccaaccacgagctggttggggagctggcggggctgtacttggagagtgtcagcccgagcagtcgcaaccctgccagcatggagcccaccgtgcccagcaccggccccga

SEQ ID NO: 26603 - DNA, 318 bp, Macaca Mulatta
aattcctcctctatcactgagttcttactgctgggcttctccagccttggggaattgcagcttgtcctctttgcagtctttctctgcctctatttgattatcttgagtggaaacatcatcatcatctcggtcattcatttggatcacagcctccacacacccatgtacttctttctaggtattcattctatctcggaaatcttctacacaattgttattctgcccaagatgcttatcaacttattctctgtactcagggcactctcctttgtgagttgtgccacccagatgttcttattgcttggttttgctgtcact

SEQ ID NO: 26604 - DNA, 406 bp, Macaca Mulatta
  misc_feature (1)...(406): n = A,T,C or G
aggagaagcatctgcagcatctggcaaatttttctgcagaggtgagggagcgtaagacagggactcagcaggagcttgagggggtgtttcagaaacttggaaacctgaagcagcaggcagaacaggagcaggacaagctgcagaggtanaggtaccagactttcctccagcttctgtataccctgcagggtaagctgttgttccctgaggctgaagctgaggcagagaatcttccagatgataaaccccagcagctgactcgaccccaggagcaaagtacaggagacactatggggagagatgctggtgtgtccttcaaggncaaggctgtcagcctacaacctgctggagatgcaaatttgccatgacttcctggaggacaacagcatggagaaagatcctagaa

SEQ ID NO: 26605 - DNA, 784 bp, Macaca Mulatta
  misc_feature (1)...(784): n = A,T,C or G
ggatcttctgttgtacagtctaataagctatggtaggaagtatcacgtaatcacagtttaatgacagtttatgtatataattcagtattacctctgataacatagttgccagtgtttaatacacttgtaacttggatttttgccttataggctatatgtatacgcagttttttaaagcatttttttcaaagatcacttaattccccgtgcttctgtaatgcttatgaaaactataaatggcgagtggtggaactcctcctttcctcatagtcctcaggctttggttacttttgcatatgccatttgaagcctccaacttttaccagtttaacatccaaaagtcacagcatcaccattcatggtgtaagaacagttttgcagtataacacgatctgataatcattcagttaatcaattgtaaataattactggggatggtttcttgggctctaagtctactgaataaaatctatgaaattggtactctgtggttaccctccccctagggataaaaataccggaaaactgtgcctgccaaaaataccgaaaaggggccccttttgtacccccatttcgaaagtttggcaaacctcctaaataaaaaatgtttcccatggccccttttgggnnnnnnnnnnnnnnnnnncctggggtttccccacgaaaatttnnnnnnnnnnnnnnnnnnnnnnntggttaaaaattttaaaagggtttttccgggggggaaaaattttttgagaaaaaaccgggggtggggtctcttttttgggaaccaccaaaa

SEQ ID NO: 26606 - DNA, 373 bp, Macaca Mulatta
tccaaacctcatcaccgtctcatcttcctagctcctgttgcaacagcatcagggccaacttctcgctggcggacctggagagtcccagctactacaacatcaaccaggtgaccctggggcggcggtccatcacctcccctccttccaccaggtgagcccagtggtcctgcctttccatcttctctccacttcccccagggccagggccctcccagtggctatagtcagctatgtcaccgaggctgcggtgcttcagaatgtcacctctctttgagggcactggctctaacactttagagtccaccatgcgcagtcaccccctgagctcctgctttgtgctgtcatgaagcacccagccctggggacacaaact

SEQ ID NO: 26607 - DNA, 613 bp, Macaca Mulatta
  misc_feature (1)...(613): n = A,T,C or G
ctatatgattacagtgtggtatgcattcatacaggcagcgttggtctcagaacccaaacaatttgctctaggggaagagggagatggagactggtcctgtgtgcagtgaaggttgctgaggctctgacccaatgagattacagaggaagtaccctctgcctcccattctgaccacccttctcattccaacagtgagtctgtcagtgcaggtttagtttactcaatctcccgcttgcactaaagtatgtaaacaggagacaggaaagtggtgcttacatacttaaaggcaccatctaatagtgggttactttcacatacaggcctcccccagcagttgaatgacaacagaagtttggcaatagtttgcatagaggtaccagcaatatgtaaatagtgcagaatctcataggttgccaataatacactaattcctttctatcctacaacaagagtttatttccaaataaaatgaggacatgtttctgtgttctttgaatgctttttgaatgttatttgttattttcagtatcttggagaaattatttaataaaaaacaatcatttgctttttgaatgctctctanaagggaatgtactattttaagatggtttgt

SEQ ID NO: 26608 - DNA, 966 bp, Macaca Mulatta
ggagaagtcgcagggaaatgttgataataaggaatatgcagttaatgaagttgtggcaggaataaaagaatatttcaatgtgatgttgggcactcagctgctctacaaatttgagaggccccagtatgctgaaatcctcttggctcaccctgatgctccaatgtctcaggtttatggagcaccacacctactgagattatttgtaagaattggagcaatgttggcctatacgccccttgatgagaaaagccttgcattattgttgggctatttgcatgatttcctaaaatatctggcaaagaattctgcatctctctttactgccagtgattacaaagtggcttctgctgagtaccaccgcaaagccctgtgagcgtctacagacagctcaccatttttgtcctgtatctgtaaacactttttgttcttagtctttttcttgtaaaattgatgttctttaaaatcgttaatgtataacagggcttatgtttcagtttgttttctgttctgttttaaacagaaaataaaaggagtgtaagctccttttctcatttcaaagttgctaccagtgtatgcagtaattagaacaaagaagaaacagtagaacattttattgcctagttgacaacattgcttgaatgctggtggttcctatccctttgacactacacaattttctaatatgtgttaatgctacgtgacaaaacgccctgattcctagtgccaaaggttcaacttaatgtatatacctgaaaacccatgcatttgtgctctttttttttttatggtgcttgaagtaaaacagcccatcctctgcaagtccatctatgttgttcttaagcattctatctttgctcaaattgttgaaggatggtgatttgtttcatggtttttgtatttgagtctaatgcacgttctaacatgatagaggcaatgcattattgtgtagccacggttttctggaaa

SEQ ID NO: 26609 - DNA, 545 bp, Macaca Mulatta
taactttatttaaaatgacttttaacattatgagagactgcttagattctaagttgttggccttgtgtgtgtgttttttaagttcccgtcattataacatatactgtgatgtatctttactggaaatgagcccaagcacacgtacatggcatttgtgccacaggagggcattgctggggatgcggctggagcacgagccagctctgtcccaggatggtcccagcggacgctgtcaggggcaatgaagtgtttagatgaaggacaagtaggtaagaggacgccttcaggcaccacagataaacctgaaacagcctctccaagggttttaaccttagcaacaaagggagctgtgggaatgattttggcaacactgtcaacatttgttagaacaagtcttttgaaagaaaagtatttccagtttgtcacttgccactctattttgcaaaaggtggcccttcactgtccattccgaatgagccacacgtgccctgctggattctaaattatgtgaattttgccatattaagtcttcctcatttatacta

SEQ ID NO: 26610 - DNA, 250 bp, Macaca Mulatta
  misc_feature (1)...(250): n = A,T,C or G
ggataaaggctcactgatggctcagttgggagcagttgtggctgtggcttccagtttcttgtgtgcatctctcttctcagctgtgcacaagatagaagaaaggcatattggggtatattacannnnnnnnnnnnnnnnnnnnnnnnnnnnnnnnnnnnnnnnnnnnnnnnnnnnnnnnnnnnnnnnnnnnnnnnnnnnnnncagaccacactccagacagatgaggtgaagaatgtaccttgtgggacta

SEQ ID NO: 26611 - DNA, 599 bp, Macaca Mulatta
caccgcacccccatacgactcacttgcaacctatgcctatgaaggaaatgattccattgctgaatctctgagttcattagaatcaggtactactgaatgagaccaaaactacgattacctccgagaatggggccctcggtttaataagctagcagaaatgtatggtggtggggaaagtgacaaagactcttaacgtaggatatatgttctgttcaaacaagagaaagtaactatacccatgctgtctccacttcacaatatttgatattcaggaggtttttcctgccagtcagcacaatttttttttcccatttacttcttaatttgttcattaattacattaattctttcctgtaggatgtctcctggaatatatacaacattttatttaatcacttccaagagccaaagctatggaaatacagtgttgtccatcttagtaaataaaagataatttcagaaacatgaacaggatagttctcccttaagcaacctcacaaacaagccgcttctgttagatacatgtcctgcccttgcaaatgaagcttttaaaaaggtgaagaaaaattttaaggtatatcctgttctgtacattaaat

SEQ ID NO: 26612 - DNA, 2516 bp, Macaca Mulatta
  misc_feature (1)...(2516): n = A,T,C or G
cccttacagggatcagtgtcattcaaggatgtgactgtggacttcacccaggaggagtggcagcaactagaccctgctcagaaggccctctacagggatgtgatgttggaaaactattgccactttgtatctgtggnnnnnnnnnnnnnnnnnnnnnnnnnnnnnnnnnnnnnnnnnnnnnnnnnnnnnnnnnnnnnnnnnnnnnnnnnnnnnnnnnnnnnnnnnnnnnnnnnnnnnnnnnnnnnnnnnnnnnnnnnnnnnnnnnnnnnnnnnnnnnnnnnnnnnnnnnnnnnnnnnnnnnnnnnnnnnnnnnnnnnnnnnnnnnnnnnnnnnnnnnnnnnnnnnnnnnnnnnnnnnnnnnnnnnnnnnnnnnnnnnnnnnnnnnnnnnnnnnnnnnnnnnnnnnnnnnnnnnnnnnnnnnnnnnnnnnnnnnnnnnnnnnnnnnnnnnnnnnnnnnnnnnnnnnnnnnnnnnnnnnnnnnnnnnnnnnnnnnnnnnnnnnnnnnnnnnnnnnnnnnnnnnnnnnnnnnnnnnnnnnnnnnnnnnnnnnnnnnnnnnnnnnnnnnnnnnnnnnnnnnnnnnnnnnnnnnnnnnnnnnnnnnnnnnnnnnnnnnnnnnnnnnnnnnnnnnnnnnnnnnnnnnnnnnnnnnnnnnnnnnnnnnnnnnnnnnnnnnnnnnnnnnnnnnnnnnnnnnnnnnnnnnnnnnnnnnnnnnnnnnnnnnnnnnnnnnnnnnnnnnnnnnnnnnnnnnnnnnnnnnnnnnnnnnnnnnnnnnnnnnnnnnnnnnnnnnnnnnnnnnnnnnnnnnnncatcagagaactcacacaggtgagaaaccctatgtttgtaatgaatgtggtaagtcnnnnnnnnnnnnnnnnnnnnnnnnnnnnnnnnnnnnnnnnnnnnnnnnnnnnnnnnnnnnnnnnnnnnnnnnnnnnnnnnnnnnnnnnnnnnnnnnnnnnnnnnnnnnnnnnnnnnnnnnnnnnnnnnnnnnnnnnnnnnnnnnnnnnnnnnnnnnnnnnnnnnnnnnnnnnnnnnnnnnnnnnnnnnnnnnnntacatcagagaactcacacaggtgagaaaccctatgtttgtaatgaatgtggtaagtcnnnnnnnnnnnnnncaaatcttattgtacatcagagaactcacacaggtgagaaaccctatgtttgtaatgaatgtggnnnnnnnnnnnnnnnnnnnnnnnnnnnnnnnnnnnnnnnnnnnnnnnnnnnnnnnnnnnnnnnnnnnnnnnnnnnnnnnnnnnnnnnnnnnnnnnnnnnnnnnnnnnnnnnnnnnnnnnnnnnnnnnnnnnnnnnnnnnnnnnnnnnnnnnnnnnnnnnnnnnnnnnnnnnnnnnnnnnnnnnnnnnnnnnnnnnnnnnnnnnnnnnnngaactcacacaggtgagaaaccctatgtttgtaatgaatgtggtaagtctttcagtnnnnagacaaatcttattgtacatcagagaactcacacaggtgagaaaccctatgtttgtaatgaatgtggtaagtcnnnnnnnnnnnnnnnnnnnnnnnnnnnnnnnnnnnnnnnnnnnnnnnnnnnnnnnnnnnnnnnnnnnnnnnnnnnnnnnnnnnnnnnnnnnnnnnnnnnnnnnnnnnnnnnnnnnnaaagaactcatacggggaggaaaccatataaagtagtgaatttggaaagggcttcccccggagacaaaatttttttttacatcggagaactcccccaggtgagaaaccctatgtttgtaatgaatgtggtaagtctttcagttataagagaaacctcattgtccatcaaagaactcacaagggagaaaacattgaaatgcaataaatgatgtggtttcttatatgaaatctttacaagctattgtaaacctttagttttaaaaagaaaagcatgctgaaacatgttaatgtaattttaaatcacaagtctaataattattaaagtaccatactgaataactgtctactgtttactagcatataaaatgggtgtgatcattattattgaactctatcagctatgaagcnnnnnnnnnnnnncaactgctcttcctactgactcaaatagtttatttttaaaaaatacttatataacacatgcagagacaagatacggaatgattataagcattaatctccataagagaaaatatttatgaactatatttctcattgcactctgtaataaaaagcagttagttgttacttacctaagagttaccacttccataccctataacatcaaaacgtagtttttgcatgtttataattttatatatatatatattttatcagacatcatgaattcttttatgtcttgcttatttcactcagtgtttttaagatctgtacattattgcatgtggcagtagtgtattttcattttgcatactattccattttaagaatatattcatatttatcctattgatggatatttgtatttttatacttttgtgtaataataaaattgctgctgtaaata

SEQ ID NO: 26613 - DNA, 514 bp, Macaca Mulatta
  misc_feature (1)...(514): n = A,T,C or G
gggcacagaaaattgcagaacatccgagaaaatatgagcgaaaacgtgaagagcgagagatcaaagaaagaatagaacaagttaagaaggctcgagaagagcatgagagatcncagagggaggaagaagccagtgacactcaagagctcagtatggctcttttccaggtggctttccccggggaatgcctggtagttttcccggaggaatgcctggaatgggaggaggcatgcttggaatggccggaatnnnnnnnnnaatgaaattcttagtgatccagaggttcttgcagccatgcaggatccagaagttatggtggccttccacgatgtggctcagaacccagcaaatatgtcaaaacaccagagcaccacaaaggttatgaatcttatcagtaaattgtcagccctatttggaggtcaagnnnnngcccttctgataaataaagcccttgctgaaggaaaagcaacatagagcaccttatggatgtcgcagtaatacaaacccaatgtac

SEQ ID NO: 26614 - DNA, 970 bp, Macaca Mulatta
  misc_feature (1)...(970): n = A,T,C or G
ntggccttcctgcgagaagcgctgcagttactgtaacttcaacaagtacatcccccgcggcgtagaggaggctgccatgcagaagtgtctggtgaccgaagcgcagacgctgctgcggctcagcggggtgcaacgnnnnnnnnnnnnnnnnnnnnnnnnnnnnnnnnnnnnnnnnnnnnnnnnnnnnnnnnnnnnnnnnnnnnnnnnnnnnnnnnnnnnnnnnnnnnnnnnnnnnnnnnnnnnnnnnnnnnnnnnnnnnnnnnnnnnnnnnnnnnnnnnnnnnnnnnnnnnnnnnnnnnnnnnnnnnnnnnnnnnnnnnnnnnnnnnnnnnnnnncagtccctagataacactgagctccggctgctgggacggacgcactcggcctgcgatgctctgcggacgctggcagaggcccggcgcctctttcccgggcgcgtgtctgtggacctcatgctggggctgccggcccagcaggtggggccgtggcttgnnnnnnnnnnnnnnnnnnnnnnnnnnnnnnnnnnnnnnnnnnnnnnnnnnnnnnnnnnnnnnnnnnnnnnnnnnnnnnnnnnnnnnnnnnnnnnnnnnnnnnnnnnnnnnnnnnnnnnnnnnnnnnnnnnnnnnnnnnnnnnnnnnnnnnnnnnnnnnnnnnnnnnnnnnnnnnnnnnnnnnnnnnnnnnnnnnnnnnnnnnnnnnnnnnnnnnnnnnnnnnnnnnnnnnnnnnnnnnnnnnnnnnnnnnnnnnnnnnnnnnnnnnnnnnnnnnnnnnnnnnnnnnnnnnnnnnnnnnnnnnnnnnnnnnnnnnnnnnnnnnnnnnnnnnnnnnnnnnnnnnnnnnnnnnnnnnnnnnnnnnnnnnnnnnnnnnnnnnnnnnnnnnnnnnnnnnnnnnnnnnnnnnnnnnnnnnnnnnnnnnnnctggaggaagttttggccctgggtttacgcactgatgtggggatcactcaccag

SEQ ID NO: 26615 - DNA, 99 bp, Macaca Mulatta
aggcaagactcgtggctgtgacccatgggcctctgaggaggcattgtaagtccgcccagctccccacttgctgtgctcccactcaatgcgaagggaacc

SEQ ID NO: 26616 - DNA, 7159 bp, Macaca Mulatta
  misc_feature (1)...(7159): n = A,T,C or G
cagaaacgacgctcgggaaggcaagtaaagcgcagaaaatacaatgaggacctggacttcaaagtggtggatgatgatggggaaacaattgctgttcttggagctggtcgaacgtctgcactctcagcttctacactggcctggcaggcggagnnaggagcctccagaagatgatgcaaacatcattgagaagatcctggcatctaagactgtccaggaggtnnnnaggttcacccaggagaacctccatttgacttggagctgttctacgttaagtatagaaattnnnnnnnnnnnnnnnnnnnnnnnnnnnnnnnnnnnnnnnnnnnnnnnnnnnnnnnnnnnnnnnnnnnnnnnnnnnnnnnnnnnnnnnnnnnnnnnnnnnnnnnnnnnnnnnnnnnnnnnnnnnnnnnnnnnnnnnnnnnnnnnnnnnnnnnnnnnnnnnnnnnnnnnnnnnnnnnnnnnnnnnnnnnnnnnnnnnnnnnnnnnnaggaggtaacacattacctggtgaagtggtgctcactaccatatgaggaaagcacatgggagctagaggaagatgtggatcctgcaaaagttaaagaatttgaatctcttcaagttctccctgaaattaagcatgtgnnnnnnnnnnnnnnnnnnnnnnnnnnnnnnnnnnnnnnnnnnnnnnnnnnnnnnnnnnnnnnnnnnnnnnnnnnnnnnnnnnnnnnnnnnnnnnnnnnnnnnnnnnnnnnnnnnnnnnnnnnnnnnnnnnnnnnnnnnnnnnnnnnnnnnnnnnnnnnnnnnnnnnnnnnnnnnnnnnnnnnnnnnnnnnnnnnnnnnnnnnnnnnnnnnnnnnnnnnnnnnnnnnnnnnnnnnnnnnnnnnnnnnnnnnnnnnnnnnnnnnnnnnnnnnnnnnnnnnnnnnnnnnnnnnnnnnnnnnnnnnnnnnnnnnnnnnnnnnnnnnnnnnnnnnnnnnnnnnnnnnnnnnnnnnnnnnnnnnnnnnnnnnnnnnnnnnnnnnnnnnnnnnnnnnnnnnnnnnnnnnnnnnnnnnnnnnnnnnnnnnnnnnnnnnnnnnnnnnnnnnnnnnnnnnnnnnnnnnnnnnnnnnnnnnnnnnnnnnnnnnnnnnnnnnnnnnnnnnnnnnnnnnnnnnnnnnnnnnnnnnnnnnnnnnnnnnnnnnnnnnnnnnnnnnnnnnnnnnnnnnnnnnnnnnnnnnnnnnnnnnnnnnnnnnnnnnnnnnnnnnnnnnnnnnnnnnnnnnnnnnnnnnnnnnnnnnnnnnnnnnnnnnnnnnnnnnnnnnnnnnnnnnnnnnnnnnnnnnnnnnnnnnnnnnnnnnnnnnnnnnnnnnnnnnnnnnnnnnnnnnnnnnnnnnnnnnnnnnnnnnnnnnnnnnnnnnnnnnnnnnnnnnnnnnnnnnnnnnnnnnnnnnnnnnnnnnnnnnnnnnnnnnnnnnnnnnnnnnnnnnnnnnnnnnnnnnnnnnnnnnnnnnnnnnnnnnnnnnnnnnnnnnnnnnnnnnnnnnnnnnnnnnnnnnnnnnnnnnnnnnnnnnnnnnnnnnnnnnnnnnnnnnnnnnnnnnnnnnnnnnnnnnnnnnnnnnnnnnnnnnnnnnnnnnnnnnnnnnnnnnnnnnnnnnnnnnnnnnnnnnnnnnnnnnnnnnnnnnnnnnnnnnnnnnnnnnnnnnnnnnnnnnnnnnnnnnnnnnnnnnnnnnnnnnnnnnnnnnnnnnnnnnnnnnnnnnnnnnnnnnnnnnnnnnnnnnnnnnnnnnnnnnnnnnnnnnnnnnnnnnnnnnnnnnnagatacacctatgagcgaattgatgggcgagtacggggaaacctgcgccaggcagccatcgaccggttctgtaagccagattcagaccgctttgtctttcttctgtgcaccagagcgggaggcctggggatcaatctcacagctgctgatacctgcatcatatttgattctgactggaacccacaaaatgacttgcagnnnnnnnnnnnnnnnnnnnnnnnnnnnnnnnnnnnnnnnnnnnnnnnnnnnnnnnnnnnnnnnnnnnnnnnnnnnnnnnnnnnnnnnnnnnnnnnnnnnnnnnnnnnnnnnnnnnnnnnnnnnnnnnnnnnnnnnnnnnnnnnnnnnnnnnnnnnnnnnnnnnnnnnnnnnnnnnnnnnnnnnnnnnnnnnnnnnnnnnnnnnnnnnnnnnnnnnnnnnnnnnnnnnnnnnnnnnnnnnnnnnnnnnnnnnnnnnnnnnnnnnnnnnnnnnnnnnnnnnnnnnnnnnnnnnnnnnnnnnnnnnnnnnnnnnnnnnnnnnnnnnnnnnnnnnnnnnnnnnnnnnnnnnnnnnnnnnnnnnnnnnnnnnnnnnnnnnnnnnnnnnnnnnnnnnnnnnnnnnnnnnnnnnnnnnnnnnnnnnnnnnnnnnnnnnnnnnnnnnnnnnnnnnnnnnnnnnnnnnnnnnnnnnnnnnnnnnnnnnnnnnnnnnnnnnnnnnnnnnnnnnnnnnnnnnnnnnnnnnnnnnnnnnnnnnnnnnnnnnnnnnnnnnnnnnnnnnnnnnnnnnnnnnnnnnnnnnnnnnnnnnnnnnnnnnnnnnnnnnnnnnnnnnnnnnnnnnnnnnnnnnnnnnnnnnnnnnnnnnnnnnnnnnnnnnnnnnnngctggggccggtggaaggacatcctgactcatggccgattcaaatggcatctgaacgagaaggacatggagatgatttgccgtgccctcctggtgtactgtgtcaagcattataagggagacgagaagatcaagagtttcatttgggaactgatcacacctaccaaagacgggcaagcccagaccctccagaaccactcagnnnncaggcttgtctgccccagtccctagagggaggaaggggaagaagacgaagaaccagctgctaatcccagagctaaaggatgcagattggctggccacctgcaaccccgaggtggtcttgcatgatgacggctataagaaacatctcaaacagcactgcaacaaagtacttttgcgagtccggatgctgtactacctaaaagctgaaatactgggagaagcagctgagaaagcatttgaaggaactcctgccagnnnnnnnnnnnnnnnnnnnnnnnnnnnnnnnnnnnnnnnnnnnnnnnnnnnnnnnnnnnnnnnnnnnnnnnnnnnnnnnnnnnnnnnnnnnnnnnnnnnnnnnnnnnnnnnnnnnnnnnnnnnnnnnnnnnnnnnnnnnnnnnnnnnnnnnnnnnnnnnnnnnnnnnnnnnnnnnnnnnnnnnnnnnnnnnnnnnnnnnnnnnnnnnnnnnnnnnnnnnnnnnnnnnnnnnnnnnnnnnnnnnnnnnnnnnnnnnnnnnnnnnnnnnnnnnnnnnnnnnnnnnnnnnnnnnnnggagagttccagtgatggaggtgatggcatttttggcgaaaagaaggatgacagccgggcagnagcccaggatggctccgacccagacaaatcgccctggccagtttcatccgccctcacagctcgtctcagacgtctggtcactgtttaccagcgctgcaaccgcaaagaactgtgccggcctgaaattctgggaccaggtagccaaggatactgggttcaggaagagatgttcaggagaacctcagaaatggacctcatcaacaaggaagcccaaaagaggnnnnnnnnnnnnnnnnnnnnnnnnnnnnnnnnnnnnnnnnnnnnnnnnnnnnnnnnnnnnnnnnnnnnnnnnnnnnnnnnnnnnnnnnnnnnnnnnnnnnnnnnnnnnnnnnnnnnnnnnnnnnnnnnnnnnnnnnnnnnnnnnnnnnnnnnnnnnnnnnnnnnnnnnnnnnnnnnnnnnnnnnnnnnnnnnnnnnnnnnnnnnnnnnnnnnnnnnnnnnnnnnnnnnnnnnnnnnnnnnnnnnnnnnnnnnnnnnnnnnnnnnnnnnnnnnnnnnnnnnnnnnnnnnnnnnnnnnnnnnnnnnnnnnnnnnnnnnnnnnnnnnnnnnnnnnnnnnnnnnnnnnnnnnnnnnnnnnnnnnnnnnnnnnnnnnnnnnnnnnnnnnnnnnnnnnnnnnnnnnnnnnnnnnnnnnnnnnnnnnnnnnnnnnnnnnnnnnnnnnnnnnnnnnnnnnnnnnnnnnnnnnnnnnnnnnnnnnnnnnnnnnnnnnnnnnnnnnnnnnnnnnnnnnnnnnnnnnnnnnnnnnnnnnnnnnnnnnnnnnnnnnnnnnnnnnnnnnnnnnnnnnnnnnnnnnnnnnnnnnnnnnnnnnnnnnnnnnnnnnnnnnnnnnnnnnnnnnnnnnnnnnnnnnnnnnnnnnnnnnnnnnnnnnnnnnnnnnnnnnnnnnnnnnnnnnnnnnnnnnnnnnnnnnnnnnnnnnnnnnnnnnnnnnnnnnnnnnnnnnnnnnnnnnnnnnnnnnnnnnnnnnnnnnnnnnnnnnnnnnnnnnnnnnnnnnnnnnnnnnnnnnnnnnnnnnnnnnnnnnnnnnnnnnnnnnnnnnnnnnnnnnnnnnnnnnnnnnnnnnnnnnnnnnnnnnnnnnnnnnnnnnnnnnnnnnnnnnnnnnnnnnnnnnnnnnnnnnnnnnnnnnnnnnnnnnnnnnnnnnnnnnnnnnnnnnnnnnnnnnnnnnnnnnnnnnnnnnnnnnnnnnnnnnnnnnnnnnnnnnnnnnnnnnnnnnnnnnnnnnnnnnnnnnnnnnnnnnnnnnnnnnnnnnnnnnnnnnnnnnnnnnnnnnnnnnnnnnnnnnnnnnnnnnnnnnnnnnnnnnnnnnnnnnnnnnnnnnnnnnnnnnnnnnnnnnnnnnnnnnnnnnnnnnnnnnnnnnnnnnnnnnnnnnnnnnnnnnnnnnnnnnnnnnnnnnnnnnnnnnnnnnnnnnnnnnnnnnnnnnnnnnnnnnnnnnnnnnnnnnnnnnnnnnnnnnnnnnnnnnnnnnnnnnnnnnnnnnnnnnnnnnnnnnnnnnnnnnnnnnnnnnnnnnnnnnnnnnnnnnnnnnnnnnnnnnnnnnnnnnnnnnnnnnnnnnnnnnnnnnnnnnnnnnnnnnnnnnnnnnnnnnnnnnnnnnnnnnnnnnnnnnnnnnnnnnnnnnnnnnnnnnnnnnnnnnnnnnnnnnnnnnnnnnnnnnnnnnnnnnnnnnnnnnnnnnnnnnnnnnnnnnnnnnnnnnnnnnnnnnnnnnnnnnnnnnnnnnnnnnnnnnnnnnnnnnnnnnnnnnnnnnnnnnnnnnnnnnnnnnnnnnnnnnnnnnnnnnnnnnnnaaaccagtactatcgccctggtgggtgaacccactgctgttgcatcagagccgtttaaagcgaagcatgagncttttaaaagaaccttggaaagaaggtgcagaggggcaaaaagttttccccacatatcctctcgaaggaagcgagctcaaagcagaagacatggattttgagaataaagatgagtatgatagagatggaaactgccatagtcaagnagattatccagggaagtactctgaagaggagagcaagannnnnnnnnnnnnnnnnnnnnnnnnnnnnnnnnnnnnnnnnnnnnnnnnnnnnnnnnnnnnnnnnnnnnnnnnnnnnnnnnnnnnnnnnnnnnnnnnnnnnnnnnnnnnnnnnnnnnnnnnnnnnnnnnnnnnnnnnnnnnnnnnnnnnnnnnnnnnnnnnnnnnnnnnnnnnnnnnnnnnnnnnnnnnnnnnnnnnnnnnnnnnnnnnnnnnnnnnnnnnnnnnnnnnnnnnnnnnnnnnnnnnnnnnnnnnnnnnnnnnnnnnnnnnnnnnnnnnnnnnnnnnnnnnnnnnnnnnnnnnnnnnnnnnnnnnnnnnnnnnnnnnnnnnnnnnnnnnnnnnnnnnnnnnnnnnnnnnnnnnnnnnnnnnnnnnnnnnnnnnnnnnnnnnnnnnnnnnnnnnnnnnnnnnnnnnnnnnnnnnnnnnnnnnnnnnnnnnnnnnnnnnnnnnnnnnnnnnnnnnnnnnnnnnnnnnnnnnnnnnnnnnnnnnnnnnnnnnnnnnnnnnnnnnnnnnnnnnnnnnnnnnnnnnnnnnnnnnnnnnnnnnnnnnnnnnnnnnnnnnnnnnnnnnnnnnnnnnnnnnnnnnnnnnnnnnnnnnnnnnnnnnnnnnnnnnnnnnnnnnnnnnnnnnnnnnnnnnnnnnnnnnnnnnnnnnnnnnnnnnnnnnnnnnnnnnnnnnnnnnnnnnnnnnnnnnnnnnnnnnnnnnnnnnnnnnnnnnnnnnnnnnnnnnnnnnnnnnnnnnnnnnnnnnnnnnnnnnnnnnnnnnnnnnnnnnnnnnnnnnnnnnnnnnnnnnnnnnnnnnnnnnnnnnnnnnnnnnnnnnnnnnnnnnnnnnnnnnnnnnnnnnnnnnnnnnnnnnnnnnnnnnnnnnnnnnnnnnnnnnnnnnnnnnnnnnnnnnnnnnnnnnnnnnnnnnnnnnnnnnnnnnnnnnnnnnnnnnnnnnnnnnnnnnnnnnnnnnnnnnnnnnnnnatttttcagacaaaccaaagcagaggaggccacgctgtanagaacctggaanattagatgtcagctctctgagtggngaagagagggttcctgccgtcccaaggagccagannnnnnnnnnnnnnnnnnnnnnnnnnnnnnnnnnnnnnnnnnnnnnnagcctgttcttcgagatacgggcccccgcaggagggggaggcggcctcggagcgagctcctgaatgctccttccattgtggcagactctccctctggaatggggccgctgttcatgaatggactgattgctgggatggacctggtaggacttcagaacatgagaaatatgccaggcatccccctcaccgggctggtggggtttccagctggctttgccacgatgccaacgggtgaagaggtcaaaagtaccctgagcatgctgcccatgatgctgccgggcatggctgttgtgccccagatgtttggtgttgggggactcctcagtccacccatggcaaccacctgcacttccactgctccggcgtctctgtcaagcacaacgaaaagtggtacggcagtgactgaaaagactgcgagagacaagccgagtagccatgatgtgaaaacagacactttagctgaggataagcctggtccaggtccattttctgatcagtctgaacctgcaataactactagtagtcctgtggcttttaacccatttctc

SEQ ID NO: 26617 - DNA, 1627 bp, Macaca Mulatta
  misc_feature (1)...(1627): n = A,T,C or G
cgagatccacgggaaccacggcctctctgctgttgagcaggaccccctctgccacccctagagcctcttggtggtcccaaaggtgcccccctctgtgaatagccagctctacctcttggaggtggtgctcccctcccccttggtgntgttggagcacctcgccctcccnnnnnnnnnnnnnnnnnnnnnactgcatagccatcatcatagccgtagtagggatcttcatagcctccacgatagtcgtgataatcataaccatagtaatcatcatagtaatcttcatagccatagtaatctggagggtagccatatccacctctccccccaccacgaccccgacctctaattggaggtggcattcgaggaggagggtggtagtaataatcttcatacgcagtgcttctggaggcctgtctagcagcttggcgctctttccttttcttgtctggtggcttggctaagactatttcaatttcttccccttctatttctttgccattcatttcatccatagccttaacagctgctcctctgtcttcaaagatgaacaaatgcataatctttcaacttctttactctttcgagttttccaaattcagaaaatgacttttccaatatttcttctgtcactgtagtagccaagtttctcacaaacaaaacttttaccttagccatgacttctggatctggttcttccacagggtcagcccattcaactgtaactacatttccccacacttttacttttccactcatcagccggcgtctggcttgtgctgctgacttgtgatcctcatattcaaggaagcagaacccccgattcttctttttgtcatcgggttgatgatagagaaataaacggtcccaccaaaccctctgttaaacctgtgacttttacctgaattcttccacaaaatgttttccttaagtcttattccttcggaaatggatcccaacaaaaaagtctgttgtttcccacagaaatgcacactccaaggtgtttaccaggggcgaatttcatagctgtcacacagtttcacggctttcctgtgcagcttcctttccacagaaggtgataaatgcataccctctattctgaccagacagtggatccatcataagacgcagatcccaaatgggtccagccttctcgaaaaggggcaccaactcatcctcatataaatctcttggtattttgcctacaaacacctccgttccaattccaggttgcacgccagagtacacactgtctggtggaggaccaccatacttcctctgtcctgtggttacatccagagtataaccagttctctcaagcaaggccttgatctttgcttcatcaggtccctttgtggactcttgcaccttgctcccctgtttctctctctgcctgtaggtcttcataactccacataaaaatgcacttttgttctgaacatgtgataagtcactttccttgaactgctgtagtacagacagagctccttcttcattaaattccctgagagcatcaattgctctttcatcaagatcgacataagctaccaatccagggcagagcgggggccggcggccgggcccgtgagaatcagcgcgaggcgctttgaaaacgactagaaatccc

SEQ ID NO: 26618 - DNA, 722 bp, Macaca Mulatta
  misc_feature (1)...(722): n = A,T,C or G
gcattttacttttatttatttttgctttaataatgcatattctgttcacgcaaaaggtgcaaaggacagaaagcaggggtttaacttggctgatgaaaaatcaagcagggatgacatttctagtttcatgaacaacctaagactaggagaaatataaaagtcacagctggtaccacagagcacgcccaacttcacagctgtctcctcttaggacctttggctagggtgagagaagctttgaagacagtggcctctagtggacttggataagtggcnnnnnnnnnnnnnnnnnnnnnnnnnnnnnnnnnnnngaatcatggtagctgcatcacaaaagctccaatcaagagggtggtaaaaagaaggcacagtatcattgcaaataccagattttctctctctctttttgtaaatataccatcatatataagctaaaatttctcttagggtggtggggtttgctggcaggggaaggggcaggttgaacctacaattgcatatgtaatagaatcctaatgggggacaaagagcgaggcagccctcagcctgaagcaaaagaaaaggacactcgcttctgactacgtgtagcacaaacactagggaagtctgtgacaaaacacgattaaaaaatcataaaattataaagcttgtaaacgaataatctgaaattacattttattaatggacaatatcatccaaatagttccactatggactaaact

SEQ ID NO: 26619 - DNA, 589 bp, Macaca Mulatta
  misc_feature (1)...(589): n = A,T,C or G
acaaacatacacatccccagaagtatcatatgcaactagctccntgggaaagaaacttgtagtaaggtcacttctaggttgtttgtgctataagaacttcatttttcagtgtctctcatttgcaaagcacttgcacgtaaagtcacataaaagaacttaaatgtataaaatgtaatattataatatgcagtattgtcaatcatttaaaatgaacacattccagacaatgtgagacagtcaaaagacaaactcaaatccctgagaatggctgggaagggaggatggtggtaaaaattccaaatgagtgaaacttacacagggcagtctcccctacctgggctctgtcctagacagaagtgacagtgacaactttggtgatgttctccccagtgcacagaactgcattcagaattagacaacctcagtgacgagtatctctcctgcctgcgtaagctgcagcactgtcgagaagagctgaaccagagccagcagctgcctcccagagtaagagggtctctccttcccataaagccctggatgatgggatgattccttccttaaccaagatttgcagattaaatatatcagc

SEQ ID NO: 26620 - DNA, 1322 bp, Macaca Mulatta
  misc_feature (1)...(1322): n = A,T,C or G
gacaatgccaggcgtttcctgtaccgcctgtgtcataccatggtggagggacctgatgccaccttgtggatgtttgggggcctgggcctgccccaggggatgctgggaaacctgtacaggtncaggtactcagtgagtgagcggcggtggacacagatgctggcgggagctgaggatgggggcccaggcccatcaccccgctccttccatgcagctgcatatgtgcctgctggccgtggtgccatgtatctgctggggggactcaccgctgggggtgtcacccgtgatttctgggtcctcaacctcaccaccctgcaatggcggcaggagaaggnnnnnnnnnnnnnnnnnnnnnnnnnnnnnnnnnnnnnnnnnnnnnnnnnnnnnnnnnnnnnnnnnnnnnnnnnnnnnnnnnnnnnnnnnnnnnnnnnnnnnnnnnnnnnnnnnnnnnnnnnnnnnnnnnnnnnnnnnnnnnnnnnnnnnnnnnnnnnnnnnnnnnnnnnnnnnnnnncaggtctctacggtcactccgccgtctaccatgaggccaccgactccctctatgtgtttggggggttccgattccatgtggagctggcagccccatcccccgagctatactccctgcactgtcctgaccgcacctggagcctgctggccccttctcagggggcaaannnnnnnnnnnnnnnnnnnnnnnnnnnnnnnnnnnnnntctgggctaagttcctagggagcagcctgggtcatgggggttccgggaactcaggaaggagatggttctctgggctgctcttgccggcacaggaggtttcctggaggaaatctcacctcacctgaaggannnnnnnnnnnncttttccatgcctcagccctgttaggggacaccatggtggttcttggggggcgctcggaccctgacgagttcagcagcgacgttctgctctaccaagtcaactgcaatgcctggcttctgcccgacctcacccnnnnnnnnnnnnnnnnnnnnnnnnnnnnnnnnnnnnnnnnnnnnnnnnnnnnnnnnnnnnnnnnnnnnnnnnnnnnnnnnnnnnnnnnnnnnnnnnnnnnnnnnnnnnnnnnnnnnnnnnnnnnnnnnnnnnnnnnnnnnnnnnnnnnnnnnnnnnnnnnnnnnnnnnnnnnnnnnnnnnnnnnnnnnnnnnnnnnnnnnnnnnnnnnnnnnnnnnnnnnnnnnnnnnnnnntgggctgtgggggctccccctgctccccaatgcctcgctccccggaagaatgtcgacgtctccggacctgcagtgagtgcctggcccgccatcctcggacc

SEQ ID NO: 26621 - DNA, 483 bp, Macaca Mulatta
atggctcagtcactggctctgagcctccttatcctggttctggcctttggcatccccgggacccaaggcagtgatggaggggctcaggactgctgcctcaagtacagccaaaggaagattcccgccaaggttgtccgcagctaccggaagcaggaaccaagcttaggctgctccatcccagctatcctgttcttgccccgaaagcgctctcaggcagagctatgtgcagacccaaaggagctctgggtgcagcagctgatgcagcatctggacaagacaccaaccccacggaaaccagtccagggttgcaggaaggacaggggggtccccaagaatggcaaaaagggaaagggctgcaagaggactgagcagtcacagacccctaaagggcatagcccagtgagcagcctggagccctggagaccccaccagcctcaccagggcttgaagcctgaacccaaaatgcaagaaggaggctatgca

SEQ ID NO: 26622 - DNA, 1442 bp, Macaca Mulatta
  misc_feature (1)...(1442): n = A,T,C or G
agatcatgaaagcatcgttgcttactgatgaagaagatgtagatatggcactggatcaacacttcagtcgccttccttccaaagcagatacttctcaagaaatctgttctccgagacttcccatttcagcatcccactcatcgaaaactcgttcactanagttggtgggttactacaatcaaaatttacaagtggagcttttctttcaccaagtgcctctgtgcaagaatgtcgtactcccagaacagcatatgtaatgaatatcccatcnnnnnnnnnnnnnnnnnnnnnnnnnnnnnnnnnnnnnnnnnnnnnnnnnnnnnnnnnnnnnnnnnnnnnnnnnnnnnnnnnnnnnnnnnnnnnnnnnnnnnnnnnnnnnnnnnnnnnnnnnnnnnnnnnnnnnnnnnnnnnnnnnnnnnnnnnnnnnnnnnnnnnnnnnnnnnnnnnnnnnnnnnnnnnnnnnnnnnnnnnnnnnnnnnnnnnnnnnnnnnnnnnnnnnnnnnnnnnnnnnnnnnnnnnnnnnnnnnnnnnnnnnnnnnnnnnnnnnnnnnnnnnnnnnnnnnnnnnnnnnnnnnnnnnnnnnnnnnnnnnnnnnnnnnnnnnnnnnnnnnnnnnnnnnnnnnnnnnnnnnnnnnnnnnnnnnnnnnnnnnnnnnnnnnnnnnnnnnnnnnnnnnnnnnnnnnnnnnnnnnnnnnnnnnnnnnnnnnnnnnnnnnnnnnnnnnnnnnnnnnnnnnnnnnnnnnnnnnnnnnnnnnnnnnnnnnnnnnnnnnnnnnnnnnnnnnnnnnnnnnnnnnnnnnnnnnnnnnnnnnnnnnnnnnnnnnnnnnnnnnnnnnnnnnnnnnnnnnnnnnnnnnnnnnnnnnnnnnnnnnnnnnnnnnnnnnnnnnnnnnnnnnnnnnnnnnnnnnnnnnnnnnnnnnnnnnnnnnnnnnnnnnnnnnnnnnnnnnnnnnnnnnnnnnnnnnnnnnnnnnnnnnnnnnnnnnnnnnnnnnnnnnnnnnnnnnnnnnnnnnnnnnnnnnnnnnnnnnnnnnnnnnnnnnnnnnnnnnnnnnnnnnnnnnnnnnnnnnnnnnnnnnnnnnnnnnnnnnnnnnnnnnnnnnnnnnnnnnnnnnnnnnnnnnnnnnnnnnnnnnnnnnnnnnnnnnnnnnnnnnnnnnnnnnnnnnnnnnnnnnnnnnnnnnnnnnnnnnnnnnnnnnnnnnnnnnnnnnnnnnnnnnnnnnnagacattatgatctcaaccagctgctggagcctcgaagcataacagcagatcctttggactaccgcctaagctggcacttgtgggaagtgctgagggctcttaactacacccatctctcagcgcagtgtgaaggtgtgctacaggccagttatgctggccagctggaaagtgagggactctgggagtgggccatctttgtcctcctgcacattgacaactca

SEQ ID NO: 26623 - DNA, 157 bp, Macaca Mulatta
ggctagtgatacagaacgagatggactagccccagaaaagacatcaccagatagagataagaaaaaagagcagtcagatatatctgtttctcctagagcttcaaaacatcattattcaagatcacgatcaaggtcaagagaaagaaaacgaaagtca

SEQ ID NO: 26624 - DNA, 713 bp, Macaca Mulatta
  misc_feature (1)...(713): n = A,T,C or G
ttcggcacgaggcttctctgggcctctccagtcctgcttactcctctatttttaaaagtggcaaacaaatccccttcctctttctcaaagcacagttatgtggcactgagccctacccagcacctcagtgaaggggtcctgcttgctctttattttggtcctggatcctggggtggggcagaaatattttctgggctggggtacgaggaaggttgctgcagccacctactgctactgtatcctaggaatattgggacatggacatggtgtcccatgcccagatgataaacactgagctgtcaaaacttttttaaatacacccgaggagcccaagggggaagggcaatgcctacccatagcgttatttttggggagggagggctgtgcatagggccatattctttagaatctattttattaactgacctgttttgggacctgttacccaaataaaagatgtttctnnnnnnnnnnnnnnnnnnnnnnnnnnnnnnnnnnnnnnnnnnnnnnnnnnnnnnnnnnnnnnnnnnnnnnnnnnnnnnnnnnnnnnnnnnnnnnnnnnnnnnnnnnnnnnnnnnnannnnnnnnnnnnnnnnnnnnnnnnnnnnnnnnnnnnnnnnnnnnnnnnnnnnnnnnnnnnnnnnnnnnnnnnnnnnnnnnnnnnnnnnnnnnnnnnnnnnnnnnnnnnnnnnnnnnnnnnnnnnnnnnnnnnn

SEQ ID NO: 26625 - DNA, 2111 bp, Macaca Mulatta
  misc_feature (1)...(2111): n = A,T,C or G
cagctatgtgttctcattttgccaaagaccttaggccagagcagtatataaaaaattcattccaacaagtgatactgagaagatatggaaaatgtggatatcagaatttacaattaagaaaaggctgtaaaagtgtggatgagcataagttgcacaaaggaggtcataaggaacttaaccaatgtgtgacaactacccagagcaaagtagttcagtatgataaatatgtgaaagtctttcataaatattcaaagagacataagataagacatactggaaaaaatcctttcaaatgtaaagaatgtggcaaatcattttgcatgctttcacaactaactcaacatgagataattcatactggagagaaaccctacaaatgtggagaatgtggcaaagcttttaaaaagtcctcaaaccttactaatcataagataattcatactggagagaaaccctacaaatgtgaagaatgtggaacagcttttaaccagtcctcaactcttactagacataagataattcatactggagagaaactctacaattgggaagaatggggaaaagcttttaaccgggcctcaaaccttactaannnnnnnnnnnnnnnnnnnnnnnnnnnnaacatgagataattcatactggagagaaaccctacaaatgtggagaatgtggcaaagcttttaaaaagtcctcaaaccttactaatcataagataattcatactggagagaaaccctacaaatgtgaagaatgtggaacagcttttaaccagtcctcaactcttactagacataagataattcatactggagagaaactctacaattgggaagaatggggaaaagcttttaaccgggcctcaaaccttactaannnnnncacaactaactcaacatgagataattcatactggagagaaaccctacaaatgtggagaatgtggcaaagcttttaaaaagtcctcaaaccttactaatcataagataattcatactggagagaaaccctacaaatgtgaagaatgtggaacagcttttaaccagtcctcaactcttactagacataagataattcatactggagagaaactctacaattgggaagaatggggaaaagcttttaaccgggcctcaaaccttactaannnnnnnnnnnnnnnnnnnnnnnnnnnnnnnnnnnnnnnnnnntcccagcattttgggaggctgaggcaggcggatcacaaggtcaagagatcgagaccatcctggccaacatggtgaaaccctgtctctactaaaaatacaaaaattatctgggtgtggtggcgcgtgtctgtattcacatctacttgggaggctgaggcaggagaatcacttgaacctgggaggcggaggttgcagtgagccaagattgcaccactgcactccagtttgacaacagagtaagacttcgtctcaaaaaaaatttatactctacagaaaccccacaagtgtgaaaaacatggcaaagcctttaagaagccctcaattcttaacagacataagataattcatactggagagaaactctacaaatcagaaagatgtgactacttttgacaatgcttcaaacttttctaaccataaaaataattatactggtgagaaatcctagaaatctgaagagtgagacaaagcctttaaatggttgttacacttgattgtaggtaagataattcatactggagaaaatgcctacatgtgtgaacaatgtggcaaaacttttaaccattgctcacactttattgccaggaaagcatttatacttgagataaattatacaaatgtaaagactatgaaaaaaccattaatagctgctcacattttactcaacaccagagagttcatgcttaataaaagcattataagtgcaattactgtcaaaagatctttcagaaaatttaagcttttatagtgaagagtatttattttgaagttgaacattacaaatataaagaggattgtagtgccttgtatcacagatcttattgtagacattttcttctagaggaaaactctgaagcagttgatcaaactttgtttcacatcagggaatttatattgaaaaattgtgcaagtataataaatttg

SEQ ID NO: 26626 - DNA, 274 bp, Macaca Mulatta
aagctctatgcagaactgtgccagggcatcgtggacatagccatttccagtgtcttcccacccccagatgtggagcaacctcagacccagccagctgccttcaccaagctgtgatggaggggcgctccctgctgccttggaaaaagcacggggtcctgctccagggaacggtgaaatgactggattgctctttatccagcccacagcaggggaaagaaaggccactcgcaaagatgagatggaagaaggcacgtgagcagaggatgcagctccc

SEQ ID NO: 26627 - DNA, 2650 bp, Macaca Mulatta
  misc_feature (1)...(2650): n = A,T,C or G
gctgctcgacgacgctggagcccagcaaggtgnnnnnnnnnnnnnnnnnnnnnnnnnnnnnnnnnnnnnnnnnnnnnnnnnnnnnnnnnnnnnnnnnnnnnnnnnnnnnnnnnnnnnnnnnnnnnnnnnnnnnnnnnnnnnnnnnnnnnnnnnnnnnnnnnnnnnnnnnnnnnnnnnnnnnnnnnnnnnnnnnnnnnnnnnnnnnnnnnnnnnnnnnnnnnnnnnnnnnnnnnnnnnnnnnnnnnnnnnnnnnnnnnnnnnnnnnnnnnnnnnnnnnnnnnnnnnnnnnnnnnnnnnnnnnnnnnnnnnnnnnnnnnnnnnnnnnnnnnnnnnnnnnnnnnnnnnnnnnnnnnnnnnnnnnnnnnnnnnnnnnnnnnnnnnnnnnnnnnnnnnnnnnnnnnnnnnnnnnnnnnnnnnnnnnnnnnnnnnnnnnnnnnnnnnnnnnnnnnnnnnnnnnnnnnnnnnnnnnnnnnnnnnnnnnnnnnnnnnnnnnnnnnnnnnnnnnnnnnnnnnnnnnnnnnnnnnnnnnnnnnnnnntcctcgccattgtgcatggctggtgtgcatgcaggagtagtgtcaaacacgttgggtggccaaatcagtgttgtaattagtaaaggtatcccatattatgaaagttctttggctaacaacgtcacatctgtggtgnnnnnnnnnnnnnnnnnnnnnnnnnnnnnnnnnnnnnnnnnnnnnnnnnnnnnnnnnnnnnnnnnnnnnnnnnnnnnnnnnnnnnnnnnnnnnnnnnnnnnnnnnnnnnnnnnnnnnnnnnnnnnnnnnnnnnnnnnnnnnnnnnnnnnnnnnnnnnnnnnnnnnnnnnnnnnnnnnnnnnnnnnnnnnnnnnnnnnnnnnnnnnnnnnnnnnnnnnnnnnnnnnnnnnnnnnnnnnnnnnnnnnnnnnnnnnnnnnnnnnnnnnnnnnnnnnnnnnnnnnnnnnnnnnnnnnnnnnnnnnncaattactatgtgtctgcctacagaatcctgtacagtgatgatgggcataaatggactgtgtacannnnnnnnnnnnnnnnnnnnnnnnntatttcaaggaaacaaagattatcaccaggatgtgcgtaataactttttgccaccaattattgcacgttttatnnnnnnnnnnnnnnnnnnnnnnnnnnnnnnnnnnnnnnnnnnnnnnnnnnnnnnnnnnnnnnnnnnnnnnnnnnnnnnnnnnnnnnnnnnnnnnnnnnnnnnnnnnnnnnnnnnnnnnnnnnnnnnnnnnnnnnnnnnnnnnnnnnnnnnnnnnnnnnnnnnnnnnnnnnnnnnnnnnnnnnnnnnnnnnnnnnnnnnnnnnnnnnnnnnnnnnnnnnnnnnnnnnnnnnnnnnnnnnnnnnnnnnnnnnnnnnnnnnnnnnnnnnnnnnnnnnnnnnnnnnnnnnngatgtagcactggctgcagttcttgtccctgtgctggtcatggtcctcactactctcattctcatattagtatgtgcctggcactggnnnnnnnnnnnnnnnnnnnnnnnnnnnnnnnnnnnnnnnnnnnnnnnnnnnnnnnnnnnnnnnnnnnnnnnnnnnnnnnnnnnnnnnnnnnnnnnnnnnnnnnnnnnnnnnnnnnnnnnnnnnnnnnnnnnnnnnnnnnnnnnnnnnnnnnnnnnnnnnnnnnnnnnnnnnnnnnnnnnnnnnnnnnnnnnnnnnnnnnnnnnnnnnnnnnnnnnnnnnnnnnnnnnnnnnnnnnnnnnnnnnnnnnnnnnnnnnnnnnnnnnnnnnnnnnnnnnnnnnnnnnnnnnnnnnnnnnnnnnnnnnnnnnnnnnnnnnnnnnnnnnnnnnnnnnnnnnnnnnnnnnnnnnnnnnnnnnnnnnnnnnnnnnnnnnnnnnnnnnnnnnnnnnnnnnnnnnnnnnnnnnnnnnnnnnnnnnnnnnnnnnnnnnnnnnnnnnnnnnnnnnnnnnnnnnnnnnnnnnnnnnnnnnnnnnnnnnnnnnnnnnnnnnnnnnnnnnnnnnnnnnnnnnnnnnnnnnnnnnnnnnnnnnnnnnnnnnnnnnnnnnnnnnnnnnnnnnnnnnnnnnnnnnnnnnnnnnnnnnnnnnnnnnnnnnnnnnnnnnnnnnnnnnnnnnnnnnnnnnnnnnnnnnnnnnnnnnnnnnnnnnnnnnnnnnnnnnnnnnnnnnnnnnnnnnnnnnnnnnnnnnnnnnnnnnnnnnnnnnnnnnnnnnnnnnnnnnnnnnnnaattattagtggtagtaatatatagaatgtattacatatctgtcactgaagtggttggggaaaatgtggtgactgaggtacaggaaactactaatcttgccatcttgctttaaaggtgttatggtggcacagttactgctcgcctgttaaatttcaaatgtcctgtttgatactactgtagaacactatttttaatacagaaaaagctccctataatgcacttcagagaaatgaaaaatcactgagagtatttattaccaatgctgcaggtacattaatgaactcgagatggctctgtaagcctgactggcaataacgcacggtactgttcttgaaatacctaatggcttgaaattctagtcttgtttgtgaaagatgggtactatcatgatttcctcttttattcctatattctttt

SEQ ID NO: 26628 - DNA, 1901 bp, Macaca Mulatta
  misc_feature (1)...(1901): n = A,T,C or G
tcgggcagctgctcaagtggattgacaccacggcctgcctgtccgnnnnnnnnnnnnnnnnnnnnnnnnnnnnnnnnnnnnnnnnnnnnnnnnnnnnnnnnnnnnnnnnnnnnnnnnnnnnnnnnnnnnnnnnnnnnnnnnnnnnnnnnnnnnnnnnnnnnnnnnnnnnnnnnnnnnnnnnnnnnnnnnnnnnnnnnnnnnnnnnnnnnnnnnnnnnnnnnnnnnnnnnnnnnnnnnnnnnnnnnnnnnnnnnnnnnnnnnnnnnnnnnnnnnnnnnnnnnnnnnnnnnnnnnnnnnnnnnnnnnnnnnnnnnnnnnnnnnnnnnnnnnnnnnnnnnnnnnnnnnnnnnnnnnnnnnnnnnnnnnnnnnnnnnnnnnnnnnnnnnnnnnnnnnnnnnnnnnnnnnnnnnnnnnnnnnnnnnnnnnnnnnnnnnnnnnnnnnnnnnnnnnnnnnnnnnnnnnnnnnnnnnnnnnnnnnnnnnnnnnnnnnnnnnnnnnnnnnnnnnnnnnnnnnnnnnnnnnnnnnnnnnnnnnnnnnnnnnnnnnnnnnnnnnnnnnnnnnnnnnnnnnnnnnnnnnnnnnnnnnnnnnnnnnnnnnnnnnnnnnnnnnnnnnnnnnnnnnnnnnnnnnnnnnnnnnnnnnnnnnnnnnnnnnnnnnnnnnnnnnnnnnnnnnnnnnnnnnnnnnnnnnnnnnnnnnnnnnnnnnnnnnnnnnnnnnnnnnnnnnnnnnnnnnnnnnnnnnnnnnnnnnnnnnnnnnnnnnnnnnnnnnnnnnnnnnnnnnnnnnnnnnnnnnnnnnnnnnnnnnnnnnnnnnnnnnnnnnnnnnnnnnnnnnnnnnnnnnnnnnnnnnnnnnnnnnnnnnnnnnnnnnnnnnnnnnnnnnnnnnnnnnnnnnnnnnnnnnnnnnnnnnnnnnnnnnnnnnnnnnnnnnnnnnnnnnnnnnnnnnnnnnnnnnnnnnnnnnnnnnnnnnnnnnnnnnnnnnnnnnnnnnnnnnnnnnnnnnnnnnnnnnnnnnnnnnnnnnnnnnnnnnnnnnnnnnnnnnnnnnnnnnnnnnnnnnnnnnnnnnnnnnnnnnnnnnnnnnnnnnnnnnnnnnnnnnnnnnnngagcgtggagctagtgcagcaggtggacgaggacgatgccatctaccacgtcaccagccctgcccttggaggtcacacaaagccacaggacttcgtgatcctggcctcgaggcggaagccttgtgacaatgggnnnnnnnnnnnnnnnnnnnnnnnnnnnnnnnnnnnnnnnnnnnnnnnnnnnnnnnnnnnnnnnnnnnnnnnnnnnnnnnnnnnnnnnnnnnnnnnnnnnnnnnnnnnnnnnnnnnnnnnnnnnnggtgtcctactacaaccaggctaccccaggtgttctcaactatgtgactaccaatgtggccggcctctcctctgagttctacaccaccttcaaggcttgcgagcagtttctcttggacaaccggaatgatctggcccccagcctccagaccctctagatgccctcagtggccacatcatgcccactcccactccatcctgcccccaaggactcacatacagtgcctggagaaagccaaaggcctttatttcttcctgcctccccgtgggaagcctccgccctggagcccgctgggccaccaccccggggtgctcagtttctgccaacatcggccagcaagtccttgcggtgcccctggggcagcctgtagtagactcgggtcctatccacagccctggctgccagcagcgctgtcctcacagaggcatagtcgcccccctctgggctgtgctccactgtgacggtggcccggggggaggatgccagcagcctggctatggctccagctgtgctgtggcccagcagtatggcctgcatctgg

SEQ ID NO: 26629 - DNA, 142 bp, Macaca Mulatta
  misc_feature (1)...(142): n = A,T,C or G
ttgatgaagaatgctgtctttatgtgtttagttctatcaacttcttcagaagccttaattactactggatntgctacatttttacctaaatttatagaaaatcaattcggattgacatccagctttgcagctactcttggag

SEQ ID NO: 26630 - DNA, 2285 bp, Macaca Mulatta
  misc_feature (1)...(2285): n = A,T,C or G
attttgatgtctagaatcaggggatccaggatcatcaacaaggtcattttcccaggtaaggaagggtctttctgcttctttcttgtcatgcacagctgctgaggaaggggctgggagaaaagacagcgaaatggggaggaagattccattcaaaccaagaaacaaagtgtttggtttttcttacccctgatgaagaagctaccaaccttttccaagnnnnnnnnnnnnnnnnnnnnnnnnnnnnnnnnnnnnnnnnnnnnnnnnnnnnnnnnnnnnnnnnnnnnnnnnnnnnnnnnnnnnnnnnnnnnnnnnnnnnnnnnnnnnnnnnnnnnnnnnnnnnnnnnnnnnnnnnnnnnnnnnnnnnnnnnnnnnnnnnnnnnnnnnnnnnnnnnnnnnnnnnnnnnnnnnnnnnnnnnnnnnnnnnnnnnnnnnnnnnnnnnnnnnnnnnnnnnnnnnnnnnnnnnnnnnnnnnnnnnnnnnnnnnnnnnnnnnnnnnnnnnnnnnnnnnnnnnnnnnnnnnnnnnnnnnnnnnnnnnnnnnnnnnnnnnnnnnnnnnnnnnnnnnnnnnnnnnnnnnnnnnnnnnnnnnnnnnnnnnnnnnnnnnnnnnnnnnnnnnnnnnnnnnnnnnnnnnnnnnnnnngcagccatcctgaactctccacagggtcctgtgaaaagctcttcacctcctctgccctctggatctagttaagcctattcatccttcagatgtcagctccaataatcaaccttcacggaggcctcccttgacccctaacatgctttcaaagtattgtgtattgctcattcagcatgacccccacaactgtgatttcccatttattaacatctgtctcttctactaacctgcaaactccaggaggacagagatctctttgggnnnnnnnnnnnnnnnnnnnnnnnnnnnnnnnnnnnnnnnnnnnnnnnnnnnnnnnnnnnnnnnnnnnnnnnnnnnnnnnnnnnnnnnnnnnnnnnnnnnnnnnnnnnnnnnnnnnnnnnnnnnnnnnnnnnnnnnnnnnnnnnnnnnnnnnnnnnnnnnnnnnnnnnnnnnnnnnnnnnnnnnnnnnnnnnnnnnnnnnnnnnnnnnnnnnnnnnnnnnnnnnnnnnnnnnnnnnnnnnnnnnnnnnnnnnnnnnnnnnnnnnnnnnnnnnnnnnnnnnnnnnnnnnnnnnnnnnnnnnnnnnnnnnnnnnnnnnnnnnnnnnnnnnnnnnnnnnnnnnnnnnnnnnnnnnnnnnnnnnnnnnnnnnnnnnnnnnnnnnnnnnnnnnnnnnnnnnnnnnnnnnnnnnnnnnnnnnnnnnnnnnnnnnnnnnnnnnnnnnnnnnnnnnnnnnnnnnnnnnnnnnnnnnnnnnnnnnnnnnnnnnnnnnnnnnnnnnnnnnnnnnnnnnnnnnnnnnnnnnnnnnnnnnnnnnnnnnnnnnnnnnnnnnnnnnnnnnnnnnnnnnnnnnnnnnnnnnnnnnnnnnnnnnnnnnnnnnnnnnnnnnnnnnnnnnnnnnnnnnnnnnnnnnnnnnnnnnnnnnnnnnnnnnnnnnnnnnnnnnnnnnnnnnnnnnnnnnnnnnnnnnnnnnnnnnnnnnnnnnnnnnnnnnnnnnnnnnnnnnnnnnnnnnnnnnnnnnnnnnnnnnnnnnnnnnnnnnnnnnnnnnnnnnnnnnnnnnnnnnnnnnnnnnnnnnnnnnnnnnnnnnnnnnnnnnnnnnnnnnnnnnnnnnnnnnnnnnnnnnnnnnnnnnnnnnnnnnnnnnnnnnnnnnnnnnnnnnnnnnnnnnnnnnnnnnnnnnnnnnnnnnnnnnnnnnnnnnnnnnnnnnnnnnnnnnnnnnnnnnnnnnnnnnnnnnnnnnnnnnnnnnnnnnnnnnnnnnnnnnnnnnnnnnnnnnnnnnnnnnnnnnnnnnnnnnnnnnnnnnnnnnnnnnnnnnnnnnnnnnnnnnnnnnnnnnnnncagctaatgcaaagtgtgtatgtgcccctgaaagctccatgtctacttaacattcagtttttaggattatttatgccataataatagatatgaaaatctctaacaggtattttgtttcctttacaaattgtatttgaatttatgggtgatttagagcttgtgcttaaagtcagaattcagaaccccaaagaaaatgacttcattgaaattgaactgaagaggcaagaactgagttaccaaaacctactaaaagtgagttgctgtgaactggggattaacccagaacaagtggaaaagatcagaaagctaccaaacacactgctcagaaag

SEQ ID NO: 26631 - DNA, 2987 bp, Macaca Mulatta
  misc_feature (1)...(2987): n = A,T,C or G
aggtaagccagcgattccccacaacgcaccccaacgggcgccagatcatgctcacctacctgctgccctggctgcacaacatcgagctggtggacagcaggctcctcctcccagggtcgagccccagcagcccagaggacgaagtcaaggaccgggaaggcgatgtcactgcttctcacgggctgagaggaaatggctggggctctccagaagccacgtcactggtcctgaacaacctcatgtacatgacggccaannnnnnnnnnnnnnnnnnnnnnnnnnnnnnnnnnnnnnnnnnnnnnnnnnnnnnnnnnnnnnnnnnnnnnnnnnnnnnnnnnnnnnnnnnnnnnnnnnnnnnnnnnnnnnnnnnnnnnnnnnnnnnnnnnnnnnnnnnnnnnnnnnnnnnnnnnnnnnnnnnnnnnnnnnnnnnnnnnnnnnnnnnnnnnnnnnnnnnnnnnnnnnnnnnnnnnnnnnnnnnnnnnnnnnnnnnnnnnnnnnnnnnnnnnnnnnnnnnnnnnnnnnnnnnnnnnnnnnnnnnnnnnnnnnnnnnnnnnnnnnnnnnnnnnnnnnnnnnnnnnnnnnnnnnnnnnnnnnnnnnnnnnnnnnnnnnnnnnnnnnnnnnnnnnnnnnnnnnnnnnnnnnnnnnnnnnnnnnnnnnnnnnnnnnnnnnnnnnnnnnnnnnnnnnnnnnnnnnnnnnnnnnnnnnnnnnnnnnnnnnnnnnnnnnnnnnnnnnnnnnnnnnnnnnnnnnnnnnnnnnnnnnnnnnnnnnnnnnnnnnnnnnnnnnnnnnnnnnnnnnnnnnnnnnnnnnnnnnnnnnnnnnnnnnnnnnnnnnnnnnnnnnnnnnnnnnnnnnnnnnnnnnnnnnnnnnnnnnnnnnnnnnnnnnnnnnnnnnnnnnnnnnnnnnnnnnnnnnnnnnnnnnnnnnnnnnnnnnnnnnnnnnnnnnnnnnnnnnnnnnnnnnnnnnnnnnnnnnnnnnnnnnnnnnnnnnnnnnnnnnnnnnnnnnnnnnnnnnnnnnnnnnnnnnnnnnnnnnnnnnnnnnnnnnnnnnnnnnnnnnnnnnnnnnnnnnnnnnnnnnnnnnnnnnnnnnnnnnnnnnnnnnnnnnnnnnnnnnnnnnnnnnnnnnnnnnnnnnnnnnnnnnnnnnnnnnnnnnnnnnnnnnaccaacctgaatatctctatacaggtnnnnnnnnnnnnnnnnnnnnnnnnnnnnnnnnnnnnnnnnnnnnnnnnnnnnnnnnnnnnnnnnnnnnnnnnnnnnnnnnnnnnnnnnnnnnnnnnnnnnnnnnnnnnnnnnnnnnnnnnnnnnnnnnnnnnnnnnnnnnnnnnnnnnnnnnnnnnnnnnnnnnnnnnnnnnnnnnnnnnnnnnnnnnnnnnnnnnnnnnnnnnnnnnnnnnnnnnnnnnnnnnnnnnnnnnnnnnnnnnnnnnnnnnnnnnnnnnnnnnnnnnnnnnnnnnnnnnnnnnnnnnnnnnnnnnnnnnnnnnnnnnnnnnnnnnnnnnnnnnnnnnnnnnnnnnnnnnnnnnnnnnnnnnnnnnnnnnnnnnnnnnnnnnnnnnnnnnnnnnnnnnnnnnnnnnnnnnnnnnnnnnnnnnnnnnnnnnnnnnnnnnnnnnnnnnnnnnnnnnnnnnnnnnnnnnnnnnnnnnnnnnnnnnnnnnnnnnnnnnnnnnnnnnnnnnnnnnnnnnnnnnnnnnnnnnnnnnnnnnnnnnnnnnnnnnnnnnnnnnnnnnnnnnnnnnnnnnnnnnnnnnnnnnnnnnnnnnnnnnnnnnnnnnnnnnnnnnnnnnnnnnnnnnnnnnnnnnnnnnnnnnnnnnnnnnnnnnnnnnnnnnnnnnnnnnnnnnnnnnnnnnnnnnnnnnnnnnnnnnnnnnnnnnnnnnnnnnnnnnnnnnnnnnnnnnnnnnnnnnnnnnnnnnnnnnnnnnnnnnnnnnnnnnnnnnnnnnnnnnnnnnnnnnnnnnnnnnnnnnnnnnnnnnnnnnnnnnnnnnnnnnnnnnnnnnnnnnnnnnnnnnnnnnnnnnnnnnnnnnnnnnnnnnnnnnnnnnnnnnnnnnnnnnnnnnnnnnnnnnnnnnnnnnnnnnnnnnnnnnnnnnnnnnnnnnnnnnnnnnnnnnnnnnnnnnnnnnnnnnnnnnnnnnnnnnnnnnnnnnnnnnnnnnnnnnnnnnnnnnnnnnnnnnnnnnnnnnnnnnnnnnnnnnnnnnnnnnnnnnnnnnnnnnnnnnnnnnnnnnnnnnnnnnnnnnnnnnnnnnnnnnnnnnnnnnnnnnnnnnnnnnnnnnnnnnnnnnnnnnnnnnnnnnnnnnnnnnnnnnnnnnnnnnnnnnnnnnnnnnnnnnnnnnnnnnnnnnnnnnnnnnnnnnnnnnnnnnnnnnnnnnnnnnnnnnnnnnnnnnnnnnnnnnnnnnnnnnnnnnnnnnnnnnnnnnnnnnnnnnnnnnnnnnnnnnnnnnnnnnnnnnnnnnnnnnnnnnnnnnnnnnnnnnnnnnnnnnnnnnnnnnnnnnnnnnnnnnnnnnnnnnnnnnnnnnnnnnnnnnnnnnnnnnnnnnnnnnnnnnnnnnnnnnnnnnnnnnnnnnnnnnnnnnnnnnnnnnnnnnnnnnnnnnnnnnnnnnnnnnnnnnnnnnnnnnnnnnnnnnnnnnnnnnnnnnnnnnnnnnnnnnnnnnnnnnnnnnnnnnnnnnnnnnnnnnnnnnnnnnnnnnnnnnnnnnnnnnnnnnnnnnnnnnnnnnnnnnnnnnnnnnnnnnnnnnnnnnnnnnnnnnnnnnnnnnnnnnnnnnnnnnnnnnnnnnnnnnnnnnnnnnnnnnnnnnnnnnnnnnnnnnnnnnnnnnnnnnnnnnnnnnnnatcttgaagctcgtagtttctcggtcagccagccttgttttaccttcataccagcacagtgacctctcanaaatagaaatacatcgagtgtggactagtgcttccaaggaattacctggganaaccctggacttccacttcgatatttcggag

SEQ ID NO: 26632 - DNA, 751 bp, Macaca Mulatta
  misc_feature (1)...(751): n = A,T,C or G
tagaggagctgccggtgcctcctcagaacgtctcctggtcgctacccagnnnnnnnnnnnnnnnnnnnnnnnnnnnnnnnnnnnnnnnnnnnnnnnnnnnnnnnnnnnnnnnnnnnnnnnnnnnnnnnnnnnnnnnnnnnnnnnnnnnnnnnnnnnnnnnnnnnnnnnnnnnnnnnnnnnnnnnnnnnnnnnnnnnnnnnnnnnnnnnnnnnnnnnnnnnnnnnnnnnnnnnnnnnnnnnnnnnnnnnnnnnnnnnnnnnnnnnnnnnnnnnnnnnnnnnnnnnnnnnnnnnnnnnnnnnnnnnnnnnnnnnnnnnnnnnnnnnnnnnnnnnnnnnnnnnnnnnnnnnnnnnnnnnnnnnnnnnnnnnnnnnnnnnnnnnnnnnnnnnnnnnnnnnnnnnnnnnnnnnnnnnnnnnnnnnnnnnnnnnnnnnnnnnnnnnnnnnnnnnnnnnnnnnnnnnnnnnnnnnnnnnnnnnnnnnnnnnnnnnnnnnnnnnnnnnnnnnnnnnnnnnnnnnnnnnnnnnnnnnnnnnnnnnnnnnnnnnnnnnnnnnnnnnnnnnnnnnnnnnnnnnnnnnnnnnnnnnnnnnnnnnnnnnnnnnnnnnnnnnnnnnnnnnnnngcagtgtccaggccgcgcagctcccctgacgacctgaaggccctgactcgcaatgtgaaccggctgaatgagagcttccgggacttgcagctgcggctgctgcaggctccgctgcaagcggacctgacggag

SEQ ID NO: 26633 - DNA, 182 bp, Macaca Mulatta
  misc_feature (1)...(182): n = A,T,C or G
tggagctgtggccgtgtctggccgcggcgctgctgttgctgttgctgctggtgcagctgagtcgcgcggccgagttctacgccaaggtcgccctgtactgcgcgctgtgcttcgcgatgtccgccgtggcctcgctcgtctgcctgctgcgccacggcggccggacggtggagaacatgagn

SEQ ID NO: 26634 - DNA, 1748 bp, Macaca Mulatta
  misc_feature (1)...(1748): n = A,T,C or G
ttaggagcttgcattcatcttcgggacccggaacttgctttggctattgaatcttgcttaaaagggcttctgcaggcctattgttgccataatcatgctgatgaacgtgtccttcaggcactcatgaannnnnnnnnnnnnnnnnnnnnnnnnnnnnnnnnnnnnnnnnnnnnnnnnnnnnnnnnnnnnnnnnnnnnnnnnnnnnnnagagctgcttatcatccagagtttccaacagttctgacagctttagaaatagataatgcggtcgtggcaaatagcctaattgacatgagaggcatagagacagtgctactaatcaannnnnnnnnnnnnnnnnnnnnnnnnnnnnnnnnnnnnnnnnnnnnnnnnnnnnnnnnnnnnnnnnnnnnnnnnnnnnnnnnnnnnnnnnnnnnnnnnnnnnnnnnnnnnnnnnnnnnnnnnnnnnnnnnnnnnnnnnnnnnnnnnnnnnnnnnnnnnnnnnnnnnnnnnnnnnnnnnnnnnnnnnnnnnnnnnnnnnnnnnnnnnnnnnnnnnnnnnnnnnnnnnnnnnnnnnnnnnnnnnnnnnnnnnnnnnnnnnnnnnnnnnnnnnnnnnnnnnnnnnnnnnnnnnnnnnnnnnnnnnnnnnnnnnnnnnnnnnnnnnnnnnnnnnnnnnnnnnnnnnnnnnnnnnnnnnnnnnnnnnnnnnnnnnnnnnnnnnnnnnnnnnnnnnnnnnnnnnnnnnnnnnnnnnnnnnnnnnnnnnnnnnnnnnnnnnnnnnnnnnnnnnnnnnnnnnnnnnnnnnnnnnnnnnnnnnnnnnnnnnnnnnnnnnnnnnnnnnnnnnnnnnnnnnnnnnnnnnnnnnnnnnnnnnnnnnnnnnnnnnnnnnnnnnnnnnnnnnnnnnnnnnnnnnnnnnnnnnnnnnnnnnnnnnnnnnnnnnnnnnnnnnnnnnnnnnnnnnnnnnnnnnnnnnnnnnnnnnnnnnnnnnnnnnnnnnnnnnnnnnnnnnnnnnnnnnnnnnnnnnnnnnnnnnnnnnnnnnnnnnnnnnnnnnnnnnnnnnnnnnnnnnnnnnnnnnnnnnnnnnnnnnnnnnnnnnnnnnnnnnnnnnnnnnnnnnnnnnnnnnnnnnnnnnnnnnnnnnnnnnnnnnnnnnnnnnnnnnnnnnnnnnnnnnnnnnnnnnnnnnnnnnnnnnnnnnnnnnnnnnnnnnnnnnnnnnnnnnnnnnnnnnnnnnnnnnnnnnnnnnnnnnnnnnnnnnnnnnnnnnnnnnnnnnnnnnnnnnnnnnnnnnnnnnnnnnnnnnnnnnnnnnnnnnnnnnnnnnnnnnnnnnnnttgacaacttactatctcagcgggcctcttgtggaaaaatgaattttgaccacaagaatgaaactctacgtatatcagtnnnnnnnnnnnnnnnnnnnnnnnnnnnnnnnnnnnnnnnnnnnnnnnnnnnnnnnnnnnnnnnnnnnnnnnnnnnnnnnnnnnnnnnnnnnnnnnnnnnnnnnnnnnnnnnnnnnnnnnnnnnnnnnnnnnnnnnnnnnnnnnnnnnnnnnnnnnnnnnnnnnnnnnnnnnnnnnnnnnnnnnnnnnnnnnnnnnnnnnnnnnnnnnnnnnnnnnnnnnnnnnnnnnnnnnnnnnnnnnnnnnnnnngttcacttccatcaagtaaactgataagaattctccgaatgtctgatcccgaaagaggacaaactacattgcctttcagacctgtgactcaagaagaagaagatgaccaaag

SEQ ID NO: 26635 - DNA, 6037 bp, Macaca Mulatta
  misc_feature (1)...(6037): n = A,T,C or G
nagggctccaagtgccgccagctcttggccacattacgggccctagaggcagcatctctttcccagcatccccccagcctacctagcagtgactctgaggaggacgaggaggaaaggaagaagaaatgcccccaaaaggcatcgtttgccagtgcctctgttgaagtagggaagaaagggaggaagaaatgtgaaaaacagggcccaccttgcagtgactctgaggaagaagtggaaaggaagaagaaatgccacaaacaggctcttgttggcagtgactctgctgaaaaagagaaaagaaagaggaagtgccagaaacatgcccctataaattcagcccagcacctggatggtgttgaccaaacaggnnnnncaggtcccaaagcctggaagggtagtactacaaatgatccaccgaagcaaagccctgggtccatttcccctaaaccccctcgtacattaagccgcaagcagtggcggaaccggcaaaagaacaaaagaagacataagaacaagtttcggccacctcaggtgccaggccaggctccagctgaggcccccacagagaagacagaggtgcctgctgtttccaggacagacagccatgaggctcgggcagcggatttgcgagcccgcatggcacagcggctggaaggcacccgatttcgctacctcaatgaacagctgtactcagggcccagcagtgctgcacagcgtctcttccaggaagaccctgaggcttttcttgtctaccaccgcggcttccagagccaggtgaagaagtggccactgcagccagtggacggcatcgccagggatcttcgccagcgnnnnnnnnnnnnnnnnnnnnnnnnnnnnnnnnnnnnnnnnnnnnnnnnnnnnnnnnnnnnnnnnnnnnnnnnnnnnnnnnnnnnnnnnnnnnnnnnnnnnnnnnnnnnnnnnnnnnnnnnnnnnnnnnnnnnnnnnnnnnnnnnnnnnnnnnnnnnnnnnnnnnnnnnnnnnnnnnnnnnnnnnnnnnnnnnnnnnnnnnnnnnnnnnnnnnnnnnnnnnnnnnnnnnnnnnnnnnnnnnnnnnnnnnnnnnnnnnnnnnnnnnnnnnnnnnnnnnnnnnnnnnnnnnnnnnnnnnnnnnnnnnnnnnnnnnnnnnnnnnnnnnnnnnnnnnnnnnnnnnnnnnnnnnnnnnnnnnnnnnnnnnnnnnnnnnnnnnnnnnnnnnnnnnnnnnnnnnnnnnnnnnnnnnnnnnnnnnnnnnnnnnnnnnnnnnnnnnnnnnnnnnnnnnnnnnnnnnnnnnnnnnnnnnnnnnnnnnnnnnnnnnnnnnnnnnnnnnnnnnnnnnnnnnnnnnnnnnnnnnnnnnnnnnnnnnnnnnnnnnnnnnnnnnnnnnnnnnnnnnnnnnnnnnnnnnnnnnnnnnnnnnnnnnnnnnnnnnnnnnnnnnnnnnnnnnnnnnnnnnnnnnnnnnnnnnnnnnnnnnnnnnnnnnnnnnnnnnnnnnnnnnnnnnnnnnnnnnnnnnnnnnnnnnnnnnnnnnnnnnnnnnnnnnnnnnnnnnnnnnnnnnnnnnnnnnnnnnnnnnnnnnnnnnnnnnnnnnnnnnnnnnnnnnnnnnnnnnnnnnnnnnnnnnnnnnnnnnnnnnnnnnnnnnnnnnnnnnnnnnnnnnnnnnnnnnnnnnnnnnnnnnnnnnnnnnnnnnnnnnnnnnnnnnnnnnnnnnnnnnnnnnnnnnnnnnnnnnnnnnnnnnnnnnnnnnnnnnnnnnnnnnnnnnnnngaggcaactggtagtccgccaacatcctggctcaacacgtcagtctgagccactaacttgagactgtttggatgtccctgtactgagcatttctagtggtttatctttcccctctcccctcatctccatctttggaaccatatagcatcaaggcactcccaacacgtattatcctgtgggactttggaatgtttatggctgagagcacggatttttggaatcaggtagacctggatttaattcctggcctgctacctagaggcacttaaagtcatttaatctctgtgtatcacattcctcatttggaaaatggtagaatttctgtcttgcaaggtggttgtgtggattaactggggaaatttgtagccagggctgggaacataggaggtgctcagtaaactagctatgactattatatgttgtaagccttattgttttttgaagatgttccctaggctagttggaggctgaggggtaaagaatggatttgttgactaaggaagcctctgggagaggctaggcctttcagcaggcttacttcataggctatttaatgactcttaatagattctgagcttctgtccttagaggggtagtgagggagctgggtctctgttcgtaaacaacttgttgatgccgtgtggggttcggggcattgggctgttcattggtggaagagtctgtccattgaatctgccttgcagtggaatcagatcagcatgtcctgggaaagctaaaagcaaggtgctgagggaaggtgaaaatgaatgatagattctaggcctccccgaaaagatatctgccatgtgtctaggtgtaaagatatggcctctnnnnnnnnnnnnnnnnnnnnnnnnnnnnnnnnnnnnnnnnnnnnnnnnnnnnnnnnnnnnnnnnnnnnnnnnnnnnnnnnnnnnnnnnnnnnnnnnnnnnnnnnnnnnnnnnnnnnnnnnnnnnnnnnnnnnnnnnnnnnnnnnnnnnnnnnnnnnnnnnnnnnnnnnnnnnnnnnnnnnnnnnnnnnnnnnnnnnnnnnnnnnnnnnnnnnnnnnnnnnnnnnnnnnnnnnnnnnnnnnnnnnnnnnnnnnnnnnnnnnnnnnnnnnnnnnnnnnnnnnnnnnnnnnnnnnnnnnnnnnnnnnnnnnnnnnnnnnnnnnnnnnnnnnnnnnnnnnnnnnnnnnnnnnnnnnnnnnnnnnnnnnnnnnnnnnnnnnnnnnnnnnnnnnnnnnnnnnnnnnnnnnnnnnnnnnnnnnnnnnnnnnnnnnnnnnnnnnnnnnnnnnnnnnnnnnnnnnnnnnnnnnnnnnnnnnnnnnnnnnnnnnnnnnnnnnnnnnnnnnnnnnnnnnnnnnnnnnnnnnnnnnnnnnnnnnnnnnnnnnnnnnnnnnnnnnnnnnnnnnnnnnnnnnnnnnnnnnnnnnnnnnnnnnnnnnnnnnnnnnnnnnnnnnnnnnnnnnnnnnnnnnnnnnnnnnnnnnnnnnnnnnnnnnnnnnnnnnnnnnnnnnnnnnnnnnnnnnnnnnnnnnnnnnnnnnnnnnnnnnnnnnnnnnnnnnnnnnnnnnnnnnnnnnnnnnnnnnnnnnnnnnnnnnnnnnnnnnnnnnnnnnnnnnnnnnnnnnnnnnnnnnnnnnnnnnnnnnnnnnnnnnnnnnnnnnnnnnnnnnnnnnnnnnnnnnnnnnnnnnnnnnnnnnnnnnnnnnnnnnnnnnnnnnnnnnnnnnnnnnnnnnnnnnnnnnnnnnnnnnnnnnnnnnnnnnnnnnnnnnnnnnnnnnnnnnnnnnnnnnnnnnnnnnnnnnnnnnnnnnnnnnnnnnnnnnnnnnnnnnnnnnnnnnnnnnnnnnnnnnnnnnnnnnnnnnnnnnnnnnnnnnnnnnnnnnnnnnnnnnnnnnnnnnnnnnnnnnnnnnnnnnnnnnnnnnnnnnnnnnnnnnnnnnnnnnnnnnnnnnnnnnnnnnnnnnnnnnnnnnnnnnnnnnnnnnnnnnnnnnnnnnnnnnnnnnnnnnnnnnnnnnnnnnnnnnnnnnnnnnnnnnnnnnnnnnnnnnnnnnnnnnnnnnnnnnnnnnnnnnnnnnnnnnnnnnnnnnnnnnnnnnnnnnnnnnnnnnnnnnnnnnnnnnnnnnnnnnnnnnnnnnnnnnnnnnnnnnnnnnnnnnnnnnnnnnnnnnnnnnnnnnnnnnnnnnnnnnnnnnnnnnnnnnnnnnnnnnnnnnnnnnnnnnnnnnnnnnnnnnnnnnnnnnnnnnnnnnnnnnnnnnnnnnnnnnnnnnnnnnnnnnnnnnnnnnnnnnnnnnnnnnnnnnnnnnnnnnnnnnnnnnnnnnnnnnnnnnnnnnnnnnnnnnnnnnnnnnnnnnnnnnnnnnnnnnnnnnnnnnnnnnnnnnnnnnnnnnnnnnnnnnnnnnnnnnnnnnnnnnnnnnnnnnnnnnnnnnnnnnnnnnnnnnnnnnnnnnnnnnnnnnnnnnnnnnnnnnnnnnnnnnnnnnnnnnnnnnnnnnnnnnnnnnnnnnnnnnnnnnnnnnnnnnnnnnnnnnnnnnnnnnnnnnnnnnnnnnnnnnnnnnnnnnnnnnnnnnnnnnnnnnnnnnnnnnnnnnnnnnnnnnnnnnnnnnnnnnnnnnnnnnnnnnnnnnnnnnnnnnnnnnnnnnnnnnnnnnnnnnnnnnnnnnnnnnnnnnnnnnnnnnnnnnnnnnnnnnnnnnnnnnnnnnnnnnnnnnnnnnnnnnnnnnnnnnnnnnnnnnnnnnnnnnnnnnnnnnnnnnnnnnnnnnnnnnnnnnnnnnnnnnnnnnnnnnnnnnnnnnnnnnnnnnnnnnnnnnnnnnnnnnnnnnnnnnnnnnnnnnnnnnnnnnnnnnnnnnnnnnnnnnnnnnnnnnnnnnnnnnnnnnnnnnnnnnnnnnnnnnnnnnnnnnnnnnnnnnnnnnnnnnnnnnnnnnnnnnnnnnnnnnnnnnnnnnnnnnnnnnnnnnnnnnnnnnnnnnnnnnnnnnnnnnnnnnnnnnnnnnnnnnnnnnnnnnnnnnnnnnnnnnnnnnnnnnnnnnnnnnnnnnnnnnnnnnnnnnnnnnnnnnnnnnnnnnnnnnnnnnnnnnnnnnnnnnnnnnnnnnnnnnnnnnnnnnnnnnnnnnnnnnnnnnnnnnnnnnnnnnnnnnnnnnnnnnnnnnnnnnnnnnnnnnnnnnnnnnnnnnnnnnnnnnnnnnnnnnnnnnnnnnnnnnnnnnnnnnnnnnnnnnnnnnnnnnnnnnnnnnnnnnnnnnnnnnnnnnnnnnnnnnnnnnnnnnnnnnnnnnnnnnnnnnnnnnnnnnnnnnnnnnnnnnnnnnnnnnnnnnnnnnnnnnnnnnnnnnnnnnnnnnnnnnnnnnnnnnnnnnnnnnnnnnnnnnnnnnnnnnnnnnnnnnnnnnnnnnnnnnnnnnnnnnnnnnnnnnnnnnnnnnnnnnnnnnnnnnnnnnnnnnnnnnnnnnnnnnnnnnnnnnnnnnnnnnnnnnnnnnnnnnnnnnnnnnnnnnnnnnnnnnnnnnnnnnnnnnnnnnnncaccgaaatgtcctctttgtggacacaggtaaactgcgtttcccagttccatgcatctaggtatgtgtgagcagttctcaccagtggaaaacaagtggaagtgatgtttcaatactagaccaaggcagttaaagggtggctgagccgtttccatattctcttcctccttcctcttcaaggtaaccttgaagcacatgttttgacagtgttggagtcatagcatagaagaagtctgaatatctgagttactatttagaccgtaacagctacttgaccaagaacatccatgttggactttgaacaagaaaataaacctgattacattctgctcgtgagttttgagggtgttttagcagttattatatacactggatatatcttctatggtatcctgtccaccttactcttgaccacaataccctctttgtttccttcagggtgtttcaaatatttaattatcttgctagatgccagtcaacactttctatttgtcccatgaatttcaaatcaggggaaaacatatactcccaatagggagttgagatactcttaaaatcagtcattgtgtctgtgaccggaaaaacaaatcccactaaagaatgtcctaagcagatnnnnnnnnnntcatataacctgtagttaggtgacttggcattggttcaggagccgaaggatgttagggatgaggtctctgtagttttcctgtctcacagtcacaaaatgaagtgttattgattaagcagggatgccctacttagtattagacttcttggaagtctcc

SEQ ID NO: 26636 - DNA, 513 bp, Macaca Mulatta
caggcttccattgaaaaggaaggggtcaccttggtcgccattctctgtactcacaagcactggtaaggggctcccgtcttccctggcccacccttgtccagctgggcttgccaggactgggcccagtgaggacggccggggccggaagtcaagaagtcagtacaggccggcacccaccttcctcgtgaagtcacctggacagcagcggggagggaggaaaggggacagtctcccaccactccatttatcgagcttctgaagccccagaggagggcagggcagtcatttctctttcatttcatgggcatgtattagatacctactgcacactgggcatgggcaaaagttatgactcttccatcaaagaaattctgagaccaataggggagatagccctgtatcaaagtacgtaacagcggaggcaagagggttgggagttcaagccaacctgggcaacatagtgagaccttgtcttcacaaaagaagcatgtaatattcaggtagcagttggca

SEQ ID NO: 26637 - DNA, 596 bp, Macaca Mulatta
tcatactggagaaaagccctatgagtgcatcaaatgtgggaagttttttaggactgactcacaacttaatcgacatcatagaattcacactggagagagaccatttgaatgcagtaaatgtgggaaagccttcagtgatgctttagttctaattcaccataagagaagtcatgcaggagagaaaccctatgaatgtaacaaatgtgggaaggccttcagttgtggctcatatcttaatcaacatcaaagaattcatactggagagaaaccctatgaatgtaatgaatgtgggaaggcttttcatcagatcttgtccctaagactacaccagagaattcacgctggagaaaaaccttataaatgtaatgaatgtgggaataattttagctgtgtctcagcccttagacgacatcaaagaattcataatagagaaacgctttgattataacaagtataggaaagaaaacatttggttaccactcagtccttattgaatattagtgagttcttcttggttagtaattctttgaatgtagttcatatttcagttcatgagtatccattatttgaagtagctcagtagtagacatctgtta

SEQ ID NO: 26638 - DNA, 1064 bp, Macaca Mulatta
gggggttaaattttgggaaggtggatgttggacgctatactgatgttagtacacggtacaaagtgagcacatcacccctcaccaagcagctccctaccctgatcctgttccaaggtggcaaggaggtaatgcggcggccacagattgacaagaaaggacgggctgtctcatggaccttctctgaggagaatgtgatccgagaatttaacttaaatgagctataccagcgggccaagaagctatcaaaggctggagacaatatccccgaggagcagcctgtggctccaacccccaccagagtgtctgatggggaaagcaagaaggacaaataagatcctcactttggcagtgcttcctctcctgtcaattccaggctccttccataaccacaagcctgaggctacagccttttatttatgttttccgtttggctgtgactgggtggggcggcagggtgctgcttctgattttacagaggcatctagggaattgtcaggcaccctacaagaaggcctgccatgcggtggccagctgttcactggagcaagaaagaaagagatctcctatgatggaggggaaatggttttcctccaagcttgggtcagtgtgttatcaactattcagacatctccatggttttctctatgaaactatgggtttcattattccctttcttactcgaacctgtcagagcctgggttatgaccctagaatttaaccctaagctaggatgctggggtatagaaagctaagaattttccctcaaggactcttgcttccttaagcccttctggcttggtttatggtctttactaaaagcataagcctaactttgtcactagtcctaaggagaaacctttaaccacaaagttttttttatcattgaagacgatattgaacaaccccctgttttgtggggattgagaaggggtgaatagaggcttgagacttccctttgtgtgataggacttggaggagaaatcccttggactttcactaaccctctgacctactccccacacccagttgatggttttccacaataaaaagattgggatttctaa

SEQ ID NO: 26639 - DNA, 227 bp, Macaca Mulatta
ctcattcgggaaaagctaaatatttatagtttgggctcctgggcccagcatcccagctccactcccaggctctgggggctggggagtggttactaagcctcctctctcctgtcccaccaccctctctccttctctagctcagaggccccactggaccctcggctcttccttggacttcttgtgtgttctgtgagcttcgctggattcagggtcttgggcgccagagg

SEQ ID NO: 26640 - DNA, 310 bp, Macaca Mulatta
  misc_feature (1)...(310): n = A,T,C or G
cctgagatggccccagatctgcaagacacatttgagagaagctatttattagcagacgtgaagaaatggattctgcgcttgattatttagccatgacttatcagtgatgatggattggaaagcagtnagctgcccagaagttaaatctgtcttctaaaaagaagaaacgtcggcccacttcttccgccgccgaaccaccgctctttgccaccagtttcagtgggatcctgcagacctcccctcccccagccccgccctgtctgctgagggctgtcaacaaggtgaaggacaccccggggctgggcaaggt

SEQ ID NO: 26641 - DNA, 768 bp, Macaca Mulatta
atttatctcctgggacccacataagggggtctaaaaaccctcttccagggttttctttccgttttcccgggcaagggttccttttcccccctttaagattcctttttttttgaggggcccaagagccacagaggagattttttccctagtcaatccaaggaccccaggtcttcatggccccacccttcagagagggccccttccttactggccccattttcaaaggcttgcctttattctaggaaaaggggatgtactggtacagcatgagggtgtttggacactttgcccttgggtcagaccccagtagagtgccttgtccctgttccccagagactgaacacagtagggctacatcaaaaatagatgaatgcatggatgggcgatagagctaagagcactgtcagctcctggaagtccttgctctgccggacacacttatctttgaaattctgacgctcaggtcgtctctacggacttcgtcggtgatcgccactcgtccatcttcgatgctaaggccggcattgcgctcaatgacaatttcgtgaagctcatttcatggtaaggggaaaggagctggagacttgcaggggaactaaggggtggtcggaaggaacccccttgagcctgccaatccctcctccacaggtacgacaacgaatatggctacagtcaccgggtggtcgacctcctccgctacatgttcagccgagacaagtgaaacggaaaggtcccttctttccttcccaggggccagggccggtaccc

SEQ ID NO: 26642 - DNA, 134 bp, Macaca Mulatta
  misc_feature (1)...(134): n = A,T,C or G
ncagcaccactgccgcaagtgtgggaaggctgtctgcggcaaatgcagctccaagcgctcctccatccccctgatgggcttcgagtttgaagtgagggtctgtgacagctgccacgaggccatcacagatgaag

SEQ ID NO: 26643 - DNA, 202 bp, Macaca Mulatta
cagacaccctcccctaccattcccctcatcattcatttaacaaatatttattttgcactctctttgcagcactctggggggcgtgggggtggcaatgtgaggcactggggccacagatgtaagtgagacacagcacttgtcctcttggaagttacattcttactggggggaggcatgggcaataaacaagtaaatatgcaaa

SEQ ID NO: 26644 - DNA, 1408 bp, Macaca Mulatta
  misc_feature (1)...(1408): n = A,T,C or G
accttttaaagcaggtgctggggccactgctcagggccaaccgccaagaccgcacaaccagccatccctctaggatcccagcctagctggagccgggctcagagaaggaggccctgtgttgggagcatcctgcttgcctggagggacaagtttccaggagtgatcaataaaggaaaggaaagagacaaggaagggagaggtcaggagagcgcctggttggaggnnnnggaggagaagggccggagaatgtcgtcccagccagcagggaaccagacctcccccggggccacagaggactactcctacggcagctggtacatcgatgagccccagggcggcgaggagctccagccagaggggtaagtnnnnnnnnnnnnnnnnnnnnnnnnnnnnnnnnnnnnnnnnnnnnnnnnnnnnnnnnnnnntccttgtgctgctgctcctggccgtgctggtgaggcgccgccagctctggcctgactgtgtgcgcggcaggcccggcctgcccagnnnnnnnnnnnnnnnnnnnnnnnnnnnnnnnnnnnnnnnnnnnnnnnnnnnnnnnnnnnnnnnnnnnnnnnnnnnnnnnnnnnnnnnnnnnnnnnnnnnnnnnnnnnnnnnnnnnnnnnnnnnnnnnnnnnnnnnnnnnnnnnnnnnnnnnnnnnnnnnnnnggggcctggaagatgctgggactgttctattacgctgccctctactacccgctggccgcctgtgccacagctggccacagagctgcacacttgcttggcagcacgctgtcctgggnnnnnnnnnnnnnnnnnnnnnnnnnnnnnnnnnnnnnnnnnnnnnnnnnnnagatctacaagtactattccctgctggcctccctgcctctcttgctgggcctcggattcctgagcctttggtaccctgtgcagctggtgagaagcttcagtcgtaggacaggagcaggctccaagnnnnnnnnnnnnnnnnnnnnnnnnnnnnnnnnnnnnnnnnnnnnnnnnnnnnnnnnnnnnnnnnnnnnnnnnnnnnnnnnnnnnnnnnnnnnnnnnnnnnnnnnnnnnnnnnnnnnnnnnnnnnnnnnnnnnnnnnnnnnnnnnnnnnnnnnnnnnnnnnnnnnnnnnnnnnnnnnnnnnnnnnnnnnnnnnnnnnnnnnnnnnnnnnnnnnnnnnnnnnnnnnnnnnnnnnnnnnnnnnnnnnnnnnnnnnnnnnnnnnnnnnnnnnnnnnnnnnnnnnnnnnnnnnnnnnnnnnnnnnnnnnnnnnnnnnnnnnnnnnnnnnnnnnnnnnnnnnnnnnnnnnnnnnnnnnnnnnnnnnnnnnnnngtgtgctacatctcggccttggtcttatcctgcttactcaccttcctggtcctaatgcgctcactggtgacacacagg

SEQ ID NO: 26645 - DNA, 1576 bp, Macaca Mulatta
  misc_feature (1)...(1576): n = A,T,C or G
agatggagaacttaatgttctagatgatattttgactgaagtaccagaacaagatgatgaactgtataatccagagagtgaacaagataaaaacgagaaaaaggnnnnnnnnnnnnnnnnnnnnnnnnnnnnnnnnnnnnnnnnnnnnnnnnnnnnnnnnnnnnnnnnnnnnnnnnnnnnnnnnnnnnnnnnnnnnnnnnnnnnnnnnnnnnnnnnnnnnnnnnnnnnnnnnnnnnnnnnnnnnnnnnnnnnnnnnnnnnnnnnnnnnnnnnnnnnnnnnnnnnnnnnnnnnnnnnnnnnnnnnnnnnnnnnnnnnnnnnnnnnnnnnnnnnnnnnnnnnnnnnnnnnnnnnnnnnnnnnnnnnnnnnnnnnnnnnnnnnnnnnnnnnnnnnnnnnnnnnnnnnnnnnnnnnnnnnnnnnnnnnnnnnnnnnnnnnnnnnnnnnnnnnnnnnnnnnnnnnnnnnnnnnnnnnnnnnnnnnnnnnnnnnnnnnnnnnnnnnnnnnnnnnnnnnnnnnnnnnnnnnnnnnnnnnnnnnnnnnnnnnnnnnnnnnnnnnnnnnnnnnnnnnnnnnnnnnnnnnnnnnnnnnnnnnnnnnnnnnnnnnnnnnnnnnnnnnnnnnnnnnnnnnnnnnnnnnnnnnnnnnnnnnnnnnnnnnnnnnnnnnnnnnnnnnnnnnnnnnnnnnnnnnnnnnnnnnnnnnnnnnnnnnnnnnnnnnnnnnnnnnnnnnnnnnnnnnnnnnnnnnnnnnnnnnnnnnnnnnnnnnnnnnnnnnnnnnnnnnnnnnnnnnnnnnnnnnnnnnnnnnnnnnnnnnnnnnnnnnnnnnnnnnnnnnnnnnnnnnnnnnnnnnnnnnnnnnnnnnnnnnnnnnnnnnnnnnnnnnnnnnnnnnnnnnnnnnnnnnnnnnnnnnnnnnnnnnnnnnnnnnnnnnnnnnnnnnnnnnnnnnnnnnnnnnnnnnnnnnnnnnnnnnnnnnnnnnnnnnnnnnnnnnnnnnnnnnnnnnnnnnnnnnnnnnnnnnnnnnnnnnnnnnnnnnnnnnnnnnnnnnnnnnnnnnnnnnnnnnnnnnnnnnnnnnnnnnnnnnnnnnnnnnnnnnnnnnnnnnnnnnnnnnnnnnnnnnnnnnnnnnnnnnnnnnnnnnnnnnnnnnnnnnnnnnnnnnnnnnnnnnnnnnnnnnnnnnnnnnnnnnnnnnnnnnnnnnnnnnnnnnnnnnnnnnnnnnnnnnnnnnnnnnnnnnnnnnnnnnnnnnnnnnnnnnnnnnnnnnnnnnnnnnnnnnnnnnnnnnnnnnnnnnnnnnnnnnnnnnnnnnnnnnnnnnnnnnnnnnnnnnnnnnnnnnnnnnnnnnnnnnnnnnnnnnnnnnnnnnnnnnnnnnnnnnnnnnnnnnnnnnnnnnnnnnnnnnnnnnnnnnnggaaattgaacttgaatgtggaacccagctttgtcttctgtttccccccgatgaaagtattgacttgtatcaggtcattcataaaatgcgtcacattattttattgtattatcagcccagatcacgaggacgtccatcatcgttcagaaccagtccgggatgtgggaaggc

SEQ ID NO: 26646 - DNA, 111 bp, Macaca Mulatta
ggggagccgcattctcaatgtgttgccaagggcttactgttgctgttgttcctcacattggccatgtttctcagcaacccctggaccagaatatgcaaagcctatagttag

SEQ ID NO: 26647 - DNA, 852 bp, Macaca Mulatta
gggcttgcgatcgtatccgctggggcagcgcgggttgcgcttgggcaccctgttcgttcccacatgcagggtagcacaaggagaatgggcgtcatgacagatgtccaccggcgcttcctccagttgctgatgacccatggcgtgctagaggaatgggacgtgaagcgcttgcagagacactgctacaaggtccatgaccgcaatgccactgtagataagttggaggacttcatcaacaacattaacagtgtcttggagtccttgtatattgagataaagagaggagtcacggaagatgacgggagacccatttatgcgttggtgaatcttgctacaacttcaatttccaaaatggctacggattttgcagagaatgaactggatctgtttagaaaggctctggaactaattattgactcagaaactggctttgcgtcttccacaaacattttgaacctggttgatcaacttaaaggcaagaagatgaggaagaaggaagcggagcaggtgctgcagaagtttgtccaaagcaagtggctaattgagaagggaaggggagttcaccctgcatggccgggccatcctgggaaatggagcaatacatccggggagacgtacccccgacgccggtgaaagatctgtaataatctgtcaacgccctccttcatccagggttcaaaacctggcgaaaccctgtgggggatccaggaatgcacttaaccccggcgtggggccaaattactttccagttcaaacagccgaaaaccggggctggccccccacctgtgaaagaactacttgggtcccacgcaagaatccccagtaaggttctttcgagcccttgaaaaagca

SEQ ID NO: 26648 - DNA, 389 bp, Macaca Mulatta
  misc_feature (1)...(389): n = A,T,C or G
tagcggccacagagctggagaaggaggagagccgccgcgaggccgagaagcagaactacctgtcagagcattgcccgccactgcacatcccgggctccatgtcagaagtacaggnaggagctctgcaaacagctgcacgccaagatcgacgcggctgaagaggagaagtatgacatggaggtgaaggtgcagaagagcagcaaggagnagctggaggacatgaaccagaagctgtttgatctgcggggcaagttcaagcggcccccgctgcggagggtgcgcatgtcggctgacgccatgctcaaggccctgctgggctccaagcacaaggtgtgcatggacctgagggccaacctgaagcaggtcaagaaggaggacacagagaaggn

SEQ ID NO: 26649 - DNA, 1680 bp, Macaca Mulatta
  misc_feature (1)...(1680): n = A,T,C or G
ggtgaaggttgccgaactgtccccctggctggacatgtggggtttgacagcttgcctgaccagctggtgaataagtccgtcagccagggcttctgcttcaacatcctgtgcgtgggnnnnnnnnnnnnnnnnnnnnnnnnnnnnnnnnnnnnnnnnnnnnnnnnnnnnnnnnnnnnnnnnnnnnnnnnnnnnnnnnnnnnnnnnnnnnnnnnnnnnnnnnnnnnnnnnnnnnnnnnnnnnnnnnnnnnnnnnnnnnnnnnnnnnnnnnnnnnnnnnnnnnnnnnnnnnnnnnnnnnnnnnnnnnnnnnnnnnnnnnnnnnnnnnnnnnnnnnnnnnnnnnnnnnnnnnnnnnnnnnnnnnnnnnnnnnnnnnnnnnnnnnnnnnnnnnnnnnnnnnnnnnnnnnnnnnnnnnnnnnnnnnnnnnnnnnnnnnnnnnnnnnnnnnnnnnnnnnnnnnnnnnnnnnnnnnnnnnnnnnnnnnnnnnnnnnnnnnnnnnnnnnnnnnnnnnnnnnnnnnnnnnnnnnnnnnnnnnnnnnnnnnnnnnnnnnnnnnnnnnnnnnnnnnnnnnnnnnnnnnnnnnnnnnnnnnnnnnnnnnnnnnnnnnnnnnnnnnnnnnnnnnnnnnnnnnnnnnnnnnnnnnnnnnnnnnnnnnnnnnnnnnnnnnnnnnnnnnnnnnnnnnnnnnnnnnnnnnnnnnnnnnnnnnnnnnnnnnnnnnnnnnnnnnnnnnnnnnnnnnnnnnnnnnnnnnnnnnnnnnnnnnnnnnnnnnnnnnnnnnnnnnnnnnnnnnnnnnnnnnnnnnnnnnnnnnnnnnnnnnnnnnnnnnnnnnnnnnnnnnnnnnnnnnnnnnnnnnnnnnnnnnnnnnnnnnnnnnnnnnnnnnnnnnnnnnnnnnnnnnnnnnnnnnnnnnnnnnnnnnnnnnnnnnnnnnnnnnnnnnnnnnnnnnnnnnnnnnnnnnnnnnnnnnnnnnnnnnnnnnnnnnnnnnnnnnnnnnnnnnnnnnnnnnnnnnnnnnnnnnnnnnnnnnnnnnnnnnnnnnnnnnnnnnnnnnnnnnnnnnnnnnnnnnnnnnnnnnnnnnnnnnnnnnnnnnnnnnnnnnnnnnnnnnnnnnnnnnnnnnnnnnnnnnnnnnnnnnnnnnnnnnnnnnnnnnnnnnnnnnnnnnnnnnnnnnnnnnnnnnnnnnnnnnnnnnnnnnnnnnnnnnnnnnnnnnnnnnnnnnnnnnnnnnnnnnnnnnnnnnnnnnnnnnnnnnnnnnnnnnnnnnnnnnnnnnnnnnnnnnnnnnnnnnnnnnnnnnnnnnnnnnnnnnnnnnnnnnnnnnnnnnnnnnnnnnnnnnnnnnnnnnnnnncctttctctaacttcccccttaacatgcctggggggcatacagtccaacccaggccctctcctctaatcctgccaaggtttatagaaacctgagaatctgagggcgatgtctggccgctggtcaagaagccaacagtcatgtggctcgcagangcatcctgcnnnnnnnnnnnnnnnnnnnnnnnnnnnnnnnnnnnnnnnnnnnnnnnnacatctttgccagaggtgtgacatggtcagggggcccatctgctactcttccccagcagctcccctgttccagttctggttgctgttagttttccctgaggtatttgcatccaccatggctgggta

SEQ ID NO: 26650 - DNA, 727 bp, Macaca Mulatta
  misc_feature (1)...(727): n = A,T,C or G
gtggtttggtttgccaagggaaattggttgggcgaccgttttttccaataagttttttcccccagcttttctgttgttcccagctggtccattccttgtttctgagcattcattacttctatccgatcatcctcagcaaatttagctagcatagtttttctaaagttctcctcttcctcttttgcagcctgtagtactaattccttcaaggccatttgttcttcaaaatcttgcttcatctctttttgctttctcagtttcttttctgcttcttcttttagcttcctcttatatatttcagcttgttcttcctggtataattcttgttgcacttgttccaaatcttcacgttgccgcagcatttcttctaatttctgtgtcaacgcattctgaagctgtagccttttctcctcattttcttgaacttttgccatccgatcttcttctctttgctgctgcatgttagcaaactctatgatttttctgttttcttcttccatctcctcacgtttcttttttctccagagagcctgctctttctgaaactcttctatataccttcgcattgcattcatttttttctaacttttgttgtttttccaactgatcttcttcatagatcttcctaacaatttcatcaatcatgagtttctcttttagcaactgctcataagcttccnnnnnnnnnnnnnnnnnntcttcaagttgtttctctaagtcaagatcc

SEQ ID NO: 26651 - DNA, 322 bp, Macaca Mulatta
ttgtattggaatctggccacacccctttgtgtgtgtattacctacaattgctttagcaacctccatactacaactgcgaagtggagtagtggcacagaaaccatatggcctgcagaatggaaaatgtcacctatttggcaccttaccagaaaaatttgccaactgctgagctagggtgtgatggagaatcccaaggtgtcccttccttctcaaagccacttggggaatcatctgtacccttgtggcctgcattttaacgaagatatacacaaacacgttttttaaatttgctggaaatcttccctcccattttcaagtgtgg

SEQ ID NO: 26652 - DNA, 364 bp, Macaca Mulatta
ttttgttctttttcctgctccactctgatttcttcacagtgggctgagtacattctatttgctgcgttgcttctggtcgtctgtataatttttgccatcatgactcgattctatacttacatcaacccagcagagatcgaagctcaatttgatgaggatgaaaagaaaaagagcctggaaaacagtaacccatatatcatgttgggggccaactcccagacacagatgtgaaggtcaggaagcaagtggaggatggactggaccggcagatgccctgacctctgcccccaggtagcaggacactccattacatggcctctggtggggaagacttcagaattggaaactaaaccatgaatgctat

SEQ ID NO: 26653 - DNA, 727 bp, Macaca Mulatta
aattacaaggctgaatattttacgttgctgacattgtacctcgtgacatttgcattccttttcgctctcttctctctacccctaggactagcgtcaccaggttctttctactggttccttctttgaactggatggacgtccattctgcgagctccattaccatcaacgccggcgaacactctgccatggatgtggacagcccatcactggccgttatatcagagccttggagaacaagttccatcctgatcactttgtgtgggctttctgactgacacagttgtcaaagggcattttcacgcagcagaatgacaacacctattgtcaaccttgcttcaataggctcttcccactgtaatgccaactgatcccaacctcttccagttccttatacaatttacccactacacgacagtgaaagggtaactttgctgttctgaccttctgcttaatagtcttatagaaaaaggtgatgagcaaataaatgaacttctagactttacatgactaagctgataatcttatttttgaggcttctatacagttaattctatacattctctttcgctcttctccaatcaagtacttaggattagatttaagtccttctatctagtccctctacagatgtattttccacttgcataattcataccaacactggattccttaggtttctccatatttcactctactgatggccctactcagatctgctctaatttga

SEQ ID NO: 26654 - DNA, 150 bp, Macaca Mulatta
agggtttctttagaagaaccattcagaaaaatctccatccatcctattcctgtaaatatgaaggaaaatgtgtcatagacaaagtcacgcgaaatcagtgccaggaatgtcgctttaagaaatgcatctatgttggcatggcaacagatt

SEQ ID NO: 26655 - DNA, 486 bp, Macaca Mulatta
atcagtgttaagagcatgatgaaaggtgtcaataaagccgtaggatcgcacaaccctttgtgtgtgtggctgctggtacgtgtggtctttgaaaaccttggctttagccctctggaatcagagcttacccaccatagtatattttgatattaggtggttctacacatagttggcaaaatgacttggtaaatttgtaatactgaagtatattagtataagttaaatttgatgtgtcaactttattttgtatttccttccatttggaaggtttgttagaccattaaggttatattaaagtactcttgtctgtgctatttagttttgcttgttttaaagaaatctagaagtggttatgagttttaattcatagaattgtcaataacagataacatttgcaatcgtcattcctcctgttgtccatgtaagcagctttagtcgtaggttctcttcattataatttattatttgtaaagattccttgaaaca

SEQ ID NO: 26656 - DNA, 491 bp, Macaca Mulatta
gtgataaaggaagccgctatcctgaagaaacacaacttatttgaagataacatggccttgcccagtgaaagtgtgtccagcttaacagatctaaagcccctcatagggtcaaaccaggccagccctgccaggagagcttctgccattctgccaggagttccgggtagtgagaccctcagtaacgaagtattccaggagtcggaggaagagaagcagcctgaggtccctagctcattggccaaaggagaaagcctttctctccctgggccaagcctacccccgggtgggactgagcaagtgattatttcaagagtggatgacctcgtggtgagtcctgtggcggcagaggacacggcaggactcccgggcacacgttcatcagagctggagcttggagggccccttgagggtgaagaacccgcccaggaagagccagaacccatcactgcctcaggttctttgaaggagctcagaaagttgctgacagcgtc

SEQ ID NO: 26657 - DNA, 3001 bp, Macaca Mulatta
  misc_feature (1)...(3001): n = A,T,C or G
ggcgcctcatgatagagaagattgctgcccatctcgctgatttcacacctcgccttcagagtaacacaagagcactttatcagtattgtcccattcctgtgatcaactatccacaactagaaaatgaactgttttgtaatatttattacctcaaacaactgtgtgatacagtccgatttccagattggccaattaaagacccggtnnnnnnnnnnnnnnnnnnnnnnnnnnnnnnnnnnnnnnnnnnnnnnnnnnnnnnnnnnnnnnnnnnnnnnnnnnnnnnnnnnnnnnnnnnnnnnnnnnnnnnnnnnnnnnnnnnnnnnnnnnnnnnnnnnnnnnnnnnnnnnnnnnnnnnnnnnnnnnnnnnnnnnnnnnnnnnnnnnnnnnnnnnnnnnnnnnnnnnnnnnnnnnnnnnnnnnnnnnnnnnnnnnnnnnnnnnnnnnnnnnnnnnnnnnnnnnnnnnnnnnnnnnnnnnnnnnnnnnnnnnnnnnnnnnnnnnnnnnnnnnnnnnnnnnnnnnnnnnnnnnnnnnnnnnnnnnnnnnnnnnnnnnnnnnnnnnnnnnnnnnnnnnnnnnnnnnnnnnnnnnnnnnnnnnnnnnnnnnnnnnnnnnnnnnnnnnnnnnnnnnnnnnnnnnnnnnnnnnnnnnnnnnnnnnnnnnnnnnnnnnnnnnnnnnnnnnnnnnnnnnnnnnnnnnnnnnnnnnnnnnnnnnnnnnnnggtgttacaggaggcatttagtcgctgtgtggctgtcttgactcgttctagtaaaccaagtgacatgtcagtacaggtgnnnnnnnnnnnnnnnnnnnnnnnnnnnnnnnnnnnnnnnnnnnnnnnnnnnnnnnnnnnnnnnnnnnnnnnnnnnnnnnnnnnnnnnnnnnnnnnnnnnnnnnnnnnnnnnnnnnnnnnnnnnnnnnnnnnnnnnnnnnnnnnnnnnnnnnnnnnnnnnnnnnnnnnnnnnnnnnnnnnnnnnnnnnnnnnnnnnnnnnnnnnnnnnnnnnnnnnnnnnnnnnnnnnnnnnnnnnnnnnnnnnnnnnnnnnnnnnnnnnnnnnnnnnnnnnnnnnnnnnnnnnnnnnnnnnnnnnnnnnnnnnnnnnnnnnnnnnnnnnnnnnnnnnnnnnnnnnnnnnnnnnnnnnnnnnnnnnnnnnnnnnnnnnnnnnnnnnnnnnnnnnnnnnnnnnnnnnnnnnnnnnnnnnnnnnnnnnnnnnnnnnnnnnnnnnnnnnnnnnnnnnnnnnnnnnnnnnnnnnnnnnnnnnnnnnnnnnnnnnnnnnnnnnnnnnnnnnnnnnnnnnnnnnnnnnnnnnnnnnnnnnnnnnnnnnnnnnnnnnnnnnnnnnnnnnnnnnnnnnnnnnnnnnnnnnnnnnnnnnnnnnnnnnnnnnnnnnnnnnnnnnnnnnnnnnnnnnnnnnnnnnnnnnnnnnnnnnnnnnnnnnnnnnnnnnnnnnnnnnnnnnnnnnnnnnnnnnnnnnnnnnnnnnnnnnnnnnnnnnnnnnnnnnnnnnnnnnnnnnnnnnnnnnnnnnnnnnnnnnnnnnnnnnnnnnnnnnnnnnnnnnnnnnnnnnnnnnnnnnnnnnnnnnnnnnnnnnnnnnnnnnnnnnnnnnnnnnnnnnnngagagtagaaatggcttgggaggctctgagaaatgtcataaaatataatccaggnnnnnnnnnnnnnnnnnnnnnnnnnnnnnnnnnnnnnnnnnnnnnnnnnnnnnnnnnnnnnnnnnnnnnnnnnnnnnnnnnnnnnnnnnnnnnnnnnnnnnnnnnnnnnnnnnnnnnnnnnnnnnnnnnnnnnnnnnnnnnnnnnnnnnnnnnnnnnnnnnnnnnnnnnnnnnnnnnnnnnnnnnnnnnnnnnnnnnnnnnnnnnnnnnnnnnnnnnnnnnnnnnnnnnnnnnnnnnnnnnnnnnnnnnnnnnnnnnnnnnnnnnnnnnnnnnnnnnnnnnnnnnnnnnnnnnnnnnnnnnnnnnnnnnnnnnnnnnnnnnnnnnnnnnnnnnnnnnnnnnnnnnnnnnnnnnnnnnnnnnnnnnnnnnnnnnnnnnnnnnnnnnnnnnnnnnnnnnnnnnnnnnnnnnnnnnnnnnnnnnnnnnnnnnnnnnnnnnnnnnnnnnnnnnnnnnnnnnnnnnnnnnnnnnnnnnnnnnnnnnnnnnnnnnnnnnnnnnnnnnnnnnnnnnnnnnnnnnnnnnnnnnnnnnnnnnnnnnnnnnnnnnnnnnnnnnnnnnnnnnnnnnnnnnnnnnnnnnnnnnnnnnnnnnnnnnnnnnnnnnnnnnnnnnnnnnnnnnnnnnnnnnnnnnnnnnnnnnnnnnnnnnnnnnnnnnnnnnnnnnnnnnnnnnnnnnnnnnnnnnnnnnnnnnnnnnnnnnnnnnnnnnnnnnnnnnnnnnnnnnnnnnnnnnnnnnnnnnnnnnnnnnnnnnnnnnnnnnnnnnnnnnnnnnnnnnnnnnnnnnnnnnnnnnnnnnnnnnnnnnnnnnnnnnnnnnnnnnnnnnnnnnnnnnnnnnnnnnnnnnnnnnnnnnnnnnnnnnnnnnnnnnnnnnnnnnnnnnnnnnnnnnnnnnnnnnnnnnnnnnnnnnnnnnnnnnnnnnnnnnnnnnnnnnnnnnnnnnnnnnnnnnnnnnnnnnnnnnnnnnnnnnnnnnnnnnnnnnnnnnnnnnnnnnnnnnnnnnnnnnnnnnnnnnnnnnnnnnnnnnnnnnnnnnnnnnnnnnnnnnnnnnnnnnnnnnnnnnnnnnnnnnnnnnnnnnnnnnnnnnnnnnnnnnnnnnnnnnnnnnnnnnnnnnnnnnnnnnnnnnnnnnnnnnnnnnnnnnnnnnnnnnnnnnnnnnnnnnnnnnnnnnnnnnnnnnnnnnnnnnnnnnnnnnnnnnnnnnnnnnnnnnnnnnnnnnnnnnnnnnnnnnnnnggtgaatgaaatcctgtgtcgttcttcagtctggagtgccttcaaagatcagaaacatgatttgttcatttctgagtcacaaacagcaggatacctcacagg

SEQ ID NO: 26658 - DNA, 408 bp, Macaca Mulatta
ggagaagggagagatgtatggtgccacctttgctggagctgcatacctgaaggtcacagtgtcttccaggacagctggggacaggtatcttttgttgcaggagatcaattatcctgagaactcaactcagtcagtgacatgaacatgggggccagagagcagatggactgaagggatgggacgtggttgacactcgtgtgaccctttctattctaaagccagagtgcttggccccttgtttattaaagttcagaaagtggtgggagagtgtagcatgtattacacggcaattctaggactctccaggaacaccccattgccatctcaggatgcttctggaagcttagcagggcctcactgatgaggaaactgctgacttcaggcaatgtccagccatggggaacatct

SEQ ID NO: 26659 - DNA, 2198 bp, Macaca Mulatta
  misc_feature (1)...(2198): n = A,T,C or G
gaactgcacaaactcttgcagccatttctgctgaggcgagtgaaagctgacgtagctacagagcttcccaagaagacagaagtagtgatataccatggcatgtcagcattgcagaagaaatactacaaggccattttgatgaaagacctagnnnnnnnnnnnnnnnnnnnnnnnnnnnnnnnnnnnnnnnnnnnnnnnnnnnnnnnnnnnnnnnnnnnnnnnnnnnnnnnnnnnnnnnnnnnnntgtggagccggagccttttgaagttggagaccacctgattgaggccagtgggaagctttacctgctggataagctactagcattcctgtattctgggnnnnnnnnnnnnnnnnnnnnnnnnnnnnnnnnnnnnnnnnnnnnnnnnnnnnnnnnnnnnnnnnnnnnnnnnnnnnnnnnnnnnnnnnnnnnnnnnnnnnnnnnnnnnnnnnnnnnnnnnnnnnnnnnnnnnnnnnnnnnnnnnnnnnnnnnnnnnnnnnnnnnnnnnnnnnnnnnnnnnngcaggtggagttggcatgaacttaacagcggcagatactgtgatttttgttgacagtgactttaatcctcagaatgacttgcaagcagctgccagggctcatcgaattggccaaaacaagnnnnnnnnnnnnnnnnnnnnnnnnnnnnnnnnnnnnnnnnnnnnnnnnnnnnnnnnnnnnnnnnnnnnnnnnnnnnnnnnnnnnnnnnnnnnnnnnnnnnnnnnnnnnnnnnnnnnnnnnnnnnnnnnnnnnnnnnnnnnnnnnnnnnnnnnnnnnnnnnnnnnnnnnnnnnnnnnnnnnnnnnnnnnnnnnnnnnnnnnnnnnnnnnnnnnnnnnnnnnnnnnnnnnnnnnnnnnnnnnnnnnnnnnnnnnnnnnnnnnnnnnnnnnnnnnnnnnnnnnnnnnnnnnnnnnnnnnnnnnnnnnnnnnnnnnnnnnnnaaatcatatgtacttatttgaaggtaaagattattctaaagagcccagtaaggaagacagaaaatcatttgaacaactggtaaaccttcagaaaacccttttggagaaaactagtcaagagggccgatcactccgaaataaaggcagtgtnnnnnnnnnnnnnnnnnnnnnnnnnnnnnnnnnnnnnnnnnnnnnnnnnnnnnnnnnnnnnnnnnnnnnnnnnnnnnnnnnnnnnnnnnnnnnnnnnnnnnnnnnnnnnnnnnnnnnnnnnnnnnnnnnnnnnnnnnnnnnnnnnnnnnnnnnnnnnnnnnnnnnnnnnnnnnnnnnnnnnnnnnnnnnnnnnnnnnnnnnnnnnnnnnnnnnnnnnnnnnnnnnnnnnnnnnnnnnnnnnnnnnnnnnnnnnnnnnnnnnnnnnnnnnnnnnnnnnnnnnnnnnnnnnnnnnnnnnnnnnnnnnnnnnnnnnnnnnnnnnnnnnnnnnnnnnnnnnnnnnnnnnnnnnnnnnnnnnnnnnnngatgactctggccactggggcagaggtggtttatttacagctctggaaaaacgatctgctgagccaagaaaaatatatgagctggcggggaaaatgaaagnnnnnnnnnnnnnnnnnnnnnnnnnnnnnnnnnnnnnnnnnnnnnnnnnnnnnnnnnnnnnnnnnnnnnnnnnnnnnnnnnnnnnnnnnnnnnnnnnnnnnnnnnnnnnnnnnnnnnnnnnnnnnnnnnnnnnnnnnnnnnnnnnnnnnnnnnnnnnnnnnnnnnnnnnnnnnnnnnnnnnnnnnnnnnnnnnnnnnnnnnnnnnnnnnnnnnnnnnnnnnnnnnnnnnnnnnnnnnnnnnnnnnnnnnnnnnnnnnnnnnnnnnnnnnnnnnnnnnnnnnnnnnnnnnnnnnnnnnnnnnnnnnnnnnnnnnnnnnnnnnnnnnnnnnnnnnnnnnnnnnnnnnnnnnnnnnnnnnnnnnnnnnnnnnnnnnnnnnnnnnnnnnnnnnnnnnnnnnnnnnnnnnnnnnnnnnnnnnnnnnnnnnnnnnnnnnnnnnnnnnnnnnnnnnnnnnnnnnnnnnnnnnnnnnnnnnnnnnnnnnnnnnnnnnnnnnnnnnnnnnnnnnnnnnnnnnnnnnnntgttttgttctattttggcacctataatatagagaaacacaacttttttgggaaagccctttgaccccagcttgctagttgcataataataaattatctattccta

SEQ ID NO: 26660 - DNA, 763 bp, Macaca Mulatta
taagaactcagggaaacgagtgagtttggaacaaagacttacagattgtgacggtctctgacatttcacccttctttgaggcatgcctttatcaatgcgttacctctttgtaatttctgtctctagtgtaattatttttatcgtcttctctgtgttcaattttgggggagatcaaagcttccagaggctaaatatctcagaccctttgatgctgactcaagtttgcacatcttttatcaatggaaaaacacgtttcctgtggaaaaacaaactaatgatccatgagaagtcttcttgcaaggaatacttgacccacagccactacatcacagcccctttatctaaggaagaagatgactttcccttggcgtatataatggtcatccatcatcactttgacacctttgcaaggctcttcagggctatttacatgccccaaaatatctactgtattcatgtggatgaaaaagcaacaaccgaatttaaagatgcggtggagcaactattgagctgcttcccaaacgcttttctggcttccaagatggaaccggttgtctatggtgggatctccaggctccaggctgacctgaactgcatcaaagatctttctgccttggaggtctcatggaagtacgttatcaacacctgtgggcaagacttccccctgaaaaccaacaaggaaatagttcagtatctgaaaggatttaaaggtaaaaatatcaccccaggggtgctgcccccagctcatgcaattggacggact

SEQ ID NO: 26661 - DNA, 726 bp, Macaca Mulatta
gggtgccacagtgcccagccagcttgtgatttaatacatgaattgtttatttctggaattttccacatatttttggaccaaggttgcctcgggtaactacagaaagtgaaattgcagataaaggggattactgctcctgtgctctaaaattggtgtttgggtgatcaggagcaggtagccaatgggaagagcacttctgagtgatacctaaagcagtttctttggtggccttttcacattctccaatgttcaagcatattttccactttccattttctctttcacctcattttgcctcgccatcccccatccctgcttatttcttaagcccatcgatggcactcattaaattgtgtttagggctaatgaatcattgttccttgttttcaatatgccacaatttaggacacatttaaaattttctagaacaataacctaatcaatattgactaatttgagccacattcccaactcaaactcagcacacactgccagtcttccccaatatctcctttcaattccccattacaccttataaagttggaatcaaagatatctcattctgtcattgttaatctaagaataaaaacactgacttgaatacagttttactaagtttcaaccttctaagtagataggccctctaggtattctgcagatcactggtggtctttatagctattaatatatgttttgtattaatgttattttttcaactaaaatcgt

SEQ ID NO: 26662 - DNA, 562 bp, Macaca Mulatta
  misc_feature (1)...(562): n = A,T,C or G
agaatgtttggtttaggttgggcaattatactgaaagaaaaaagtggaaaagaatatatcatggagcatgttgatctttccgtaaatgacacatcagttactgttatatggtatggcaaaaactggccgtgcctagcgtcattgtcaaccttagatttatgtggtgtgacaccagtttttatggactggtataaaactcccaccaaacatagnnnnnnnnnnnnnnnnnnnnnnnnnnnnnnnnnnnnnnnnnnnnnnnnnnnnnnnnnnnnnnnnnnnnnnnnnnnnnnnnnnnnnnnnnnnnnnnnnnnnnnnnnnnnnnnnnnnnnnnnnnnnnnnnnnnnnnnnnnnnnnnnnnnnnnnnnnnnnnnnnnnnnnnnnnnnnnnnnnnnnnnnnnnnnnnnnnnnnnnnnnnnnnnnnnnnccctatgaactacctccacatagcccgtttttggatgatagccccgagtatggactgcacggctaccaactccatgttgatctgcacagtggtggagttttctacctgtgtggtacatttcgcaatctcttcaccaag

SEQ ID NO: 26663 - DNA, 242 bp, Macaca Mulatta
aggcctgtccctcacctcagggccatgcccacagcgccctgatggaggaaccagactgcaggctgtgccaccattaaacaagagtggctctggccccatgctgtgcttcttggggtggcagggaagccggggtcagcgccttttttcctctcaggtttgcgttctgtgccatcatcccccatgcagcctcctgtacagccctctgtctgtccttctgtccattcactcatctgccaacatac

SEQ ID NO: 26664 - DNA, 1940 bp, Macaca Mulatta
  misc_feature (1)...(1940): n = A,T,C or G
caggacctcctgcagaattcccccaattccatgtctggagtctccaataacccccagggaattgtggtcccagcctcagcgctccagcagggcaacatcgccatgacaaccgtcaactcacaagtcgtgtcaggnnnnnnnnnnnnnnnnnnnnnnnnnnnnnnnnnnnnnnnnnnnnnnnnnnnnnnnnnnnnnnnnnnnnnnnnnnnnnnnnnnnnnnnnnnnnnnnnnnnnnnnnnnnnnnnnnnnnnnnnnnnnnnnnnnnnnnnnnnnnnnnnnnnnnnnnnnnnnnnnnnnnnnnnnnnnnnnnnnnnnnnnnnnnnnnnnnnnnnnnnnnnnnnnnnnnnnnnnnnnnnnnnnnnnnnnnnnnnnnnnnnnnnnnnnnnnnnnnnnnnnnnnnnnnnnnnnnnnnnnnnnnnnnnnnnnnnnnnnnnnnnnnnnnnnnnnnnnnnnnnnnnnnnnnnnnnnnnnnnnnnnnnnnnnnnnnnnnnnnnnnnnnnnnnnnnnnnnnnnnnnnnnnnnnnnnnnnnnnnnnnnnnnnnnnnnnnnnnnnnnnnnnnnnnnnnnnnnnnnnnnnnnnnnnnnnnnnnnnnnnnnnnnnnnnngttccatcaacctggacaacctgcagtccctgtcctcagacaatgccaccatggccatgcagcaggctatgatggctgcacatgatgactcattggatgggacagaagaagaggatgaggatgagatggaagaggaggannnnnnnnnnnnnnnnnnnnnnnnnnnnnnnnnnnnnnnnnnnnnnnnnnnnnnnnnnnnnnnnnnnnnnnnnnnnnnnnnnnnnnnnnnnnnnnnnnnnnnnnnnnnnnnnnnnnnnnnnnnnnnnnnnnnnnnnnnnnnnnnnnnnnnnnnnnnnnnnnnnnnnnnnnnnnnnnnnnnnnnnnnnnnnnnnnnnnnnnnnnnnnnnnnnnnnnnnnnnnnnnnnnnnnnnnnnnnnnnnnnnnnnnnnnnnnnnnnnnnnnnnnnnnnnnnnnnnnnnnnnnnnnnnnnnnnnnnnnnnnnnnnnnnnnnnnnnnnnnnnnnnnnnnnnnnnnnnnnnnnnnnnnnnnnnnnnnnnnnnnnnnnnnnnnnnnaatccctgaggacagatggcacccatggcccccacccatggaaggacttgagtcgtttacaagccctgcactgtgaggcagattggtgctgttcacagagtgggcctttgctccgggggcagacttagaaggaaggggagagacaaagggggactgagtttcatccccagaaggttctcagctcctttgacagacattcaagggcaggagggagccccaaagcataaccagtggccagaggagtgggagggcctgaggcatcacatcttgcagatcagaatgggatagaatccaccgggctccagctcatccctccaaggccctgtctgtgtgcacagcaaccatggacatgggggagagggatgggaggcacagtccccttcactctctcccggaaacaaattgtaagctggtgggctcaacctgtgggaggttaagaggagtcccttctgggttgactccaagagccaaggagatggcagaccctgggctaggagccatatcaaggtgactttgaggccacagctgtccctaggtggtcacagaactcagctcctgtaacaataggacaatggtgttttaccctagatgctcccaccctcagtgctccaaaccctccatagaccttcagagaaggtgaaaacaggttatctgggaatctttccacccagcgggtcgccacggccatccctctgctcccaggctggctccatcagcctccagcttcctttcttcattctgtccttcagggaaggcagaagaaacattggaaggcatctagtccagtgggaagccgaggggttggagaagagtgctacatcc

SEQ ID NO: 26665 - DNA, 360 bp, Macaca Mulatta
  misc_feature (1)...(360): n = A,T,C or G
agcaggcggcataagaggccgagggcgaggtgcagctggcaacagagccccggggccccggggttcctacctcgggggatattctgctggccgtggtatatatagccgatatcatgaagggaaaggaaagcaccaagaaaaaggatatgaacttgtgccgaatttggaaatccctaccgtcaacccagttgccattaaacctggtacagnnnntacagtagccatccctgccattggggcccagtattccatgtttccagcagctccagcccctaaaatgattgaagatggcaaaatccacacagtggaacacatgatcagccccaaagctgtgcagccagacccagccagtgctgctgc

SEQ ID NO: 26666 - DNA, 1124 bp, Macaca Mulatta
  misc_feature (1)...(1124): n = A,T,C or G
aagcccatggcccttgtgatccaggtgaggaaactaaggcccagagaggtgaataccctgcagactctcagtcccagtctcttcccctcactccctgtgaggctctccggcctcatcgaggtcccatcaggtggggaaagatgctgttccaggtgcacactggtctacaaggccagagctttctggaagggnnnnnnnngccctgttggatgagcaggcacctctggaagagccaactgtgtgagatggtgcagcccagtggtggcccggcagcagatcaggacgtgctgggtgaagagtctcctctggggaagccagccatgctgcacctgccttcagagcagggcactcctgagactctccagcgctgcctggaggagaatcaagagctccgagnagatgccatccggcagagcaaccagatgctgcgagagcgctgcgaggagcttctgcatttccaagccagccagagggaggagaaggagttcctcatgtgcaaattccaagaggccaggaaactggtggagagactcagcctggagaagctcgacctgaagaggcagaaagagcaggctctgcgggaggtagagcacctgaagagatgccagcannnnnnnnnnnnnnnnnnnnnnnnnnnnnnnnnnnnnnnnnnnnnnnnnnnnnnnnnnnnnnnnnnnnnnnnnnnnnnnnnnnnnnnnnnnnnnnnnnnnnnnnnnnnnnnnnnnnnnnnnnnnnnnnnnnnnnnnnnnnnnnnnnnnnnnnnnnnnnnnnnnnnnnnnnnnnnnnnnnnnnnnnnnnnnnnnnnnnnnnnnnnnnnnnnnnnnnnnnnnnnnnnnnnnnnnnnnnnnnnnnnnnnnnnnnnnnnnnnnnnnnnnnnnnnnnnnnnnnnnnnnnnnnnnnnnnnnnnnnnnnnnnnnnnnnnnnnnnnnnnnnnnnnnnnnnnnnnnnnnnnnnnnnnnnnnnnnnnnnnnnnnnnnnngaatgcagctggaagatctcaagcagcagctccagcaggccgaggaggccctggtggccaaacaggaggtgattgataagctgaaggaggaggccgagcagcacaagattgtgatggagaccgttccggtgctgaaggcccaggn

SEQ ID NO: 26667 - DNA, 652 bp, Macaca Mulatta
  misc_feature (1)...(652): n = A,T,C or G
ttttgtggtccttctgtgtgtataataggcgtccacaaatgatctccattgtgttcttaatttttaactgccgcaagtgttaaacannnnnnnnnnnnnnnnnnnnnnnnnnnnnnnnnnnnnnnnnnnagaactccaaagtcctgaaaattttggtggacaatgattttttaaaaactaactttgtataacctaatatttgtattctctcatctatatttttttattcactataatcatgatactcttctaatagactcaaaagttaatcattgacaannnnnnnnnnnnnnttnnnnnnnnnnnnnnnnnnnnnnnnnnnnnnnnnnnnnnnnnannnnnnnnnnnnnnnnnnnnnnnnnnnnnnnnnnnnnnnnnnnnnnnnnnnnnnnnnnnnnnnnnnnnnnnnnnnnnnnnnnnnnnnnnnnnnnnnnnnnnnnnnnnnnnnnnnnnnnnnnnnnnnnnnnnnnnnnnnnnnnnnnnnnnnnnnnnnnnnnnnnnnnnnnnnnnnnnnnnnnnnnnnnnnnnnnnnnnnnnnnnnnnnnnnnnnnnnnnnnnnnnnnnnnnnnnnnnnnnnnnnnnnnnnnnnnnnnnnnnnnnnnnnnnnnnnnnnnnnnnnnnnnnnnnnnnnnnnnnnnnnnnnnnnnnnnnn

SEQ ID NO: 26668 - DNA, 627 bp, Macaca Mulatta
  misc_feature (1)...(627): n = A,T,C or G
gggggagcccaccaaggaaccattgaaaccactttctgctgcagaaaaaatagcttccatcggtcagacagccaccgtgtcaccagatatgaacacatgtacatctgatcagttccaggagtctctaccacccgtccagtttgactggagtagcagtggccttactaaccctttagatggtgtggatccggagttgtatgagttaacaacttctaagctggaaatctccacctcaagcctcaaagtgactgatgcatttgcgagactcatgtctacagtagagaagacaagcacatctaccaggaaaccgaaaagagaagagcacctgagtgaagaagctatcaaggtgatcgctggccttcctgacttaacgttcatgcatgccaaggtgttgatgttcccagccacgttaacaccttccacaagctctcaagaaaaagcagactgataactgatgtgaattggacggttactattgcttttcctttttcccatcccttccctaccatcaaaagcatacctgctctaattaaaaacaaaaaattcaagttcagctgatttgttggtaagccgcactagaaaggtatacatagttatgtatatttnattacatactgaagtcctaaa

SEQ ID NO: 26669 - DNA, 317 bp, Macaca Mulatta
  misc_feature (1)...(317): n = A,T,C or G
ggggatgtggctctgctgggcgggggcccctacatgctctgcactgatgggcagcagctattgcgacaggtcctgcaccctgaggcctccaggaagnagaacctggtgctccccgacacattcttctccttctatgacctccgaagagagttccatatgcaacatccaagtacctgccctgccagggacctcactgtggccaccatggcacagggtntttaggactggagacagatgccacagaggatgactttggggtctgggaagtgaagacaatggtagctgttatcctcgatctactcaaagagtccagcagt

SEQ ID NO: 26670 - DNA, 3955 bp, Macaca Mulatta
  misc_feature (1)...(3955): n = A,T,C or G
tggtaactacaagaaggacttcttgtgtggacttggcatcactctgattagcctgttcactagccttgttactgttctcatcatagcagtgttcatctctcttattggacagtctctctcatggtataaccacttctatgtctccgtttgtctgtatggaactgcaactgtagccaaaataatatttatacatactcttgcgaaaagattttattacatgnnnnnnnnnnnnnnnnnnnnnnnnnnnnnnnnnnnnnnnnnnnnnnnnnnnnnnnnnnnnnnnnnnnnnnnnnnnnnnnnnnnnnnnnnnnnnnnnnnnnnnnnnnnnnnnnnnnnnnnnnnnnnnnnnnnnnnnnnnnnnnnnnnnnnnnnnnnnnnnnnnnnnnnnnnnnnnnnnnnnnnnnnnnnnnnnnnnnnnnnnnnnnnnnnnnnnnnnnnnnnnnnnnnnnnnnnnnnnnnnnnnnnnnnnnnnnnnnnnnnnnnnnnnnnnnnnnnnnnnnnnnnnnnnnnnnnnnnnnnnnnnnnnnnnnnnnnnnnnnnnnnnnnnnnnnnnnnnnnnnnnnnnnnnnnnnnnnnnnnnnnnnnnttaacttcatctaccttgccaagagcacaaaaaaaaccatgctaactttaactttggcatgtgcaattacattcctccttgtttgcagtggaacattttttccatatagctccaatcctgctaatcccaagccaaagagagtgtttcttcagncagcatgtgactagaacattccatgacttggaaggaaatgcagttaaacgggactctggaatatggatcaatgggtttgattatactggaatgtctcacataacccctcacattcctgagatcaatgatagcatccgagctcactgtgaggagaatgcacctctttgtggttttccttggtatcttcccagtgcactttctgatcaggnnnnnnnnnnnnnnnnnnnnnnnnnnnnnnnnnnnnnnnnnnnnnnnnnnnnnnnnnnnnnnnnnnnnnnnnnnnnnnnnnnnnnnnnnnnnnnnnnnnnnnnnnnnnnnnnnnnnnnnnnnnnnnnnnnnnnnnnnnnnnnnnnnnnnnnnnnnnnnnnnnnnnnnnnnnnnnnnnnnnnnnnnnnnnnnnnnnnnnnnnnnnnnnnnnnnnnnnnnnnnnnnnnnnnnnnnnnnnnnnnnnnnnnnnnnnnnnnnnnnnnnnnnnnnnnnnnnnnnnnnnnnnnnnnnnnnnnnnnnnnnnnnnnnnnnnnnnnnnnnnnnnnnnnnnnnnnnnnnnnnnnnnnnnnnnnnnnnnnnnnnnnnnnnnnnnnnnnnnnnnnnnnnnnnnnnnnnnnnnnnnnnnnnnnnnnnnnnnnnnnnnnnnnnnnnnnnnnnnnnnnnnnnnnnnnnnnnnnnnnnnnnnnnnnnnnnnnnnnnnnnnnnnnnnnnnnnnnnnnnnnnnnnnnnnnnnnnnnnnnnnnnnnnnnnnnnnnnnnnnnnnnnnnnnnnnnnnnnnnnnnnnnnnnnnnnnnnnnnnnnnnnnnnnnnnnnnnnnnnnnnnnnnnnnnnnnnnnnnnnnnnnnnnnnnnnnnnnnnnnnnnnnnnnnnnnnnnnnnnnnnnnnnnnnnnnnnnnnnnnnnnnnnnnnnnnnnnnnnnnnnnnnnnnnnnnnnnnnnnnnnnnnnnnnnnnnnnnnnnnnnnnnnnnnnnnnnnnnnnnnnnnnnnnnnnnnnnnnnnnnnnnnnnnnnnnnnnnnnnnnnnnnnnnnnnnnnnnnnnnnnnnnnnnnnnnnnnnnnnnnnnnnnnnnnnnnnnnnnnnnnnnnnnnnnnnnnnnnnnnnnnnnnnnnnnnnnnnnnnnnnnnnnnnnnnnnnnnnnnnnnnnnnnnnnnnnnnnnnnnnnnnnnnnnnnnnnnnnnnnnnnnnnnnnnnnnnnnnnnnnnnnnnnnnnnnnnnnnnnnnnnnnnnnnnnnnnnnnnnnnnnnnnnnnnnnnnnnnnnnnnnnnnnnnnnnnnnnnnnnnnnnnnnnnnnnnnnnnnnnnnnnnnnnnnnnnnnnnnnnnnnnnnnnnnnnnnnnnnnnnnnnnnnnnnnnnnnnnnnnnnnnnnnnnnnnnnnnnnnnnnnnnnnnnnnnnnnnnnnnnnnnnnnnnnnnnnnnnnnnnnnnnnnnnnnnnnnnnnnnnnnnnnnnnnnnnnnnnnnnnnnnnnnnnnnnnnnnnnnnnnnnnnnnnnnnnnnnnnnnnnnnnnnnnnnnnnnnnnnnnnnnnnnnnnnnnnnnnnnnnnnnnnnnnnnnnnnnnnnnnnnnnnnnnnnnnnnnnnnnnnnnnnnnnnnnnnnnnnnnnnnnnnnnnnnnnnnnnnnnnnnnnnnnnnnnnnnnnnnnnnnnnnnnnnnnnnnnnnnnnnnnnnnnnnnnnnnnnnnnnnnnnnnnnnnnnnnnnnnnnnnnnnnnnnnnnnnnnnnnnnnnnnnnnnnnnnnnnnnnnnnnnnnnnnnnnnnnnnnnnnnnnnnnnnnnnnnnnnnnnnnnnnnnnnnnnnnnnnnnnnnnnnnnnnnnnnnnnnnnnnnnnnnnnnnnnnnnnnnnnnnnnnnnnnnnnnnnnnnnnnnnnnnnnnnnnnnnnnnnnnnnnnnnnnnnnnnnnnnnnnnnnnnnnnnnnnnnnnnnnnnnnnnnnnnnnnnnnnnnnnnnnnnnnnnnnnnnnnnnnnnnnnnnnnnnnnnnnnnnnnnnnnnnnnnnnnnnnnnnnnnnnnnnnnnnnnnnnnnnnnnnnnnnnnnnnnnnnnnnnnnnnnnnnnnnnnnnnnnnnnnnnnnnnnnnnnnnnnnnnnnnnnnnnnnnnnnnnnnnnnnnnnnnnnnnnnnnnnnnnnnnnnnnnnnnnnnnnnnnnnnnnnnnnnnnnnnnnnnnnnnnnnnnnnnnnnnnnnnnnnnnnnnnnnnnnnnnnnnnnnnnnnnnnnnnnnnnnnnnnnnnnnnnnnnnnnnnnnnnnnnnnnnnnnnnnnnnnnnnnnnnnnnnnnnnnnnnnnnnnnnnnnnnnnnnnnnnnnnnnnnnnnnnnnnnnnnnnnnnnnnnnnnnnnnnnnnnnnnnnnnnnnnnnnnnnnnnnnnnnnnnnnnnnnnnnnnnnnnnnnnnnnnnnnnnnnnnnnnnnnnnnnnnnnnnnnnnnnnnnnnnnnnnnnnnnnnnnnnnnnnnnnnnnnnnnnnnnnnnnnnnnnnnnnnnnnnnnnnnnnnnnnnnnnnnnnnnnnnnnnnnnnnnnnnnnnnnnnnnnnnnnnnnnnnnnnnnnnnnnnnnnnnnnnnnnnnnnnnnnnnnnnnnnnnnnnnnnnnnnnnnnnnnnnnnnnnnnnnnnnnnnnnnnnnnnnnnnnnnnnnnnnnnnnnnnnnnnnnnnnnnnnnnnnnnnnnnnnnnnnnnnnnnnnnnnnnnnnnnnnnnnnnnnnnnnnnnnnnnnnnnnnnnnnnnnnnnnnnnnnnnnnnnnnnnnnnnnnnnnnnnnnnnnnnnnnnnnnnnnnnnnnnnnnnnnnnnnnnnnnnnnnnnnnnnnnnnnnnnnnnnnnnnnnnnnnnnnnnnnnnnnnnnnnnnnnnnnnnnnnnnnnnnnnnnnnnnnnnnnnnnnnnnnnnnnnnnnnnnnnnnnnnnnnnnnnnnnnnnnnnnnnnnnnnnnnnnnnnnnnnnnnnnnnnnnnnnnnnnnnnnnnnnnnnnnnnnnnnnnnnnnnnnnnnnnnnnnnnnnnnnnnnnnnnnnnnnnnnnnnnnnnnnnnnnnnnnnnnnnnnnnnnnnnnnnnnnnnnnnnnnnnnnnnnnnnnnnnnnnnnnnnnnnnnnnnnnnnnnnnnnnnnnnnnnnnnnnnnnnnnnnnnnnnnnnnnnnnnnnnnnnnnnnnnnnnnntgtagaaggagcgttttgtcaatttcttgtcactggttgacttactgaggattgttgccttataatgttactgaaataaactttttaatata

SEQ ID NO: 26671 - DNA, 677 bp, Macaca Mulatta
tgtgtaataggaacctgtgaattgctctggatgattaacacaaaagtgactgttgtatttggactttaaatactgattgtgtgtgacctgaaaattcactgctataagaaagatggagtcagtttgtatcagttattaggatgttcatattccaagaatgttagttgtttttttaaatcattcctatatggctaacattgtttaatgaaagtaatgctcaataaagcaatagaatctatttggtatcatccagcttcattattcataaagaaacattgtgcataggcaaaaaaagctaactctctatgtagatgatgacaggcaccctgtgccatcttgcatgaatccaggtgatccagaatcaggacttcactgcagctagaagactttagttcctgaaaactgtaaactggtctgtctgttgatgatcctgcacctaaatgttgatgggagtactgaatttggcctagtctttcaacagtatgtatttctgctcattataaaattagggatctgaacacttctcagaatgaacgttctgtccccagttaaaaataactccatcaagcattttttcatgcagttaagaagaggatctttcaaacaatacagagtttgttttagagaaacatttctcggtttggatttttcagtctttctttgtcttggaatgagac

SEQ ID NO: 26672 - DNA, 1943 bp, Macaca Mulatta
  misc_feature (1)...(1943): n = A,T,C or G
ggcattgctccaacctctaacttactgagccaagtgcccactgagagtgtagggcttcacccctggggaatcctatcggtgccaacatcgcttccccttcagagcccaaggaggccaatcggaagaaactggcagatatgattgcatcnnnnnnnnnnnnnnnnnnnnnnnnnnnnnnnnnnnnnnnnnnnnnnnnnnnnnnnnnnnnnnnnnnnnnntggcccaggcccaggcccaagttcaagctcacctgcagcaggagctgcagcaacaggctgccctgctccagtctcagctgtttaaccccaccctccttcctcacttccccatgacgactgagaccctgctgcaactacagcagcagcagcacctcctcttccctttctacatccccagtgctgagttccagcttaaccccgaggtgagcttgccagtgaccagcggggcactgacgctgactgggacgggcccaggcctgctggaagatctgaaggctcaggttcaggtcccacagcagagccatcagcagatcttgccgcagcagcagcagaaccaactctctatagcccagagtcactctgccctccttcagccaagccagcaccccgaaaagaagaacaaattggtcatcaaagaaaaggaaaaagaaagccagagagagcgggacagtgccgaggtgggagagggcaacaccggtctgaaggaaacactgccagacgccttgaaggccaaagagaagaaagagctggcaccagggggtagttctgagccttccatgctccctccacgcattgcttcagatgccagannnnnnnnnnnnnnnnnnnnnnnnnnnnnnnnnnnnnnnnnnnnnnnnnnnnnnnnnnnnnnnnnnnnnnnnnnnnnnnnnnnnnnnnnnnnnnnnnnnnnnnnnnnnnnnnnnnnnnnnnnnnnnnnnnnnnnnnnnnnnnnnnnnnnnnnnnnnnnnnnnnnnnnnnnnnnnnnnnnnnnnnnnnnnnnnnnnnnnnnnnnnnnnnnnnnnnnnnnnnnnnnnnnnnnnnnnnnnnnnnnnnnnnnnnnnnnnnnnnnnnnnnnnnnnnnnnnnnnnnnnnnnnnnnnnnnnnnnnnnnnnnnnnnnnnnnnnnnnnnnnnnnnnnnnnnnnnnnnnnnnnnnnnnnnnnnnnnnnnnnnnnnnnnnnnnnnnnnnnnnnnnnnnnnnnnnnnnnnnnnnattgcaccggcccagccatcagtgccgctcacccagctctccatgcccatggagctgcccatcttctcgccactgatgatgcagacgatgccattgcagaccttgccagctcagctacccccacagctgggacctgtggagcctctgcctgcggacttggcccaactgtaccagcatcagctcaatccaaccctgctccagcagcagaacaagaggcctcgcaccaggatcacggatgatcagctccgagtcttgcggcaatattttgacattaacaactcccccagtgaagagcaaatcaaagagatggcagacaagtctgggttgccccagaaagtgatcaagcactggttcaggaacaccctcttcaaagagaggcagcgtaacaaggactccccttacaacttcagtaatcctcctatcaccagcctggaggagctcaagattgactcccggcccccttcgccggaacctccgaagcaggagtactggggaagcaagaggtcttcaagaacaaggtttacagactaccagctgagggtcttacaggacttctttgatgccaatgcttacccaaaggatgatgaatttgagcaactctctaatttactgaaccttccaacccgagtcatagtggtgtggtttcagaatgcccgacagaaggccaggaagaattatgagaatcagggagagggcaaagatggagagcggcgtgagcttacaaacgatagat

SEQ ID NO: 26673 - DNA, 2949 bp, Macaca Mulatta
  misc_feature (1)...(2949): n = A,T,C or G
atgtgtgaggtgatgcccacaatcatgagggggacccccctggggccccctcttggcgccgatgctgacgccaacttcgagcagctgatggtgaacatgctggacgagcgggagaagttgctggaatctcttcgggagagtcaggagaccttggcggccacgcagagccggctccaggatgccctacatgagcgggaccagctccagcgccaccttaactctgccctcccccagnnnnnnnnnnnnnnnnnnnnnnnnnnnnnnnnnnnnnnnnnnnnnnnnnnnnnnnnnnnnnnnnnnnnnnnnnnnnnnnnnnnnnnnnnnnnnnnnnnnnnnnnnnnnnnnnnnnnnnnnnnnnnnnnnnnnnnnnnnnnnnnnnnnnnnnnnnnnnnnnnnnnnnnnnnnnnnnnnnnnnnnnnnnnnnnnnnnnnnnnnnnnnnnnnnnnnnnnnnnnnnnnnnnnnnnnnnnnnnnnnnnnnnnnnnnnnnnnnnnnnnnnnnnnnnnnnnnnnnnnnnnnnnnnnnnnnnnnnnnnnnnnnnnnnnnnnnnnnnnnnnnnnnnnnnnnnnnnnnnnnnnnnnnnnnnnnnnnnnnnnnnnnnnnnnnnnnnnnnnnnnnnnnnnnnnnnnnnnnnnnnnnnnnnnnnnnnnnnnnnnnnnnnnnnnnnnnnnnnnnnnnnnnnnnnnnnnnnnnnnnnnnnnnnnnnnnnnnnnnnnnnnnnnnnnnnnnnnnnnnnnnnnnnnnnnnnnnnnnnnnnnnnnnnnnnnnnnnnnnnnnnnnnnnnnnnnnnnnnnnnnnnnnnnnnnnnnnnnnnnnnnnnnnnnnnnnnnnnnnnnnnnnnnnnnnnnnnnnnnnnnnnnnnnnnnnnnnnnnnnnnnnnnnnnnnnnnnnnnnnnnnnnnnnnnnnnnnnnnnnnnnnnnnnnnnnnnnnnnnnnnnnnnnnnnnnnnnnnnnnnnnnnnnnnnnnnnnnnnnnnnnnnnnnnnnnnnnnnnnnnnnnnnnnnnnnnnnnnnnnnnnnnnnnnnnnnnnnnnnnnnnnnnnnnnnnnnnnnnnnnnnnnnnnnnnnnnnnnnnnnnnnnnnnnnnnnnnnnnnnnnnnnnnnnnnnnnnnnnnnnnnnnnnnnnnnnnnnnnnnnnnnnnnnnnnnnnnnnnnnnnnnnnnnnnnnnnnnnnnnnnnnnnnnnnnnnnnnnnnnnnnnnnnnnnnnnnnnnnnnnnnnnnnnnnnnnnnnnnnnnnnnnnnnnnnnnnnnnnnnnnnnnnnnnnnnnnnnnnnnnnnnnnnnnnnnnnnnnnnnnnnnnnnnnnnnnnnnnnnnnnnnnnnnnnnnnnnnnnnnnnnnnnnnnnnnnnnnnnnnnnnnnnnnnnnnnnnnnnnnnnnnnnnnnnnnnnnnnnnnnnnnnnnnnnnnnnnnnnnnnnnnnnnnnnnnnnnnnnnnnnnnnnnnnnnnnnnnnnnnnnnnnnnnnnnnnnnnnnnnnnnnnnnnnnnnnnnnnnnnnnnnnnnnnnnnnnnnnnnnnnnnnnnnnnnnnnnnnnnnnnnnnnnnnnnnnnnnnnnnnnnnnnnnnnnnnnnnnnnnnnnnnnnnnnnnnnnnnnnnnnnnnnnnnnnnnnnnnnnnnnnnnnnnnnnnnnnnnnnnnnnnnnnnnnnnnnnnnnnnnnnnnnnnnnnnnnnnnnnnnnnnnnnnnnnnnnnnnnnnnnnnnnnnnnnnnnnnnnnnnnnnnnnnnnnnnnnnnnnnnnnnnnnnnnnnnnnnnnnnnnnnnnnnnnnnnnnnnnnnnnnnnnnnnnnnnnnnnnnnnnnnnnnnnnnnnnnnnnnnnnnnnnnnnnnnnnnnnnnnnnnnnnnnnaggatgattcaggaagagaaggagtccacggagctccgggcggaggagattgagacacgtgtgaccagtggcagcatggaggccctaaacctgaagcagctgcgcaagcgcggttccatccccacctctctgacagccctgtccctggccagcgcgtccccaccactcagcggccgctctacacctaagctcacctcccgcagtgctgcccaggacctggaccgaatgggggtcatgaccctgnnnnnnnnnnnnnnnnnnnnnnnnnnnnnnnnnnnnnnnnnnnnnnnnnnnnnnnnnnnnnnnnnnnnnnnnnnnnnnnnnnnnnnnnnnnnnnnnnnnnnnnnnnnnnnnnnnnnnnnnnnnnnnnnnnnnnnnnnnnnnnnnnnnnnnnnnnnnnnnnnnnnnnnnnnnnnnnnnnnnnnnnnnnnnnnnnnnnnnnnnnnnnnnnnnnnnnnnnnnnnnnnnnnnnnnnnnnnnnnnnnnnnnnnnnnnnnnnnnnnnnnnnnnnnnnnnnnnnnnnnnnnnnnnnnnnnnnnnnnnnnnnnnnnnnnnnnnnnnnnnnngactccgagttcagtatgcaggagcctatggtgcctgccaagctggggacccaggcagagaaggaccggcggctaaagaagaannnnnnnnnnnnnnnnnnnnnnnnnnnnnnnnnnnnnnnnnnnnnnnnnnnnnnnnnnnnnnnnnnnnnnnnnnnnnnnngctctgggtggggatgcctgcctggtacgtggcagcctgccgggccaacgtcaagagtggtgccatcatgtccgctctgtcggacacagagatccagcgggagatcggcatcagcaatgccctgcaccgactcaagctccgcctggccattcaggagatggtgtcactgaccagcccctctgccccgcccacctccaggactnnnntggcctatggggacatgagccatgagtggattgggaatgaatggctgcctagcctggggctcccgcagtaccgcagctacttcatggagtgcctggtggacgcccgcatgctggaccacctcaccaagaaggacctgcgggtccacctgaagatggtggacagcttccatc

SEQ ID NO: 26674 - DNA, 2150 bp, Macaca Mulatta
  misc_feature (1)...(2150): n = A,T,C or G
cgccccagccctctttcggggacactggctaccccttattccttttcccctttaatgaaggcgacccctgtcgccgcgcggcttcccagagccgactgcaggctccctcagccgggtgttccccgcgtccggaagccaaggtcgcgccttcgaagagactcgggttcctccatccgccctcagngaaaagggtgcgatgttgatctcaggaagcacaaagggatcttcctagcccggactaaaccacggagnnnnnnnnnnnnnnnnnnnnnnnnnnnnnnnnnnnnnnnnnnnnnnnnnnnnnnnnnnnnnnnnnnnnnnnnnnnnnnnnnnnnnnnnnnnnnnnnnnnnnnnnnnnnnnnnnnnnnnnnnnnnnnnnnnnnnnnnnnnnnnnnnnnnnnnnnnnnnnnnnnnnnnnnnnnnnnnnnnnnnnnnnnnnnnnnnnnnnnnnnnnnnnnnnnnnnnnnnnnnnnnnnnnnnnnnnnnnnnnnnnnnnnnnnnnnnnnnnnnnnnnnnnnnnnnnnnnnnnnnnnnnnnnnnnnnnnnnnnnnnnnnnnnnnnnnnnnnnnnnnnnnnnnnnnnnnnnnnnnnnnnnnnnnnnnnnnnnnnnnnnnnnnnnnnnnnnnnnnnnnnnnnnnnnnnnnnnnnnnnnnnnnnnnnnnnnnnnnnnnnnnnnnnnnnnnnnnnnnnnnnnnnnnnnnnnnnnnnnnnnnnnnnnnnnnnnnnnnnnnnnnnnnnnnnnnnnnnnnnnnnnnnnnnnnnnnnnnnnnnnnnnnnnnnnnnnnnnnnnnnnnnnnnnnnnnnnnnnnnnnnnnnnnnnnnnnnnnnnnnnnnnnnnnnnnnnnnnnnnnnnnnnnnnnnnnnnnnnnnnnnnnnnnnnnnnnnnnnnnnnnnnnnnnnnnnnnnnnnnnnnnnnnnnnnnnnnnnnnnnnnnnnnnnnnnnnnnnnnnnnnnnnnnnnnnnnnnnnnnnnnnnnnnnnnnnnnnnnnnnnnnnnnnnnnnnnnnnnnnnnnnnnnnnnnnnnnnnnnnnnnnnnnnnnnnnnnnnnnnnnnnnnnnnnnnnnnnnnnnnnnnnnnnnnnnnnnnnnnnnnnnnnnnnnnnnnnnnnnnnnnnnnnnnnnnnnnnnnnnnnnnnnnnnnnnnnnnnnnnnnnnnnnnnnnnnnnnnnnnnnnnnnnnnnnnnnnnnnnnnnnnnnnnnnnnnnnnnnnnnnnnnnnnnnnnnnnnnnnnnnnnnnnnnnnnnnnnnnnnnnnnnnnnnnnnnnnnnnnnnnnnnnnnnnnnnnnnnnnnnnnnnnnnnnnnnnnnnnnnnnnnnnnnnnnnnnnnnnnnnnnnnnnnnnnnnnnnnnnnnnnnnnnnnnnnnnnnnnnnnnnnnnnnnnnnnnnnnnnnnnnnnnnnnnnnnnnnnnnnnnnnnnnnnnnnnnnnnnnnnnnnnnnnnnnnnnnnnnnnnnnnnnnnnnnnnnnnnnnnnnnnnnnnnnnnnnnnnnnnnnnnnnnnnnnnnnnnnnnnnnnnnnnnnnnnnnnnnnnnnnnnnnnnnnnnnnnnnnnnnnnnnnnnnnnnnnnnnnnnnnnnnnnnnnnnnnnnnnnnnnnnnnnnnnnnnnnnnnnnnnnnnnnnnnnnnnnnnnnnnnnnnnnnnnnnnnnnnnnnnnnnnnnnnnnnnnnnnnnnnnnnnnnnnnnnnnnnnnnnnnnnnnnnnnnnnnnnnnnnnnnnnnnnnnnnnnnnnnnnnnnnnnnnnnnnnnnnnnnnnnnnnnnnnnnnnnnnnnnnnnnnnnnnnnnnnnnnnnnnnnnnnnnnnnnnnnnnnnnnnnnnnnnnnnnnnnnnnnnnnnnnnnnnnnnnnnnnnnnnnnnnnnnnnnnnnnnnnnnnnnnnnnnnnnnnnnnnnnnnnnnnnnnnnnnnnnnnnnnnnnnnnnnnnnnnnnnnnnnnnnnnnnnnncagggctgcggcggttctattccttgtcctacttatggtacagcgctcacaactccaccacagtcattgtggtgggcctgattgtcagtctactcactggngggagaatgcgaggccggtccctgaaccctgcgaccatttacccagtgttgccgaagctcctggccctcttgcccttgtcctgccagaagcggctccactgcaggagcta

SEQ ID NO: 26675 - DNA, 1290 bp, Macaca Mulatta
  misc_feature (1)...(1290): n = A,T,C or G
agaaaagtgtcctgtggacaatgtcaaactgaccgtggtggtgaacaacatcgcggtggccgagcagatcggggagctcttcatccactgccggcacggctgccgggcggcgggcggcgggaagccccccatctttgaggtggacccccgagggtgccccttcaccatcaagctcagcgcccggaagnggaccacgagggcagctgtgactacaggcctgtgcggtgccccaacaaccccagctgccccccactgctcaagatgaacctggaggcccacctcaaggagtgtgagcacatcaaatgtccccactccaagtacgggtgnnnnnnnnnnnnnnnnnnnnnnnnnnnnnnnnnnnnnnnnnnnnnnnnnnnnnnnnnnnnnnnnnnnnnnnnnnnnnnnnnnnnnnnnnnnnnnnnnnnnnnnnnnnnnnnnnnnnnnnnnnnnnnnnnnnnnnnnnnnnnnnnnnnnnnnnnnnnnnnnnnnnnnnnnnnnnnnnnnnnnnnnnnnnnnnnnnnnnnnnnnnnnnnnnnnnnnnnnnnnnnnnnnnnnnnnnnnnnnnnnnnnnnnnnnnnnnnnnnnnnnnnnnnnnnnnnnnnnnnnnnnnnnnnnnnnnnnnnnnnnnnnnnnnnnnnnnnnnnnnnnnnnnnnnnnnnnnnnnncctatgaccctcagcagatcttcaaatgcaaagggacctttgtgggccaccagggccctgtgtggtgtctatgcgtctactccatgggtgacatgctcttcagcggctcctctgacaagaccatcaaggnnnaggtgtgggatacatgtaccacctacaagtgccagaagacactggagggccacgatggcatcgtgctggctctctgcatccaggggtnnnnnnnnnnnnnnnnnnnnnnnnnnnnnnnnnnnnntgtgggacatccagaacctgcagaaggtgaacaccatccgggcccacgacaacccggtgtgcacgctggtctcctcacacaacatgctcttcagcggctccctgaaggccatcaaggtnaggtctgggacatcgtgggcactgagctgaagttgaagaaggagctcacaggcctcaaccactgggtgcgggccctggtggctgcccagagctacctgtacagcggctcctaccagacaatcaagnagatctgggacatccgaaccctcgactgcatccacgtcctgcagacgtctggcggcagcgtctactccattgctgtgacaaatcaccacattgtctgtggcacctacgagaacctcatccacgt

SEQ ID NO: 26676 - DNA, 702 bp, Macaca Mulatta
aggaaaatgttataggatcacgctgactgtataggagtttgaggctctggagctctcacatattcaagtctttaacttagtggtgatgggtgattttcttgtgtcatttttgaacaatctcatctttcaaagtttaagtagacctgtagaagagctaacagaattatatttctatttagttaacattgttaatgaaaaacagataaatgtgccctggtctaggttactcaaaggccatatcttcaccaggccagagattcaattttaaacctcagcagccatccgtttggccaagtggttggtaccagtgaaatgaaagtctttgaggggtaggagagagagggaaacctcaaactacatcatagaaatatgttaaaaccactttaaatcgttgacacaaagtggtaaggaagttttgtctgactcagcctgacaagcctagatagaaatggacctcagaatacagaatggagtccttgagtgtcagctggtgaggaccatggagtcctgcgagctcaacctgtcatttacagactaagaaagggaagtacacacccggcttgtggccagtcttctgccccctctccgggctttcctcactgttctctcccttgagtctcatttgtaggaatcaagagattcctatacatgggacttcagatgtacattggcacttgattagatccaaaagacaaagtgtgg

SEQ ID NO: 26677 - DNA, 219 bp, Macaca Mulatta
  misc_feature (1)...(219): n = A,T,C or G
tttgaacagaaacaaattactcataccaaatctacaaatgcaactaattcaaatgtcaaagacgttggagctgaagaacccagcagaaaaaatgcaacatctcttattctttttgaggaggtnaggttgatgtaatttttgatgaagatgctgggtttttgaatgcaatcaaaacattcatggcaacaactaaacgacctgtaatccttactacaagtg

SEQ ID NO: 26678 - DNA, 607 bp, Macaca Mulatta
gaccccaatgccaggatggtgacacgcatactgaagagttacagctggttacattgctagacaagatagggggaaaactgatatgggtgttttaaataaatctaataattattcatctaatgaattatgagccaaaatgattcatttttcctgcatgttctatggttaaagaaaaggagccttgcagacatctgtatgtgtcatgaagaatgtttctggaattcttcatttgcttttgaattacgttcaacagaattaagaaatactcatgtgcaataggtgagagaatgtatttccatagatgttttattacttcttcaataaaaagttttattttgggcctgttccttaccttctagaacaattcatgttcaataccctgaccacactggggactgattatttgacagatactctgccagtagatgtggtaggatcacacactataaaggagccatgtggctgtcacataccctctcctattctctgcaccaacaggatctttctttttcatctcacagatattgtaagcgttccttacacacctaacaaagaaggtaaatcaacagttgtcctgtatctaggaaggatcaaagcagaatggaga

SEQ ID NO: 26679 - DNA, 272 bp, Macaca Mulatta
caactaccaccactcctttccctatgactactctgccagtgagtaccgctggcacatcaacttcaccacattcttcattgattgcatggccgcccttggtctggcctatgatcggaagaaagtctccaaggccgccgtcttggccaggattaaaagaacgcggagacaggaagctaccaaggagtggctgagtttggggtccctcaggttcctttttcaaaagccagccaggcagaggttttaatgtctgattattaactactgaataatgc

SEQ ID NO: 26680 - DNA, 1317 bp, Macaca Mulatta
  misc_feature (1)...(1317): n = A,T,C or G
agattccttctggaaccctaacgccttcgagacggattccgacctgccggctggatggatgagggtccaggacacctcagggacctattactggcacatcccaacagggaccacccaatgggaaccccccggccgggcctccccctcacaagggagcagcccccaagaggagtcccagnagctcacctggacaggttttgctcacggagaaggctttgaggatggagagttttggaaggnaaggatgaacccagtgatgaggccccaatggagctgggactgaaggaacctgaggaggggacattgaccttcccagctcagagcctcagnnnnnnnnnnnnnnnnnnnnnnnnnnnnnnnnnnnnnnnnnnnnnnnnnnnnnnnnnnnnnnnnnnnnnnnnnnnnnnnnnnnnnnnnnnnnnnnnnnnnnnnnnnnnnnnnnnnnnnnntggacgcagcagtgtggcagtcaacaattgcatccgtcagctctcttaccacaaaaacaacctgcatgaccccatgtcnnnnnnnnnnnnnnnggaaaggatctgctactacagctggaggacgagacgctaaagctagtggagccacagagccaggcactgctgcacgcccaacccatcatcagcatccgtgtgtggggcgttgggcgggacagtggaagnnnnnnnnnnnnnnnnnnnnnnnnnnnnnnnnnnnnnnnnnnnnnnnnnnnnnnnnnnnnnnnnnnnnnnnnnnnnnnnnnnnnnnnnnnnnnnnnnnnnnnnnnnnnnnnnnnnnnnnnnnnnnnnnnnnnnnnnnnnnnnnnnnnnnnnnnnnnnnnnnnnnnnnnnnnnnnnnnnnnnnnnnnnnnnnnnnnnnnnnnnnnnnnnnnnnnnnnnnnnnnnngtggaattcccagcgcctaagaatgagttggtccagaagttccaagtctattacctggggannnnnnnnnnnnnnnnnnnnnnngggtagatgtgattaatggggccctcgagtcagtcctgtcctccagcagccgtgagcagtggaccccaagtcatgtcagtgtggctcctgctaccctcaccatcttgcaccagcagngcagacagaggcagtgctgggagagtgtcgggtgcgtttcctctccttcctggccgtgggcagagatgtccacacatttgcattcatcatggctgccggcccagcctccttctgctgccacatgttttggtgcgagcccaatgctgctagcctctcagaggctgtgcaggctgcgtgcatgngcttcgctaccagaagtgtctggatgcccgttcccaggcc

SEQ ID NO: 26681 - DNA, 846 bp, Macaca Mulatta
  misc_feature (1)...(846): n = A,T,C or G
tctttataaatttgctgactgttaatttgaagatgtttttatcaggccctctgtcaataatgaagacactttgtctcatcttcacgtgtcataagtgctccatatgccagagatattaggagggaattaataaggactacaaatggggggacaaatttcaccaaagccttatgcccagggtgttaacttcatcatccagtggggagtttagagccatgtcagttcttctttgaagtggagtgcctttatccctagcaatctgtgtaagggaggctttgtagaactgatggtgattaatgtgcacattcttcatgattccaaagctgctccagcaatggattcctttcccagttccattgatacaatccaagatggatgatacaatgctttcagttccaacagactggaacttatcagtcaaataattaagccaaggatgaagccaacacacatttgaaatctccacagttcttgctggggcagctcagcaaggtgctgggcaggccccatccggtgattgaaccggagttttccatttgtccccagaacaagttctgtgcttccggctgcagtgcaggcctgcccacagtaccctgccagcatgtttacgccctgacctggagggaccagctaagggtgagaatgtgactcgctctccatgcccatccttgcttgtctggttagctgagattggccatgcatgctgtagatggtcctgggggttggggatctacggggaaaccctcgtgcatggagcaaaccatgtagactggtgacctgtccacccancctcatcatgatgctctgagactggaaagagaagccaccagcacttttggatgccac

SEQ ID NO: 26682 - DNA, 814 bp, Macaca Mulatta
  misc_feature (1)...(814): n = A,T,C or G
gggattccagcggcggacagcacccgggccgagatgtctcgctcagtggccttagccgtgctggcgctactctctctttctggcctggaggctatccagcgtactccaaagattcaggtttactcacgccatccaccagagaatggaaagccaaatttcctgaattgctatgtgtctggatttcatccatctgatattgaagttgacttactgaagaatggagagaaaatgggaaaagtggagcattcagacttgtctttcagcaaagactggtctttctatctcttgtactacactgaattcacccccaatgaaaaagatgagtatgcctgccgtgtgaaccatgtgactttgtcaaggcccaagacagttaagtgggatcgagacatgtaagcagcatcatggaggtttgaagatgccgcatttggattggatgaattccaaattctgcttccttgctttttaatattgatatgcttatacaagtttatgccaaaaatgcagaggttataataaaggttaacccccgcatgaaccttctttttaacttccacttttggaatgccaatctcccccattattgaaggtaatctggggccgggccagacttttaaagaaggggtatgtggacaacctctaataggctggtggtaatccacaagataacttcctccactattctcaatccaatccacaacaatttttaatgtgttcatataatcccctgaccgaannnnnnnnnnnnnnnnnnnncccccctcttggggtagaaaatctccccccaaaaaaagactctcctgggcacataatataa

SEQ ID NO: 26683 - DNA, 638 bp, Macaca Mulatta
ataatttttaattgtgccgctttcaaactatactgaattttacatttctaaagatgtaaaaactcaactaatagaaaatatacatgaccattctgtctacatagataacagaatctatgaatcttgaaactaagtacatcaatttcaaaaagtattggtcatttaaacagaatcaacaattcagattgacaagaactgttcaaattaatttgacctgtagattctgagccatgtttttattaaagtcagatctattcctaaatacaaaatattttgaagatttattaaaactgaatattacaatgcaaggtaaattaagactaaaggcacataaactttggtcccacctggttgtcagttttagaaaactgccacaaaattaatcttcctgcatattttcgcagtacactttctttatctttgaaaaatacatgcaccagttcctgaactagctagaccagtctgcacatgctcagaaatccacaaccatattccaaatcttaattacaaactaaggatggcaatatatatttaaatgcacgtaagtcatgtcaacttcaaaaacatctacgaaaaatattcagccacaaacaagacattacttagtgctgaacattatatgatacgtcccacaagag

SEQ ID NO: 26684 - DNA, 828 bp, Macaca Mulatta
gtttaatttcccaaaccccttttaaaaggggctgaaggcttttggggaggagttaaaggttgggcggattccccccgaagggaggcttttgggaaatggccaatttttgaacccctcacactgttaggccctcaccaacaagccctttccaaaggtaacttgtgagaattcaagtccataatcgggggaaagattttttttatgggaaagccggataaaactttcagtggaatggaaggttgaaagaatgttaaattccaaaccaggaaccacaaactgccctctaataagacatcggctgtctaagcgtgggggtgccccctttctgccagcagttctggtcttaagaaaatcaccataaatcagacgtgaaaattctggctcccaaaatagcattttctttgcacaaataaaaacgtgtgtatcaagtatgatgttcccccaacgtggacacactcagttcctcacaaagccaagcctgctgcagatgccacatccctgggcttacggtgcagccggtgctttttttcaagacaggaatcaaaacgttaggaacacggcagaaaggcgacacctggagaccaaacacaggaggaggagtcctgcagaggtcatggggaagtcacagaacagtaatacgctagcaggggcatggggcgtgaagaacagaagagaggaaatgtttctgagcctccaaagaagaaattagggccaaccacagcttccggggtcccaaccaattcattcaccaggcggcaccactgccgtcatttcagctactggccactgggaggcgctgcttgaaagggtttgccctgagactccccc

SEQ ID NO: 26685 - DNA, 218 bp, Macaca Mulatta
tattatttcgagtttataaccctattgctagcaccttgtatgatgtcatcattctgctcatgattccaaggatcagcttggatgcctagaggactagatcaccttagtttgattctattttttagcttgcaaaaggtgacttatattccaaagaaattaaaacgttgaaatccaaatcctggaattaaaatgagttaactttaaacatttcagaaaac

SEQ ID NO: 26686 - DNA, 827 bp, Macaca Mulatta
gggcccttttcccttcggcgcgccactgaagatcctggtgtcgccatgggccgccgccccgcccgttgttaccggtattgtaagaacaagccgtacccaaagtctcgcttctgccgaggtgtccctgatgccaagattcgcatctttgacctggggcggaagaaggcaaaagtggatagagtttccgctctgtggccacatggtgtcagatgaatatgagcagctgtcctctgaagccctggaggctgcccgaatttgtgccaataagtacatggtaaaaagttgtggcaaggatggcttccatatccgggtgcggctccaccccttccacgtcatccgcatcaacaagatgttgtcctgtgctggggccgacaagctccaaacgggcaatgccaagtgcttttggaaagccacagggcactgtggccagggttcacattgggcaaaattatcatgtccatccgcacaaagcctgcataacaaggaacaatgtgattgaacgcccttgcgcgtggaccaaatttaaaatttacctggcctctagaagaaccacatctttaaaaaaagtgggggctactccaaattccactggctaaagaaatttaaaaaaaccggtgggttttaaaaaccggcatcatccccaaatgggttgtggggggacaaaaaacaataccccaaaataggtgattcctctgaggacaaatggcgggggaatctgacaattaaattaaaggatatatcaaaaaatgatagtcaccacgtttagatacttctaccattataaagttctcatcttcaccggccgaggcaagagaagatagaaaaat

SEQ ID NO: 26687 - DNA, 1443 bp, Macaca Mulatta
  misc_feature (1)...(1443): n = A,T,C or G
gacagctgctcaggaagcaatcttgcatgcgtctggaaatggcacaaccaaggactactgcatgctttataacccttattggacaactcttccaagtaccctagaaaatgcannnnnnnnnnnnnnnnnnnnnnnnnnnnnnnnnnnnnnnnnnnnnnnnnnnnnnnnnnnnnnnnnnnnnnnnnnnnnnnnnnnnnnnnnnnnnnnnnnnnnnnnnnnnnnnnnnnnnnnnnnnnnnnnnnnnnnnnnnnnnnnnnnnnnnnnnnnnnnnnnnnnnnnnnnnnnnnnnnnnnnntttcctccctcaggtaacagatctgaatttcctgatgtgaaaatactgattgcatttataagccacaaagactttaaagatnnnnnncagattctgggaaataacattactgtgaaaatgtattctccatcgtggcctgactttgattatactatggtggttatttttgtaattgctgtgttcactgtggcattaggtggatactggagtggactagttgaattgnnggaaaacttgaaagcagtgacaactgaagatagagaaatgagaaaaaagaaggaagactatctaactttcagtcctcttacagttgtcatatttgtggtcatctgctgtgttatgatggtcttactttatttcttctacaaatggttggngtttatgttatgatagcaattttctgcatagcatcagcaatgagtctgtacaactgtcttgctgcactaattcataagataccatacggacaatgcacgnnaggtgggcttggattttacaggatatcttggggattgctttctgtctgaatttaattaaaacactgaagttgcccaacttcaagnnnnnnnnnnnnnnnnnnnnnnnnnnnnnnnnnnnnnnnnnnnnnnnnnnnnnnnnnnnnnnnnnnnnnnnnnnnnnnnnnnnnnnnnnnnnnnnnnnnnnnnnnnnnnnnnnnnnnnnnnnnnnnnnnnnnnnnnnnnnnnnnnnnnnnnnnnnnnnnnnnnnnnnnnnnnnnnnnnnnnnnnnnnnnnnnnnnnnnnnnnnnnnnnnnnnnnnnnnnnnnnnnnnnnnnnnnnnnnnnnnnnnnnnnnnnnnnnnnnnnnnnnnnnnnnnnnnnnnnnnnnnnnnnnnnnnnnnnnnnnnnnnnnnnnnnnnnnnnnnnnnnnnnnnnnnnnnnnnnnnnnnnnnnnnnnnnnnnnnnnnnnnnnnnnnnnnnnnnnnnnnnnnnnnnnnnnnngatggaccatctggattatgcagcaaatgaagaaaaccctgcattgactggtgaacagattgtccagcaataatatgtggagctgctataatgtgtcattgattttctacaaatagacttggactttttaaattgacttttgaattgacaatctgaaagagtcgtcaatgatatgcttgcaaatatatat

SEQ ID NO: 26688 - DNA, 341 bp, Macaca Mulatta
tggatgaggagcaggcagcaatcattacctttgaggaggagaatggggaccctggggacagcaccgagaatgaggcacaccattttatgggttgtcatatataagcctaatgccgtattcctgtattacaacatcagtaatgtaaggcgcatggtgtggctactggaggctggtgatgcctttggaaagcaagacagcagcactgggaagcggggtgcctgctgaagatttaagggtcccccactgcgttctacagagaggggctagaaagtcaccttggagtccttgggagggtaaataaaatcaggacactaattgcagccctctccctggagagggag

SEQ ID NO: 26689 - DNA, 149 bp, Macaca Mulatta
atctacggggtccaggaggagaatggctctcgtgtgcagaacttcgccctggacctgaccccaccgcctgaggtcatttacaagtcggagccgggcaccagtgatggcatgaacgtgctgggcatcgtcttcttctccgccaccatggg

SEQ ID NO: 26690 - DNA, 150 bp, Macaca Mulatta
aggccagggagggctctccccgtgacaaccccactgcacagcagatcatgcagctgcttcgtgagatgcagaacccccgggagcgcccaggcttgggcagcaacccctgcattccttttttttaccgggctgacgagaacgatgaggtga

SEQ ID NO: 26691 - DNA, 965 bp, Macaca Mulatta
caagctctgccctggctgtgggtatcaggactgtgaccaaagcatttctagtcccttctctctctctaaggacccaaatttccctgggggcatcctgctttctgaaagccgttggatttcagtgatttttttcccctcaccccccagcatagtagagcacccacagcctcagaaggggaaggtgtcctgctctctttcctcagggcccagcaggcgggacttgagtcctggaccccaggctcttagagactaaggggcagctcctgaccaaagacgatacagcttggcactttaaagcattcacagcaggtgtggccctgagggctcctccatggtgctgcattgaatccagctttccttctgcccttcctccaggagaaggggcccaaggtccccgtggatggtctccacctgtgcttggaaccagtgtaactggctgctccccgctcccagggactgactgcggggatcatctctgaccgccctccgtcgggcccctccctgccttctcccctgcacgcaaggctgtgctcttcctctgctctctgtgtgtccctttgagtgtctctgccccgcctccccatacttcctgggatgatgtgtgaaacctgacacctagatttatttggaaatattctatgaccactttacagacgaggaaactgaggcctcaagcatggcggggtagagtgaagagtagaacccaggtctgatgccaaagctgctttcttctctgcctcctcctcacacaactcacacctcctttgcttctagctttgttgtcctcccaggaaccaaaaaaccccagctattttctgaccaaaatgtgtttcataacaaaccatctggtgcctttccacacagaactggcaggagccccgtgtcctgctagctgtctctcttgttgatttccgtgaaaatgcagtgtttgaagtctgctcatcccgaggggaaacaaaatccaa

SEQ ID NO: 26692 - DNA, 1164 bp, Macaca Mulatta
  misc_feature (1)...(1164): n = A,T,C or G
ctgcgcaaagacatcgaggaggcgtcgctggtcaaggtggagctggacaagaaggtgcagtcgctgcaggatgaggtggccttcctgcggagcaaccacgaggaggaggtggccgaccttctggcccagatccaggcatcacacatcacggtggagcgcaaagactacctgaagacagacatctctacggcgctgaaggaaatccgctcccagctcgaatgccactccgaccagaatatgcaccaggccgaagagtggttcaaatgccgctacgccaagctcaccgaggcggcagagcagaacaaggaggccatccgctccgccaaggaagagatcgccgagtaccggcgccagttgcagtgcaagagcatcgagctagnnnnnnnnnnnnnnnnnnnnnnnnnnnnnnnnnnnnnnnnnnnnnnnnnnnnnnnnnnnnnnnnnnnnnnnnnnnnnnnnnnnnnnnnnnnnnnnnnnnnnnnnnnnnnnnnnnnnnnnnnnnnnnnnnnnnnnnnnnnnnnnnnnnnnnnnnnnnnnnnnnnnnnnnnnnnnnnnnnnnnnnnnnnnnnnnnnnnnnnnnnnnnnnnagaaaactcctggagggtgaagagacgagatttagcacatntgcaggaagcatcactgggccactgtacacacaccgacagccctcagtcacaatatccagtaagattcagaaaaccaaggtggaagctcccaagctcaaggtccaacacaaatttgttgaggagatcatagaggaaaccaaagtggaggatgagaagtcagaaatggaagaggccctgacagccattacagaggaattggccgtttccatgaaggaagagaannnnnnnnnnnnnnnnnnnnnnnnnnnnnnnnnnnnnnnnnnnnnnnnnnnntagctgccaaaaagtctccagtgaaaccaactgcacctgaagttannnnnnnnnnnnnnnnnnnnnnnnnnnnnnnnnnnnnnnnnnnnnnnnnnnnnnnnntgagggagctaagtcagaccaagccgaagagggaggatccgagaaggaaggctctagtgaaaaagaggaaggtgagcaggaagaaggagaaacagaggctgaaggtgaagcagaggaaaccgaagctaaagaggaaaagagagaggaggaaaagcgtgag

SEQ ID NO: 26693 - DNA, 169 bp, Macaca Mulatta
  misc_feature (1)...(169): n = A,T,C or G
ggggccntgagatagctttgcttcgtaagcgcctgcaacaactgaggcttaagaaggctgagcagcagaggcagcaagagctagctgcacatacccagcaacagccttccacttctgatcagtcttctcatgagggctcttcacaggaccctcatgcttcaggttatta

SEQ ID NO: 26694 - DNA, 773 bp, Macaca Mulatta
  misc_feature (1)...(773): n = A,T,C or G
gggttctcaacgatctattgatcattacaccctaattctccttccgtggctcaaacagtatttttgctgtaacaaaggcagcaggaaattcagaccctgctgggcctttttttcatcaagtcagggtgatgtaaaaacattagaaatcttttcaccaaaccctgactttatcgaatgctagtagaagatgtagaattagagacatcttatttgtttatcaccttagcagcaaaaccatagtccaaaaaacaagaaaattaagaatggagcttaaccatgcctccattgggaagtctaggctttgagtcaggtacagtaagaaaaattagcctctgattcattaagtctgccacataatttgttttgatattttggatacattaactcacttaggaaaattcagaaaacaatgggtgattaaagttcattacagctgaataaatgtgtctaaagcagattcttgtattctgaaagtacagtctacaactggtaaaactttgtgattcttttctcccccattatgcccctatataccaagatttgggtactttattttagtagaaaatatatatcctttacatatgtatgtatttataaatgcatagatatatgtaaaaaaatttgtaagaagtgggaggcattaaatcacccatgcatttgggacaacttggntgtaaccgaactttaattttaagtgaacaataataaaaaagcctaatttttcccnnnnnnnnnnnnnnnnnnnnnnnnnnnnnnncccccagtcggcccga

SEQ ID NO: 26695 - DNA, 1952 bp, Macaca Mulatta
  misc_feature (1)...(1952): n = A,T,C or G
atggatctgacaaaatgggcatgatccagctgcagaaccctagccaccccacggggctgctgtgcaaggccaaccagatgcggctggccgggactctgtgcgatgtggtcatcatggtggacagccaggagttccacgcccaccggacggtgctggcctgcaccagcaagatgtttgagatcctcttccaccgcaacagtcagcactatactctgggacttcctctcgccaaagaccttccagcagattctggagtatgcatatacagccacgctgcaagccaaggcggaggacctggatgacctgctgtatgctgccgagatcctggagatcgagtacctggaggagcagtgcctgaagatcctggagaccatccaggcctcagacgacaatgacacggaggccaccatggccgacggtggggccgaggaagaagaggaccgcaaggctcggtacctcaagaacatcttcatctcaaagcattccagcgaggagagtgggtatgccagtgtggctggacagagcctccctgcatccatggtggaccagagcccttcagtctccacctcatttggtctttcagccatgagtcccaccaaggctgcagtggacagtttgatgaccataggacagtctctcctgcagggaactcttcagccacctgcagggcccgaggagccaactctggctgggggtgggcggcaccctggggtggctgaggtgaagacggagatgatgcaggtggatgaggtgcccagccaggacagccctggggcagctgagtccagcatctcaggagggatgggggacaaagttgaggaaagaggcaaagaggggcctgggaccccaactcgaagcagcgtcatcaccagtgctagggagctgcactatgggcgagaggagagtgccgagcagctgccacccccagctgaggctggccaggcccccactggccgacctgagcacccagcacccccgcctgagaagcatctgggcatctactccgtgttgcccaaccacaaggctgacgctgtgttgagcatgccatcttcggtgacctctggcctccacgtgcagcctgccctggctgtctccatggacttcagcacctatggggggctgctnnnnnnnnnnnnnnnnnnnnnnnnnnnnnnnnnnnagctgggggagctggctgtgggcatgaagtcagagagccggaccatcggggagcagtgcagcgtgtgtggggtcgagctgcctgataacgaggctgtggagcagcacaggnnnnnnnnnnnnnnnnnnnnnnnnnnnnnnnnnnnnnnnnnnnnnnnnnnnnnnnnnnnnnnnnnnnnnnnnnnnnnnnnnnnnnnnnnnnnttcagcgggtgccaaagcctttgtctgtgatcagtgtggtgcacagttttcgaaggaggatgccctggagacgcacaggcagacccatactggnnnnnnnnnnnnnnnnnnnnnnnnnnnnnnnnnnnnnnnnnnnnnnnnnnnnnnnnnnnnnnnnnnnnnnnnnnnnnnnnnnnnnnnnnnnnnnnnnnnnnnnnnnnnnnnnnnnnnnnnnnnnnnnnnnnnnnnnnnnnnnnnnnnnnnnnnnnnnnnnnnnnnnnnnnnnnnnnnnnnnnnnnnnnnnnnnnnnnnnnnnnnnnnnnnnnnnnnnnnnnnnnnnnnnnnnnnnnnnnnnnnnnnnnnnnnnnnnnnnnnnnnncaggtgagaagccctttgagtgtaagctgtgccaccagcgctcccgggactactcggccatgatcaagcacctgagaacgcacaacggcgcctcgccctaccagtgcaccatctgcacagagtactgccccagcctctcctccatgcagaagcacatgaagggccacaagcccgaggagatcccgcccgactggaggatagagaagacgtacctctacctgtgctacgtgtga

SEQ ID NO: 26696 - DNA, 98 bp, Macaca Mulatta
agatgcaaaacagaagattttcatgcaggaatcagatgcctcgaatttcctcaagaggcgcggcaagcggtcccccaagtcccgagatgaggtcaatg

SEQ ID NO: 26697 - DNA, 1843 bp, Macaca Mulatta
  misc_feature (1)...(1843): n = A,T,C or G
gaatatggtttctagttttagggtttctgaactacaagtattactaggctttgctggacggaataaaagtggacgcaagcatgacctcctgatgagggcgctgcatttattgaagagcggctgcagccctgcggttcagattaaaatccgagaattgtatagacgccgatatccacgaactcttgaaggactttctgatttatccacaatcaaatcatcggttttcagtttggatggtagctcatcacctgtagaacctgacttggccgtggctggaatccactctttgccttccacttcagttacacctcactcaccatcctctcctgttggttctgtgctgcttcaagatactaagcccacatttgagatgcagcagccatctcccccaattcctcctgtccatcctgatgtgcagttaaaaaatctgcccttttatgatgtccttgatgttctcatcaagcccacaagtttagnnnnnnnnnnnnnnnnnnnnnnnnnnnnnnnnnnnnnnnnnnnnnnnnnnnnnnnnnnnnnnnnnnnnnnnnnnnnnnnnnnnnnnnnnnnnnnnnnnnnnnnnnnnnnnnnnnnnnnnnnnnnnnnnnnnnnnnnnnnnnnnnnnnnnnnnnnnnnnnnnnnnnnnnnnnnnnnnnnnnnnnnnnnnnnnnnnnnnnnnnnnnnnnnnnnnnnnnnnnnnnnnnnnnnnnnnnnnnnnnnnnnnnnnnnnnnnnnnnnnnnnnnnnnnnnnnnnnnnnnnnnnnnnnnnnnnnnnnnnnnnnnnnnnnnnnnnnnnnnnnnnnnnnnnnnnnnnnnnnnnnnnnnnnnnnnnnnnnnnnnnnnnnnnnnnnnnnnnnnnnnnnnnnnnnnnnnnnnnnnnnnnnnnnnnnnnnnnnnnnnnnnnnnnnnnnnnnnnnnnnnnnnnnnnnnnnnnnnnnnnnnnnnnnnnnnnnnnnnnnnnnnnnnnnnnnnnnnnnnnnnnnnnnnnnnnnnnnnnnnnnnnnnnnnnnnnnnnnnnnnnnnnnnnnnnnnnnnnnnnnnnnnnnnnnnnnnnnnnnnnnnnnnnnnnnnnnnnnnnnnnnnnnnnnnnnnnnnnnnnnnnnnnnnnnnnnnnnnnnnnnnnnnnnnnnnnnnnnnnnnnnnnnnnnnnnnnnnnnnnnnnnnnnnnnnnnnnnnnnnnnnnnnnnnnnnnnnnnnnnnnnnnnnnnnnnnnnnnnnnnnnnnnnnnnnnnnnnnnnnnnnnnnnnnnnnnnnnnnnnnnnnnnnnnnnnnnnnnnnnnnnnnnnnnnnnnnnnnnnnnnnnnnnnnnnnnnnnnnnnnnnnnnnnnnnnnnnnnnnnnnnnnnnnnnnnnnnnnnnnnnnnnnnnnnnnnnnnnnnnnnnnnnnnnnnnnnnnnnnnnnnnnnnnnnnnnnnnnnnnnnnnnnnnnnnnnnnnnnnnnnnnnnnnnnnnnnnnnnnnnnnnnnnnnnnnnnnnnnnnnnnnnnnnnnnnnnnnnnnnnnnnnnnnnnnnnnnnnnnnnnnnnnnnnnnnnnnnnnnnnnnnnnnnnnnnnnnnnnnnnnnnnnnnnnnnnnnnnnnnnnnnnnnnnnnnnnnnnnnnnnnnnnnnnnnnnnnnnnnnnnnnnnnnnnnnnnnnnnnnnnnnnnnnnnnnnnnnnnnnnnnnnnnnnnngtcctcctatgtttttggatagtctcacctcaccctaaacagcaagcagtacgtctgtcacacccaccagctcccatgaaagcagtactcatgttagttcatccagcagcaggagtgagacaggggtcataaccagcagtggaagtaacattcctgacatcatctcattggactaa

SEQ ID NO: 26698 - DNA, 608 bp, Macaca Mulatta
ggcatgacagcaagcgcggtggcagctttgatcctcatgacgtcctccatcatgtcggtcgtggggtccctgtacctggcctacattctgtactttgtgctgaaggagttcagcatcatctgcgtcgtcacgtacgtgctgaacttccttcttctcattatcaactacaaacgactagtttacagagacgaggcctggaagcggcagctgcagcccaagcaggactgacgcccgacagactctgccctgacagtctcaagccccttttccattcagtttattttgcagcaggtttttattattattattcacaacagacactgtccctaagaatctcaaactgattttttaaaatcctgtaaattagaaggggccctcgctattttctgtgtcaatcttcattttaaatatggatacaaaaaggatacgccgagccaatcaaagacaagctttaactttactttgaagatgtttctgaaatgataaaatgtagccctagccccctgccctcaattgtaaagtcagcaaccattgctagtaattctttaatgtgcataaattcaatttcaggtataacaaatgtgatcatgacatgaaaatattttaga

SEQ ID NO: 26699 - DNA, 551 bp, Macaca Mulatta
tgcaaagaaagaatttcacagaagtagcagagtttgttttcctgggattctccagattctacaaacatcagatcactctctttgtggtttttctcatcatgtacacattaaccgtggctggcaatgccatcatcgtgaccatcatccactttgaccgtcacctccacactcccatgttcttcttcctgagcacgttggctagctctgagagagtgtacacactggtcatcattccacagatgctctcgagcctggtagcccagacccagccaatctctctagcaggttgtactacccaactgttcttctttgttaccttggccatcaacaattacttcttgctcacagtgatgggctatgaccgctatgtggccatctgcaaccccccgagatacatggtcatcatgagcacgagggtgtgtgtccagctggtgtgtggagcctttagcattgggctgaccatggtagctgtccaggtaacatccatatttacctgaccttttggtctcagggtggttggtcatttcttctgtgacatcctccctgccatg

SEQ ID NO: 26700 - DNA, 646 bp, Macaca Mulatta
  misc_feature (1)...(646): n = A,T,C or G
ggggggtacttaatgagttccgttctggaaaggcacccatccttattgctacagatgtagcctcccgtgggctagatgtggaagatgtcaagtttgtgatcaactatgactatccaaacagctcagaggattatgtgcaccgtattggccgaacagcccgtagcaccaacaagggtaccgcctataccttcttcaccccagggaacctaaaacaggccagagagcttatcaaagtgctggaagaggccaatcaggctatcaatccaaaactgatgcagcttgtggaccacagaggcggcggcggaggcgggggtggtcgctctcgttaccggaccacttcttcagccaacaatcccaatctgatgtatcaggatgaatgtgaccgaaggcttcgaggagtcaaggatggtggccggagagactctgcaagctatcgggatcgtagtgaaaccgatagagctggttatgctaatggcagtggctatggaagtccaaattctgcctttggagcacaagcaggccaatacacctatggccaaggcacctatggggcagctgcttatggcaccagtagctatacngctcaaaatatggtgctggcacttacggagctagtagcacacctcaactgggagagatcgcagag

SEQ ID NO: 26701 - DNA, 780 bp, Macaca Mulatta
  misc_feature (1)...(780): n = A,T,C or G
ggggttacatgtatacagatttagccacaatatatgaacgcgctgggcgagtggaagggagaaacggctcgattactcaaatccctattcttaccatgcctaatgatgatatcactcacccaatcccgaacttgactggctacattacagaggggcagatctatgtggacagacagctacacaacagacagatttatccacctatcaatgtgctaccctcactatcacggttaatgaagtctgctattggagaagggatgaccaggaaggatcatgccgatgtatctaaccagctgtatgcgtgctatgctattgggaaggatgtacaagccatgaaagctgtcgttggagaagaagcccttacctcagatgatcttctctacttggaatttctgcagaagtttgagaggaactttattgctcagggtccttacgaaaatcgcactgtctttgagactttggacattggctggcagctgctccgaatcttccccaaagaaatgctgaagagaatccctcagagcaccatcagcgaattttaccctcgagactctgcgaagcattagctgccgcttctgcgcctgctcacactcttgtggaatactcgttctattttctttattccttttgcgctcccaatccccacctttgtgtaggaagttactgtngtaccctgtaattaaaaaccaangaataggtaacatattggtgccagtgttgcaacgtttttaaactgcttacagacccttaaatatcccggttcagaaaaacttgggtccc

SEQ ID NO: 26702 - DNA, 1091 bp, Macaca Mulatta
  misc_feature (1)...(1091): n = A,T,C or G
gccgactctagtaatgttgtcccaatcccttgtctgtgcctctgcagcaccctttcccccagccaccccggtacccgctgatgctgaggaatactttggcgagaaaccagtcgagcccctttttgcccaatgatgtcaccctgtggaacaccatgacgctgcagcagcagtatcagctgaggtcccagtacgtcagtcctttccccagtaactctaccagcgtcttcagaagctcgcccgtccttcctgcccgcgccacggaagaccctcggatttccatccctgatgatgggtgtccaattgtgtcaaagcagtccatttacaccgaggacgactatgatgagaggtctgactcctcagactctagaatactcaatacatcatcttaannnnnnnnnnnnnnnnnnnnnnnnnnnnnnnnnnnnnnnnnnnnnnnnnnnnnnnnnnnnnnnnnnnnnnnnnnnnnnnnnnnnnnnnnnnnnnnnnnnnnnnnnnnnnnnnnnnnnnnnnnnnnnnnnnnnnnnnnnnnnnnnnnnnnnnnnnnnnnnnnnnnnnnnnnnnnnnnnnnnnnnnnnnnnnnnnnnnnnnnnnnnnnnnnnnnnnnnnnnnnnnnnnnnnnnnnnnnnnnnnnnnnnnnnnnnnnnnnnnnnnnnnnnnnnnnnnnnnnnnnnnnnnnnnnnnnnnnnnnnnnnnnnnnnnnnnnnnnnnnnnnnnnnnnnnnnnnnnnnnnnnnnnnnnnnnnnnnnnnnnnnnnnnnnnnnnnnnnnnnnnnnnnnnnnnnnnnnnnnnnnnnnnnnnnnnnnnnnnnnnnnnnnnnnnnnnnnnnnnnnnnnnnnnnnnnnnnnnnnnnnnnnnnnnnnnnnnnnnnnnnnnnnnnnnnnnnnnnnnnnnnnnnnnnnnnnnnnnnnnnnnnnnnnnnnnnnnnnnnnnnnnnnnnnnnnnnnnnnnnnnnnnnnnnnnnnnnnnnnnnnnnnnnnnnnnnnnnnnnnnnnnnnnnnnnnnnnnnnnagctgtgaactgcctgtaatgtattatgaaacgaacacaagattaagctttgtcctgttaatgtagcatgctaaggactctag

SEQ ID NO: 26703 - DNA, 840 bp, Macaca Mulatta
ggatctcctgtgtcccggaatcggctagcccaggtgaagaggaagatcctggtgctggatctggatgagacacttattcactcccaccatgatggggtcctgaggcccacagtccggcctggtacgcctcctgacttcatcctcaaggtggtaatagacaaacatcctgtccggttttttgtacataagaggccccatgtggatttcttcctggaagtggtgagccagtggtacgagctggtggtgtttacagcaagcatggagatctatggctctgctgtggcagataaactggacaacagcagaagcattcttaagaggagatactacagacagcactgcactttggagttgggcagctacatcaaggacctctctgtggtccacagtgacctctccagcattgtgatcctggataactccccaggggcttacaggagccatccagacaatgccatccccatcaaatcgtggttcagtgaccccagcgacacagcccttctcaacctgctcccgatgctggatgccctcaggttcaccgctgatgttcgttccgtgctgagccgaaaccttcaccaacatcgggctctggtgacagctgctcccccttccacctgagttggggtgggggggggaaagggaggacgaagcccttgggatgcccgtctgatgccctgtcccaatgtggaggactgccttgggcaggggtcttgcccctctcacccctctctgccctgggagccctacactgcacttggagtctggatggacacatgggccggtggctctgaagcagcctcactcttaacttcctgttcacactccttggaaaccccagac

SEQ ID NO: 26704 - DNA, 1678 bp, Macaca Mulatta
  misc_feature (1)...(1678): n = A,T,C or G
agatgtgttggagtgggataattacctctctaatttcgataccactttctctcctacctcccgtgagggacacaannnnnnnnnnnnnnnnnnnnnnnnnnnnnnnnnnnnnnnnnnnnnnnnnnnnnnnnnnnnnnnnnnnnnnnnnnnnnnnnnnnnnnnnnnnnnnnnnnnnnnnnnnnnnnnnnnnnnnnnnnnnnnnnnnnnnnnnnnnnnnnnnnnnnnnnnnnnnnnnnnnnnnnnnnnnnnnnnnnnnnnnnnnnnnnnnnnnnnnnnnnnnnnnnnnnnnnnnnnnnnnnnnnnnnnnnnnnnnnnnnnnnnnnnnnnnnnnnnnnnnnnnnnnnnnnnnnnnnnnnnnnnnnnnnnnnnnnnnnnnnnnnnnnnnnnnnnnnnnnnnnnnnnnnnnnnnnnnnnnnnnnnnnnnnnnnnnnnnnnnnnnnnnnnnnnnnnnnnnnnnnnnnnnnnnnnnnnnnnnnnnnnnnnnnnnnnnnnnnnnnnnnnnnnnnnnnttttgttgagacggagtcttactgtgtcactcaggctggagtgcagtggnnnnnnnnnnnnnnnnnnnnnnnnnnnnnnnnnnnnnnnnnnnnnnnnnnnnnnnnnnnnnnnnnnagtagccgggaccacaggtgtgtgccacaacacctggctaattttttgtatttttggtagacatatgattntgctgtgttcccccagctggtctcgaactcctagactggggccttccgtcgcctttgcctccccaagtgctcggactacaggtatgagccactgtgccaaacctgtttttgatttttaagagtcctttcacattgcctttgatttcttgtggcagcttaagcaggaggtatagaccacctgttgcaagatgggcagtctccatagtagctgggggagcaactgagggaaagtgaatttaatttccaagttacaaattcattatcatttagagaggatcggtcttattcaatctaggcataggtgcagggttagattaaggtatggctggaagaattaccaattagtgacagagggttcttgaaatgannnnnnnnnnnnnnnnnnnnnnnnnnnnnnnnnnnnnnnnnnnnnnnnnnnnnnnnnnnnnnnnnnnnnnnnnnnnnnnnnnnnnnnnnnnnnnnnnnnnnnnnnnnnnnnnnnnnnnnnnnnnnnnnnnnnnnnnnnnnnnnnnnnnnnnnnnnnnnnnnnnnnnnnnnnnnnnnnnnnnnnnnnnnnnnnnnnnnnnnnnnnnnnnnnnnnnnnnnnnnnnnnnnnnnnnnnnnnnnnnnnnnnnnnnnnnnnnnnnnnnnnnnnnnnnnnnnnnnnnnnnnnnnnnnnnnnnnnnnnnnnnnnnnnnnnnnnnnnnnnnnnnnnnnnnnnnnnnnnnnnnnnnnnnnnnnnnnnnnnnnnnnnnnnnnnnnnnnnnnnnnnnnnnnnnnnnnnnnnnnnnnnnnnnnnnnnnnnnnnnnnnnnnnnnnnnnnnnnnnnnnnnnnnnnnnnnnnnnnnnnnnnnnnnnnnnnnnnnnnnnnnnnnnnnnnnnnnnnnnnnnnnnnnnnnaggctccattaaatgacccctgggcatgtgcctcttttaagggtttgaagccttccaccagtaaataccatcttgtacgagcaatattggagtcaatagctttca

SEQ ID NO: 26705 - DNA, 1265 bp, Macaca Mulatta
  misc_feature (1)...(1265): n = A,T,C or G
gggggcgcagctcttagtcgcaagtcgactaaggtttatcagtcactcgccgaggttccctgggtcatggtgccagcctgactgagaagaggacgctcccgggagacgaatgaggaaccacctcctcctactattcaagtacaggggcctggtccgcaaagggaagaaaagcaaaagacgaaaatggctaaattcgtgatccgcccagccactgccgccgactgcagtgacatactgcggctgatcaaggagctggctaaatatgaatacatggaagaacaagtaatcttaactgaaaaagatctgctagaagatggttttggagagcaccccttttaccactgcctggttgcagaagtgcccaaagagcactggactccggaaggacacagcattgttggttttgccatgtactattttacctatgacccgtggattggcaagttactgtatcttgaggacttcttcgtgatgagtgattatagaggctttggcataggatcagaaattctgaagaatctaagccgggttgcgatgaagtgtcgctgcagcagcatgcacttcctggtagcagaatggaatgaaccatccatcaacttctacaaaagaagaggtgcttctgatctgtccagtgaagagggttggagactgttcaagatcgacaagcagtacttgctaaaaatggcaacaaaggaatgaggagtgctggtgtaaatgacaacctccattctattttagaataaattcccaacttatcttgctttctatgctgtttgtagtgaaataatagaatgagcacccattccaaagctttattaccagtggcgttgttgcatgtttgaaatgaggtctgttttaaagtggcaatctcagatgcagtttggagagtcggatatttctccttgaatatctttcgataaacaacaaggtggtgtgatcttaatatatttgaaaaaaaacttccattctcgtgaagtcactcttaaatgtgtacaatgtacacactggtacttagagtttctggatttgaattcctttgtttacataaaactaactctttgnnnnnnnnnnnnnnnnnnnnnnnnnnnnnnnnnnnnnnnnnnnnnnnnnnnnnnnnnnnnnnnnnnnnnnnnnnnnnnnnnnnnnnnnnnnncaacgttcgtgaactggcgaaannnaccctgggnncgttntacccnnaactttannatcgccttnntgcagcacaagtccccctttttcgccagctttggcgttaatagcga

SEQ ID NO: 26706 - DNA, 1110 bp, Macaca Mulatta
caatgaaattgtcacggccccagcctttgggcttcttctgttctttatgtatgctggccagctggccctgagaggggacacccctggtggaggatgtgctggcagctgccagctacttgcacatgaatgacatcgtcaaggtgtgtaagcggcggcttcaagcccgggccctggcagaggcagacagtaccaagaaggaggaagaaaccaactcacagcctcctagtttggagtttttgtccagtactgcccgtggcccccagccttcgttgtcatctgctgagacatcaggccattggggcaaaggggaatggaaaggctctgctgctccctcacctactgtccgtcccccagatgagccaccaatgtccaatggggctgacactacacagcctggcatggaggttgacgcaccacatctgcgggcacctcctccaccggtggctgatgtctctcttgccagccctagtagctccactgagaccattcctgcaaactactactcttctggtctcccagccgtttcatttggaaccactgccaactcctgaagtgggtcctgaaagtctgaaggtggtggatcacaaggatcctggaggaccactgcaaggcttctataccccagcctcagcccccagctcagccccagcccctgtctcagccccagttccatcccaggctccagccccagctgaagctgaactggtccaggtgaaagttgaagctattgtgatctctgatgaagagaccgatgtgtcagatgaacagcctcaggatcctgagagagtgttcccacctggaggagcagtgtatgggggacagccctcccagccagaggcttttgaagactcaggggcagcaggactggaggaggtggggccaagtgaccacttcctgccttcagaccctcatctaccctaccatctgctgccaggtgcagggcagtatcatcgaggactggtgacctcacccctgcctgcgcccgcatctgtgcatgagccactttacctgccttctgagtacgaggcaggtcccaggaagctttggggttttttactgaggatgtttccacctgcaagacatgtggggaagacttctcatgctcttaca

SEQ ID NO: 26707 - DNA, 1434 bp, Macaca Mulatta
  misc_feature (1)...(1434): n = A,T,C or G
gtctgaggatgaatgcgcactcgatttggaccttgtgactgatctggttctgcacatcgatgctcgtggggaaccaggtgggncaggtgggatcctgtgcttcctgcctgggtggcaggagatcaaaggagtgcagcagcgcctccaggaggccctgggcatgcacgagagcaagtacctcatcctgccagnccagtgcactccaacatccccatgatggatcagaaggccatattccagcagcctccagttggggtgcgcaagattgtcttggccaccaatatcgcggagacttccatcacaatcaatgacatcgtgcatgtggtagacagtgggctgcacaaggaagaacgctatgacctgaagaccaaggtgnnnnnnnnnnnnnnnnnnnnnnnnnnnnnnnnnnnnnnnnnnnnnnnnnnnnnnnnnnnnnnnnnnnnnnnnnnnnnnnnnnnnnnnnnnnnnnnnnnnnnnnnnnnnnnnnnnnnnnnnnnnnnnnnnnnnnnnnnnnnnnnnnnnnnnnnnnnnnnnnnnnnnnnnnnnnnnnnnnnnnnnnnnnnnnnnnnnnnnnnnnnnnnnnnnnnnnnnnnnnnnnnnnnnnnnnnnnnnnnnnnnnnnnnnnnnnnnnnnnnnnnnnnnnnnnnnnnnnnnnnnnnngggtgctggaccagcgggagtacctgaccaccctggggcagcgcctggctcacatctccaccgacccccggctggccaaggccatagtgttggccgccatcttccgttgcctgcacccgctactggtggtcgtttcctgccttacccgggaccccttcagcagcagcctacagaaccgggccgaggtggacaaggtnaggtgaaagcactgttgagccacgacagtggcagtgaccacctggcctttgtgcgggctgtcgccggctgggaggaggtgctgcgttggcaggaccgcagctccagggagaattacctggaggaaaacctgctctatgcacctagcctgcgcttcatccacggnggactcatcaagcagttctcggagaacatttatgaggccttcctggtggggaagccctcggactgcaccctggcctctgcccagtgcaacgagtacagtgaggaggaggagctggtgaagggcgtgctgatggccggcctctaccccaacctcatccaggtgncaggtgaggcagggcaaggtcacccggcaggggaagttcaagcccaacagcgtcacatataggaccaaatcaggcaacatcctgctgcacaagtcgaccattaacaggnagggaggccacacggttgcggagccgatggctgacgtatttcatggcggtcaagtccaatggcagcgtcttcgtccgggactcctctcaggtgcacccgctagctgtgctgctcctgaccgacggggacgtgcacatccgn

SEQ ID NO: 26708 - DNA, 1724 bp, Macaca Mulatta
  misc_feature (1)...(1724): n = A,T,C or G
cgcgcgtgagctgagccagtgggtgagcggcggcctcggcatcctgtgttgtgggggctnnnnnnnaagatctaattatcatggacctgcgacagtttcttatgtgcctgtccctgtgcacagcctttgccttgagcaagcctacagaaaagaaggaccgtgtacatcatgagcctcagctcagtgacaaggttcacaatgatgctcagagttttgattatgaccatgatgccttcttgggtgctgaagaagcaaagacctttgatcagctgacaccagaagagagcaagagaaaggcttgaatgattgtagataaaatagacgcggataaagatgggtttgtgacggagggggagctgaaatcctggattaagcacgcccagaagaaatacatatatgacaatgttgaaaaccagtggcaggagtttgatatgaaccaagacggcttaatctcctgggatgagtacagaaacgtgacttatggcacttacctggnnnnnnnnnnnnnnnnnnnnnnnnnnnnnnnnnnnnnnnnnnnnnnnnnnnnnnnnnnnnnnnnnnnnnnnnnnnnnnnnnnnnnnnnnnnnnnnnnnnnnnnnnnnnnnnnnnnnnnnnnnnnnnnnnnnnnnnnnnnnnnnnnnnnnnnnnnnnnnnnnnnnnnnnnnnnnnnnnnnnnnnnnnnnnnnnnnnnnnnnnnnnnnnnnnnnnnnnnnnnnnnnnnnnnnnnnnnnnnnnnnnnnnnnnnnnnnnnnnnnnnnnnnnnnnnnnnnnnnnnnnnnnnnnnnnnnnnnnnnnnnnnnnnnnnnnnnnnnnnnnnnnnnnnnnnnnnnnnnnnnnnnnnnnnnnnnnnnnnnnnnnnnnnnnnnnnnnnnnnnnnnnnnnnnnnnnnnnnnnnnnnnnnnnnnnnnnnnnnnnnnnnnntagatttacactttgtattatgtataccatggcgtgtttatttttgtatttgttctctggttgggactatgatatgaaggatcaagatcctcaactcacacatgtagacaaacattagctctttactctttctcaaccccttatatgattttaataattctcacttaactaattttgtaagcctgagatcaatcagaaatgtgcagaagagaggaaaggaaaaaaatatatactccacaatttatatttagagagagaacacttagttttgcctatcaaaaagtccaacatttcataggtagtaggggccacatactacattcagttgctacacgtccagcaactgaacctgccattacctgggcaaggaaagatccctttgctctaagaaagcttggcccaaattgattttctttttccccttgtagtactgactgttggctaattttgtcaagcacagctgtagtgggaagagttagggccagtgtcttgaaaatcaatcaagtagtgaatgtgatctctttacagagctatagatagaaacagctgtaaaactaaaggaaaaatacaagtgttttcagggcaaacatttttttctcggtatgcatctgttgaaatgctcacgacttaattatttgcctgttgaaatcactgtaaatgccccaatccagttcctcttcttcccgggtgtgccaaggaattaatcttggtttcaccacaattaaaattcactcctttccaatcatgtcattgaaagtgcctttaacaaaagaaatggtcactgaatgggaattctcttaaga

SEQ ID NO: 26709 - DNA, 825 bp, Macaca Mulatta
  misc_feature (1)...(825): n = A,T,C or G
aggggttttgagctggcttttatatttggttttcccttccccaactaattctaccatttcttatatgagtccaggncatgataaagaaaagatagaaaagaaagagaaacgggacagttcaggaggaaaggaagagaagaaacaatatccttttcattttgatgttttcagtcagtataatggaaagctttgatactggtcatgtttacaattgtactcttttagtatgtggtttaaatgcttaagggcttattagttttgaaatggtctttccaattaactctctcaaaatgtatgaaatctggaagtgggatacttgatgttcttgatatttaaaaatacttctttggtgactgagttttatgccactaagggatttatagtccttcgggttatattatcacagagaggaagaaagggaacagagagtgcctagggccggggacattgggaatagaagggcaaaatgatgaggcagacaagcagagctggtagagtttgaggctaccaggctggtcagagcccatataggcctgcaagctgaggtaatgtactaaacggggagatgttcttctttccgccattcccaaaagttgttttcccttaatttgtcatctactcataagtcctcggacaagcacagataataaagactttccatcaaggtgagtgttctctcaccaccttttcatttaatgatagaaacataaaacgaggtctgacagtgttgaaaaactagnatgcattttacaagctacaactacttgattttttcacctacatataatgaccaagtctttagatatagaagcaaaacaagattca

SEQ ID NO: 26710 - DNA, 2997 bp, Macaca Mulatta
  misc_feature (1)...(2997): n = A,T,C or G
agtgcacgacctgcggcagcagatgacagctttgcagagccagcttcagcaggtgcagctggagcgggcgacactgaccagcaagctgaaggcgtcacaggcagagatctcgtccctgcagagtgtccggcagtggtaccagcagcagctcgccctggcccaggaggcccgcgtcaggctgcagggtgagatggctcacatccaggtnnnnnnnnnnnnnnnnnnnnnnnnnnnnnnnnnnnnnnnnnnnnnnnnnnnnnnnnnnnnnnnnnnnnnnnnnnnnnnnnnnnnnnnnnnnnnnnnnnnnnnnnnnnnnnnnnnnnnnnnnnnnnnnnnnnnnnnnnnnnnnnnnnnnnnnnnnnnnnnnnnnnnnnnnnnnnnnnnnnnnnnnnnnnnnnnnnnnnnnnnnnnnnnnnnnnnnnnnnnnnnnnnnnnnnnnnnnnnnnnnnnnnnnnnnnnnnnnnnnnnnnnnnnnnnnnnnnnnnnnnnnnnnnnnnnnnnnnnnnnnnnnnnnnnnnnnnnnnnnnnnnnnnnnnnnnnnnnnnnnnnnnnnnnnnnnnnnnnnnnnnnnnnnnnnnnnnnnnnnnnnnnnnnnnnnnnnnnnnnnnnnnnnnnnnnnnnnnnnnnnnnnnnnnnnnnnnnnnnnnnnnnnnnnnnnnnnnnnnnnnnnnnnnnnnnnnnnnnnnnnnnnnnnnnnnnnnnnnnnnnnnnnnnnnnnnnnnnnnnnnnnnnnnnnnnnnnnnnnnnnnnnnnnnnnnnnnnnnnnnnnnnnnnnnnnnnnnnnnnnnnnnnnnnnnnnnnnnnnnnnnnnnnnnnnnnnnnnnnnnnnnnnnnnnnnnnnnnnnnnnnnnnnnnnnnnnnnnnnnnnnnnnnnnnnnnnnnnnnnnnnnnnnnnnnnnnnnnnnnnnnnnnnnnnnnnnnnnnnnnnnnnnnnnnnnnnnnnnnnnnnnnnnnnnnnnnnnnnnnnnnnnnnnnnnnnnnnnnnnnnnnnnnnnnnnnnnnnnnnnnnnnnnnnnnnnnnnnnnnnnnnnnnnnnnnnnnnnnnnnnnnnnnnnnnnnnnnnnnnnnnnnnnnnnnnnnnnnnnnnnnnnnnnnnnnnnnnnnnnnnnnnnnnnnnnnnnnnnnnnnnnnnnnnnnnnnnnnnnnnnnnnnnnnnnnnnnnnnnnnnnnnnnnnnnnnnnnnnnnnnnnnnnnnnnnnnnnnnnnnnnnnnnnnnnnnnnnnnnnnnnnnnnnnnnnnnnnnnnnnnnnnnnnnnnnnnnnnnnnnnnnnnnnnnnnnnnnnnnnnnnnnnnnnnnnnnnnnnnnnnnnnnnnnnnnnnnnnnnnnnnnnnnnnnnnnnnnnnnnnnnnnnnnnnnnnnnnnnnnnnnnnnnnnnnnnnnnnnnnnnnnnnnnnnnnnnnnnnnnnnnnnnnnnnnnnnnnnnnnnnnnnnnnnnnnnnnnnnnnnnnnnnnnnnnnnnnnnnnnnnnnnnnnnnnnnnnnnnnnnnnnnnnnnnnnnnnnnnnnnnnnnnnnnnnnnnnnnnnnnnngaaaggatccaggccctggaggcggagctgcaggctgtcagtcacagcaagactctgctggaaaaggaactgcaggaggtcattgcgctgaccagccaggagctggaggagtcccgggagaaggtgctggagctggaggacgannnnnnnnnnnnnnnnnnnnnnnnnnnnnnnnnnnnnnnnnnnnnnnnnnnnnnnnnnnnnnnnnnnnnnnnnnnnnnnnnnnnnnnnnnnnnnnnnnnnnnnnnnnnnnnnnnnnnnnnnnnnnnnnnnnnnnnnnnnnnnnnnnnnnnnnnnnnnnnnnnnnnnnnnnnnnnnnnnnnnnnnnnnnnnnnnnnnggtgcaggcggttttgcagcgcaaagaagaggaggatcgccagatgaagcagcttgtccaggccctgcaggcctcactagagaaggagaaggagaaggtgaacagccttaaggagcaggtgnnnnnnnnnnnnnnnnnnnnnnnnnnnnnnnnnnnnnnnnnnnnnnnnnnnnnnnnnnnnnnnnnnnnnnnnnnnnnnnnnnnnnnnnnnnnnnnnnnnnnnnnnnnnnnnnnnnnnnnnnnnnnnnnnnnnnnnnnnnnnnnnnnnnnnnnnnnnnnnnnnnnnnnnnnnnnnnnnnnnnnnnnnnnnnnnnnnnnnnnnnnnnnnnnnnnnnnnnnnnnnnnnnnnnnnnnnnnnnnnnnnnnnnnnnnnnnnnnnnnnnnnnnnnnnnnnnnnnnnnnnnnnnnnnnnnnnnnnnnnnnnnnnnnnnnnnnnnnnnnnnnnnnnnnnnnnnnnnnnnnnnnnnnnnnnnnnnnnnnnnnnnnnnnnnnnnnnnnnnnnnnnnnnnnnnnnnnnnnnnnnnnnnnnnnnnnnnnnnnnnnnnnnnnnnnnnnnnnnnnnnnnnnnnnnnnnnnnnnnnnnnnnnnnnnnnnnnnnnnnnnnnnnnnnnnnnnnnnnnnnnnnnnnnnnnnnnnnnnnnnnnnnnnnnnnnnnnnnnnnnnnnnnnnnnnnnnnnnnnnnnnnnnnnnnnnnnnnnnnnnnnnnnnnnnnnnnnnnnnnnnnnnnnnnnnnnnnnnnnnnnnnnnnnnnnnnnnnnnnnnnnnnnnnnnnnnnnnnnnnnnnnnnnnnnnnnnnnnnnnnnnnnnnnnnnnnnnnnnnnnnnnnnnnnnnnnnnnngcaggagatggacagcctgcagcgccagatggaggagcacaccctcacggtgcacgagtctctgtcctcctggactccggtggaaccagccactgccagccctgcgccccctgggggtcatgccaacccacgtggcaatgcccagagacacagtcagagcagggcttccaaagaagggccgggacagtgactgctgcggactcgcctccgtgtaccgctgtccggaatgctctcttatcaatgttatttattcgattgtgtggctgatgtttttctaagacatgaaattta

SEQ ID NO: 26711 - DNA, 1512 bp, Macaca Mulatta
  misc_feature (1)...(1512): n = A,T,C or G
agaataaccatgtcttggacagccatatacagagcccagcagcacatcacatgaacaaccctcagagaactggccaacgagcacaagaaaattatgaaggcagtgaagaagtatccccacctcaagccaaggatcaatgaaatgcacataattaactggttccatcaagactgtgcaccacaggccattacagctccaaccgtttttctgtgtctggctaatatttaaaactagaaaaactattcctaatcaacatggagtggagagtttattcactgtcttatctgcagaaatttgctgtcaatatataacccgcctgcagtggaaagtgtatagtgttttgtaataaatggcctgatgctaatgtgtaaatggcaaaggtgtatatagtatattaatgttgactgttaattcttaagcaagaaacttttttcttgatgagactcacagatctacacaaactacaaaagttaattttcttgttatacccactgcactctgcaaccagtgttgcctgcctcatggcagttggttcaagctcctttacaaaaaaacccgacagcaacgaaggagagcccagttcatgttcagccacacacaatagtttccatgtttaatatctatgaccactgtgaagtcaatttgtgcctatgaagcaatagtgacaagagcatgggtaaccactatctaaataattctagggatcgaacggtggaaaaaaatctagatgaaattgttaatcagcagggttatcctaggaatttttatttattccaatttagaccgcttcatgatataagattgcatagaagtatgcttttcaaggatcttcattataactcaaaattatattactgacaaatagccactaaactaaaacactgcatgataagaagcccctagagtactcacatacttacagctggtgctataaacttcccccaaaatttggggacccaccttttttaaccactcttcaagtcgacgaaagggtatggttatgtttaatgattttggtgatttatatacaccccactaccattttttagagtggagagctactaataaatcgaaaaaaggatattaatacaacccgcgagatctcaaaaatcagagggaaacaatatacgttacacatgatggtttttgtggtgttnctcgcaagaaangttagtaaaatccggtttggaaccacccacagcattagtgtcgcgtatcaactgttccatccctttaccccacaactaaggccccttattattctataagctaaatgtcaccaatttgaaacgatcgtaacaggtttaaggatgaaaatattatgtttttaacgagcatgatgtaagtggtgagaataaaaacactaatgacgtgggcacggcgcccaagtatacattatactgttgtagaaaccaacaaacaacaaaagagatcgaagaggcgatatatttaattccacggggatgagaggtaccacacggatcggccgtgcgtactgacccgcgctggagg

SEQ ID NO: 26712 - DNA, 437 bp, Macaca Mulatta
tgaagggtggggagcctggacccctctctgaagagggcgcagcctgggaagggcggctctgctggggcctgcggtgcgagtagagtgcccaggagagggtctgaggggtgggttggggtcaggacattcctgcaaaagaagcagctggaatccatgggactggggggagcctgtttgggggctctggatggttgattcctaggaatcaagttcagcatcttctccgtggctgcagagctgcctgatgggcactagagggcgcgccacccccacactccctgggtctggcttcctcctgcaacctcactgtggtagagcctgtgcctgcctactagcgccccgggcttccgagagtttgggaatttctcaagagccaactggctcaggcttgggaaggctgactcctgccctcagctccgcctcatcagctatgtgaa

SEQ ID NO: 26713 - DNA, 882 bp, Macaca Mulatta
ggggtttggcttccgcctaccccgcccgggctgcaagaccggaagcgctctgctctacctggattctgctcctctgggttggaacccgggtgctgccaagatgccggcttaccactcttctctcatggatcctgacaccaaactcatcggaaacatggcactgttacctattagaagtcaattcaaaggacctgcacccagagagacaaaagatacagatattgtggatgaagccatctattacttcaaggccaatgtcttcttcaaaaactatgaaattaagaatgaagctgataggaccttgatatatataactctctatatttctgaatgtctgaagaaactccaaaagtgcaattccaaaagccaaggtgagaaagaaatgtatacattgggaatcactaattttcccattcctggagagcctggttttccacttaacgcaatttatgccaaacctgcaaacaaacaggaagatgaagtgatgagagcctatttacaacagctaaggcaagagactggactgagactttgtgagaaagtttttgaccctcagaatgataaacctagcaagtggtggacttgctttgtgaagagacagttcatgaacaagagtctttcaggacctggacagtgaagggaacccgggcagccaccgtctccagagccctgggcagcattttccagcgagatgtacacaaatcttttgcctttatttcgtaaagttttatacagaagagagaagagcatgtctttacttgaaaaactcttgatcagtaatttgggtgggagacaagaaaatgggttatcaagggtgatttgaagttttctgcagcattaagctggcacttaataagaataagtcataataaagaaatttct

SEQ ID NO: 26714 - DNA, 3184 bp, Macaca Mulatta
  misc_feature (1)...(3184): n = A,T,C or G
gtttatgacacctctgatggcaccttacttcagcccctcaagggacacaaagacactgtgtactgtgtggcatatgcgaaggatggnnnnnnnnnnnnnnnnnnnnnnnnnnnnnnnnnnnnnnnnnnnnnnnnnnnnnnnnnnnnnnnnnnnnnnnnnnnnnnnnnnnnnnnnnnnnnnnnnnnnnnnnnnnnnnnnnnnnnnnnnnnnnnnnnnnnnnnnnnnnnnnnnnnnnnnnnnnnnnnnnnnnnnnnnnnnnnnnnnnnnnnnnnnnnnnnnnnnnnnnnnnnnnnnnnnnnnnnnnnnnnnnnnnnnnnnnnnnnnnnnnnnnnnnnnnnnnnnnnnnnnnnnnnnnnnnnnnnnnnnnnnnnnnnnnnnnnnnnnnnnnnnnnnnnnnnnnnnnnnnnnnnnnnnnnnnnnnnnnnnnnnnnnnnnnnnnnnnnnnnnnnnnnnnnnnnnnnnnnnnnnnnnnnnnnnnnnnnnnnnnnnnnnnnnnnnnnnnnnnnnnnnnnnnnnnnnnnnnnnnnnnnnnnnnnnnnnnnnnnnnnnnnnnnnnnnnnnnnnnnnnnnnnnnnnnnnnnnnnnnnnnnnnnnnnnnnnnnnnnnnnnnnnnnnnnnnnnnnnnnnnnnnnnnnnnnnnnnnnnnnnnnnnnnnnnnnnnnnnnnnnnnnnnnnnnnnnnnnnnnnnnnnnnnnnnnnnnnnnnnnnnnnnnnnnnnnnnnnnnnnnnnnnnnnnnnnnnnnnnnnnnnnnnnnnnnnnnnnnnnnnnnnnnnnnnnnnnnnnnnnnnnnnnnnnnnnnnnnnnnnnnnnnnnnnnnnnnnnnnnnnnnnnnnnnnnnnnnnnnnnnnnnnnnnnnnnnnnnnnnnnnnnnnnnnnnnnnnnnnnnnnnnnnnnnnnnnnnnnnnnnnnnnnnnnnnnnnnnnnnnnnnnnnnnnnnnnnnnnnnnnnnnnnnnnnnnnnnnnnnnnnnnnnnnnnnnnnnnnnnnnnnnnnnnnnnnnnnnnnnnnnnnnnnnnnnnnnnnnnnnnnnnnnnnnnnnnnnnnnnnnnnnnnnnnnnnnnnnnnnnnnnnnnnnnnnnnnnnnnnnnnnnnnnnnnnnnnnnnnnnnnnnnnnnnnnnnnnnnnnnnnnnnnnnnnnnnnnnnnnnnnnnnnnnnnnnnnnnnnnnnnnnnnnnnnnnnnnnnnnnnnnnnnnnnnnnnnnnnnnnnnnnnnnnnnnnnnnnnnnnnnnnnnnnnnnnnnnnnnnnnnnnnnnnnnnnnnnnnnnnnnnnnnnnnnnnnnnnnnnnnnnnnnnnnnnnnnnnnnnnnnnnnnnnnnnnnnnnnnnnnnnnnnnnnnnnnnnnnnnnnnnnnnnnnnnnnnnnnnnnnnnnnnnnnnnnnnnnnnnnnnnnnnnnnnnnnnnnnnnnnnnnnnnnnnnnnnnnnnnnnnnnnnnnnnnnnnnnnnnnnnnnnnnnnnnnnnnnnnnnnnnnnnnnnnnnnnnnnnnnnnnnnnnnnnnnnnnnnnnnnnnnnnnnnnnnnnnnnnnnnnnnnnnnnnnnnnnnnnnnnnnnnnnnnnnnnnnnnnnnnnnnnnnnnnnnnnnnnnnnnnnnnnnnnnnnnnnnnnnnnnnnnnnnnnnnnnnnnnnnnnnnnnnnnnnnnnnnnnnnnnnnnnnnnnnnnnnnnnnnnnnnnnnnnnnnnnnnnnnnnnnnnnnnnnnnnnnnnnnnnnnnnnnnnnnnnnnnnnnnnnnnnnnnnnnnnnnnnnnnnnnnnnnnnnnnnnnnnnnnnnnnnnnnnnnnnnnnnnnnnnnnnnnnnnnnnnnnnnnnnnnnnnnnnnnnnnnnnnnnnnnnnnnnnnnnnnnnnnnnnnnnnnnnnnnnnnnnnnnnnnnnnnnnnnnnnnnnnnnnnnnnnnnnnnnnnnnnnnnnnnnnnnnnnnnnnnnnnnnnnnnnnnnnnnnnnnnnnnnnnnnnnnnnnnnnnnnnnnnnnnnnnnnnnnnnnnnnnnnnnnnnnnnnnnnnnnnnnnnnnnnnnnnnnnnnnnnnnnnnnnnnnnnnnnnnnnnnnnnnnnnnnnnnnnnnnnnnnnnnnnnnnnnnnnnnnnnnnnnnnnnnnnnnnnnnnnnnnnnnnnnnnnnnnnnnnnnnnnnnnnnnnnnnnnnnnnnnnnnnnnnnnnnnnnnnnnnnnnnnnnnnnnnnnnnnnnnnnnnnnnnnnnnnnnnnnnnnnnnnnnnnnnnnnnnnnnnnnnnnnnnnnnnnnnnnnnnnnnnnnnnnnnnnnnnnnnnnnnnnnnnnnnnnnnnnnnnnnnnnnnnnnnnnnnnnnnnnnnnnnnnnnnnnnnnnnnnnnnnnnnnnnnnnnnnnnnnnnnnnnnnnnnnnnnnnnnnnnnnnnnnnnnnnnnnnnnnnnnnnnnnnnnnnnnnnnnnnnnnnnnnnnnnnnnnnnnnnnnnnnnnnnnnnnnnnnnnnnnnnnnnnnnnnnnnnnnnnnnnnnnnnnnnnnnnnnnnnnnnnnnnnnnnnnnnnnnnnnnnnnnnnnnnnnnnnnnnnnnnnnnnnnnnnnnnnnnnnnnnnnnnnnnnnnnnnnnnnnnnnnnnnnnnnnnnnnnnnnnnnnnnnnnnnnnnnnnnnngatccattcagtgtccatcgtcctgaaactcttttcaacatctccaggttcctgctgcacagcctgcccaaggacacccccttgggcatctctaaagtaaaatactcttcaccttggccaagcagagcaaggccctcggtgcctacaggctggaccggnnnnnnnnnnnnnnnnnnnnnnnnnnnnnnnnnnnnnnnnnnnnnnnnnnnnnnnnnnnnnnnnnnnnnnnnnnnnnnnnnnnnnnnnnnnnnnnnnnnnnnnnnnnnnnnnnnnnnnnnnnnnnnnnnnnnnnnnnnnnnnnnnnnnnnnnnnnnnnnnnnnnnnnnnnnnnnnnnnnnnnnnnnnnnnnnnnnnnnnnnnnnnnnnnnnnnnnnnnnnnnnnnnnnnnnnnnnnnnnnnnnnnnnnnnnnnnnnnnnnnnnnnnnnnnnnnnnnnnnnnnnnnnnnnnnnnnnnnnnnnnnnnnnnnnnnnnnnnnnnnnnnnnnnnnnnnnnnnnnnnnngctcccagattctgcggctagtggagaccaaggactccatgggagatgaggacccattcacagctaagctgagctttga

SEQ ID NO: 26715 - DNA, 873 bp, Macaca Mulatta
gaggaagagaatgccctctgggaagaggagagggccttctgggtggagagcaatggccacattgccagggagcagatgctcgaagagctccacaacgccaacagagggcggcgctcgctggccttctcccgaggcagggcgtagccagcatgcaggtgcagggccctgtggtccagactcccctgggttgggattcaagtccagggtgaactcatgtgctggagaaaaaacatactcattggtctccttgttttgaaagatccaataaagtcctgagacaaggtttggaaatccaacttctttgaggaaggctggctgcatttttttccaggttttgtgatgctccaaggtcatattcccatctctgggccacagagctcggccccaggcagctcccagtgactccagcctgtgcgggtgtttggaagtagagacgctttggctctctttaaaagagtcaaaatggggagaagaggcttgggctgtgccagctagcgacacacagggacggagaggggctgagataccactgtctctgccacactgtagggaagtcacttcttcacttggggcagtcttggaggcctggagagggctgacagcattccagtaaaggcctccgtgctgttaactctttgtttgtgcctcttcctcccctggtaaggcatgtggaggacacaggcagaatccctgcaccacccactcactggtagttccgagttccaccaaacgtctcagcagccctactcaggcagcatgaaaatggggccttggcgtgggggctgagactcaagagtgcggcccccaaaagcactgacgcccctgacgagggagtcaagctgacccatggagtggcctgggcaatgcacgggc

SEQ ID NO: 26716 - DNA, 574 bp, Macaca Mulatta
  misc_feature (1)...(574): n = A,T,C or G
agggacaccttttctcttattgtctaaatctttattccagaaaggagaaactgtgaagaagatgcgtgaggagnagagtggtgcgaggatcaacatctcagagggaaactgcccagagaggattgtgaccatcacaggccccacagacgccatcttcaaggcctttgccatgatcgcatacaagtttgaggaggnnnnnnnnnnnnnnnnnnnnnnnnnnnnnnnnnnnnnnnnnnnnnnnnnnnnnnnnnnnnnnnnnnnnnnnnnnnnnnnnnnnnnnnnnnnnnnnnnnnnnnnnnnnnnnnnnnnnnnnnnnnnnnnnnnnnnnnnnnnnnnnnnnnnnnnnnnnnnnnnnnnnnnnnnnnnnnnnnnnnnnnnnnnnnnnnnnnnnnnnnnnnnnnnnnnnnnnnnnnnnnnnnnnnnnnnnnnnnnnnnnnnnnnnnnnnnnnnnnaggcctacacaatccagggacagtatgccatccctcacccggatnttgaccaagctccaccagttggccatgcagcaaaccccctttcctcccctcggacagaccaaccccgctttccccgg

SEQ ID NO: 26717 - DNA, 146 bp, Macaca Mulatta
gatctgaataatgtggctgctacagcccgggtgctagttattggagctactaatcgaccagactcattagatcctgctttgagacgtgcaggaaggttcgaccgagaaatatgcctaggtatcccaggtgaagcatccagagaaag

SEQ ID NO: 26718 - DNA, 5325 bp, Macaca Mulatta
  misc_feature (1)...(5325): n = A,T,C or G
tcgaagaccggctcttccaccagttcaagcgcttcggcgagatcagcctccgcctgtcgcacacgcctgagctgggccgtgtggcctacgtgaacttccggcacccacaagacgcgcgcgaggcccgccagcacgccctggcccgccagctgctgctctacgaccgcccgctcaaggtagagcccgtgtacctgcgcggcggcggcgggagcagtcggcgaagtagcagcagcagcgccgccgcttccacgcctcccccagggccgcccgcgcccaccgacccgctcggctaccttccgctgcacggaggctaccagtacaagcagcgcnnnnnnnnnnnnnnnnnnnnnnnnnnnnnnnnnnnnnnnnnnnnnnnnnnnnnnnnnnnnnnnnnnnnnnnnnnnnnnnnnnnnnnnnnnnnntgggactgtcccgagagcgggccctggactactacgggctgtacgacgaccgtgggcgcccctatggctacccannnnnnnnnnnnnnnnnnnnnnnnnnnnnnnnnnnnnnnnnnnnnnnnnnnnnnnnnnnnnnnnnnnnnnnnnnnnnnnnnnnnnnnnnnnnnnnnnnnnnnnnnnnnnnnnnnnnnnnnnnnnnnnnnnnnnnnnnnnnnnnnnnnnnnnnnnnnnnnnnnnnnnnnnnnnnnnnnnnnnnnnnnnnnnnnnnnnnnnnnnnnnnnnnnnnnnnnnnnnnnnnnnnnnnnnnnnnnnnnnnnnnnnnnnnnnnnnnnnnnnnnnnnnnnnnnnnnnnnnnnnnnnnnnnnnnnnnnnnnnnnnnnnnnnnnnnnnnnnnnnnnnnnnnnnnnnnnnnnnnnnnnnnnnnnnnnnnnnnnnnnnnnnnnnnnnnnnnnnnnnnnnnnnnnnnnnnnnnnnnnnnnnnnnnnnnnnnnnnnnnnnnnnnnnnnnnnnnnnnnnnnnnnnnnnnnnnnnnnnnnnnnnnnnnnnnnnnnnnnnnnnnnnnnnnnnnnnnnnnnnnnnnnnnnnnnnnnnnnnnnnnnnnnnnnnnnnnnnnnnnnnnnnnnnnnnnnnnnnnnnnnnnnnnnnnnnnnnnnnnnnnnnnnnnnnnnnnnnnnnnnnnnnnnnnnnnnnnnnnnnnnnnnnnnnnnnnnnnnnnnnnnnnnnnnnnnnnnnnnnnnnnnnnnnnnnnnnnnnnnnnnnnnnnnnnnnnnnnnnnnnnnnnnnnnnnnnnnnnnnnnnnnnnnnnnnnnnnnnnnnnnnnnnnnnnnnnnnnnnnnnnnnnnnnnnnnnnnnnnnnnnnnnnnnnnnnnnnnnnnnnnnnnnnnnnnnnnnnnnnnnnnnnnnnnnnnnnnnnnnnnnnnnnnnnnnnnnnnnnnnnnnnnnnnnnnnnnnnnnnnnnnnnnnnnnnnnnnnnnnnnnnnnnnnnnnnnnnnnnnnnnnnnnnnnnnnnnnnnnnnnnnnnnnnnnnnnnnnnnnnnnnnnnnnnnnnnnnnnnnnnnnnnnnnnnnnnnnnnnnnnnnnnnnnnnnnnnnnnnnnnnnnnnnnnnnnnnnnnnnnnnnnnnnnnnnnnnnnnnnnnnnnnnnnnnnnnnnnnnnnnnnnnnnnnnnnnnnnnnnnnnnnnnnnnnnnnnnnnnnnnnnnnnnnnnnnnnnnnnnnnnnnnnnnnnnnnnnnnnnnnnnnnnnnnnnnnnnnnnnnnnnnnnnnnnnnnnnnnnnnnnnnnnnnnnnnnnnnnnnnnnnnnnnnnnnnnnnnnnnnnnnnnnnnnnnnnnnnnnnnnnnnnnnnnnnnnnnnnnnnnnnnnnnnnnnnnnnnnnnnnnnnnnnnnnnnnnnnnnnnnnnnnnnnnnnnnnnnnnnnnnnnnnnnnnnnnnnnnnnnnnnnnnnnnnnnnnnnnnnnnnnnnnnnnnnnnnnnnnnnnnnnnnnnnnnnnnnnnnnnnnnnnnnnnnnnnnnnnnnnnnnnnnnnnnnnnnnnnnnnnnnnnnnnnnnnnnnnnnnnnnnnnnnnnnnnnnnnnnnnnnnnnnnnnnnnnnnnnnnnnnnnnnnnnnnnnnnnnnnnnnnnnnnnnnnnnnnnnnnnnnnnnnnnnnnnnnnnnnnnnnnnnnnnnnnnnnnnnnnnnnnnnnnnnnnnnnnnnnnnnnnnnnnnnnnnnnnnnnnnnnnnnnnnnnnnnnnnnnnnnnnnnnnnnnnnnnnnnnnnnnnnnnnnnnnnnnnnnnnnnnnnnnnnnnnnnnnnnnnnnnnnnnnnnnnnnnnnnnnnnnnnnnnnnnnnnnnnnnnnnnnnnnnnnnnnnnnnnnnnnnnnnnnnnnnnnnnnnnnnnnnnnnnnnnnnnnnnnnnnnnnnnnnnnnnnnnnnnnnnnnnnnnnnnnnnnnnnnnnnnnnnnnnnnnnnnnnnnnnnnnnnnnnnnnnnnnnnnnnnnnnnnnnnnnnnnnnnnnnnnnnnnnnnnnnnnnnnnnnnnnnnnnnnnnnnnnnnnnnnnnnnnnnnnnnnnnnnnnnnnnnnnnnnnnnnnnnnnnnnnnnnnnnnnnnnnnnnnnnnnnnnnnnnnnnnnnnnnnnnnnnnnnnnnnnnnnnnnnnnnnnnnnnnnnnnnnnnnnnnnnnnnnnnnnnnnnnnnnnnnnnnnnnnnnnnnnnnnnnnnnnnnnnnnnnnnnnnnnnnnnnnnnnnnnnnnnnnnnnnnnnnnnnnnnnnnnnnnnnnnnnnnnnnnnnnnnnnnnnnnnnnnnnnnnnnnnnnnnnnnnnnnnnnnnnnnnnnnnnnnnnnnnnnnnnnnnnnnnnnnnnnnnnnnnnnnnnnnnnnnnnnnnnnnnnnnnnnnnnnnnnnnnnnnnnnnnnnnnnnnnnnnnnnnnnnnnnnnnnnnnnnnnnnnnnnnnnnnnnnnnnnnnnnnnnnnnnnnnnnnnnnnnnnnnnnnnnnnnnnnnnnnnnnnnnnnnnnnnnnnnnnnnnnnnnnnnnnnnnnnnnnnnnnnnnnnnnnnnnnnnnnnnnnnnnnnnnnnnnnnnnnnnnnnnnnnnnnnnnnnnnnnnnnnnnnnnnnnnnnnnnnnnnnnnnnnnnnnnnnnnnnnnnnnnnnnnnnnnnnnnnnnnnnnnnnnnnnnnnnnnnnnnnnnnnnnnnnnnnnnnnnnnnnnnnnnnnnnnnnnnnnnnnnnnnnnnnnnnnnnnnnnnnnnnnnnnnnnnnnnnnnnnnnnnnnnnnnnnnnnnnnnnnnnnnnnnnnnnnnnnnnnnnnnnnnnnnnnnnnnnnnnnnnnnnnnnnnnnnnnnnnnnnnnnnnnnnnnnnnnnnnnnnnnnnnnnnnnnnnnnnnnnnnnnnnnnnnnnnnnnnnnnnnnnnnnnnnnnnnnnnnnnnnnnnnnnnnnnnnnnnnnnnnnnnnnnnnnnnnnnnnnnnnnnnnnnnnnnnnnnnnnnnnnnnnnnnnnnnnnnnnnnnnnnnnnnnnnnnnnnnnnnnnnnnnnnnnnnnnnnnnnnnnnnnnnnnnnnnnnnnnnnnnnnnnnnnnnnnnnnnnnnnnnnnnnnnnnnnnnnnnnnnnnnnnnnnnnnnnnnnnnnnnnnnnnnnnnnnnnnnnnnnnnnnnnnnnnnnnnnnnnnnnnnnnnnnnnnnnnnnnnnnnnnnnnnnnnnnnnnnnnnnnnnnnnnnnnnnnnnnnnnnnnnnnnnnnnnnnnnnnnnnnnnnnnnnnnnnnnnnnnnnnnnnnnnnnnnnnnnnnnnnnnnnnnnnnnnnnnnnnnnnnnnnnnnnnnnnnnnnnnnnnnnnnnnnnnnnnnnnnnnnnnnnnnnnnnnnnnnnnnnnnnnnnnnnnnnnnnnnnnnnnnnnnnnnnnnnnnnnnnnnnnnnnnnnnnnnnnnnnnnnnnnnnnnnnnnnnnnnnnnnnnnnnnnnnnnnnnnnnnnnnnnnnnnnnnnnnnnnnnnnnnnnnnnnnnnnnnnnnnnnnnnnnnnnnnnnnnnnnnnnnnnnnnnnnnnnnnnnnnnnnnnnnnnnnnnnnnnnnnnnnnnnnnnnnnnnnnnnnnnnnnnnnnnnnnnnnnnnnnnnnnnnnnnnnnnnnnnnnnnnnnnnnnnnnnnnnnnnnnnnnnnnnnnnnnnnnnnnnnnnnnnnnnnnnnnnnnnnnnnnnnnnnnnnnnnnnnnnnnnnnnnnnnnnnnnnnnnnnnnnnnnnnnnnnnnnnnnnnnnnnnnnnnnnnnnnnnnnnnnnnnnnnnnnnnnnnnnnnnnnnnnnnnnnnnnnnnnnnnnnnnnnnnnnnnnnnnnnnnnnnnnnnnnnnnnnnnnnnnnnnnnnnnnnnnnnnnnnnnnnnnnnnnnnnnnnnnnnnnnnnnnnnnnnnnnnnnnnnnnnnnnnnnnnnnnnnnnnnnnnnnnnnnnnnnnnnnnnnnnnnnnnnnnnnnnnnnnnnnnnnnnnnnnnnnnnnnnnnnnnnnnnnnnnnnnnnnnnnnnnnnnnnnnnnnnnnnnnnnnnnnnnnnnnnnnnnnnnnnnnnnnnnnnnnnnnnnnnnnnnnnnnnnnnnnnnnnnnnnnnnnnnnnnnnnnnnnnnnnnnnnnnnnnnnnnnnnnnnnnnnnnnnnnnnnnnnnnnnnnnnnnnnnnnnnnnnnnnnnnnnnnnnnnnnnnnnnnnnnnnnnnnnnnnnnnnnnnnnnnnnnnnnnnnnnnnnnnnnnnnnnnnnnnnnnnnnnnnnnnnnnnnnnnnnnnnnnnnnnnnnncacccagggttcaggtcctgtctaaggtgttgcttaaagacaaaaaggcaacatttgcctcaccggtggtgtgccactgttctcatgctgcctcctatgtgactccgattttgagccctggtagaataaggaagagagctgatgcttccttagccccttagcacatgttcctaagggtgtgttgtcaagccaacccgaattctgcctccctattatagttcctatctcccccttagagacctgtgggtgctcccagcagagttgagactggctccactgagttaatgactagaatatagtgctttcactacttcttgattgttaacctgttttcttctgatgctggtcagtaccagcagtcagactattccactggttaagtgttaactaccattaaagtgaggcatgaagcaaaagagctgagtcctctgctctccagaggactaagaaatacctgtgtgacacagacccacttcagtgtgtacagcaaattctatagtgctcctaagcccagcagggctttacctgcccctggagagttttagccatcttgtgtttcttgtttacttcacaaatttgtcccctcggctctctgttaagggagagaagtcactttagctggataatacctatgtaacaaactcagcagctgttcttt

SEQ ID NO: 26719 - DNA, 123 bp, Macaca Mulatta
tccaacgtggaccagtcggccctctcttgctccctgtccgccgacggcatgctgaccttctctggccccaagatccagactggcctagacgccacccatgagcgagccattcccgtggcgcgg

SEQ ID NO: 26720 - DNA, 513 bp, Macaca Mulatta
  misc_feature (1)...(513): n = A,T,C or G
gagcacacccgcctcgagtccaggggagctgtccttccgcaagggcgacgtggtcaccatnnnnnnnnnnnnnnagaacaagagctggtaccgcgtcaagcaccacaccagcgggcaggaggggctgctggcagctggggcgctgcgggagcgggaggccctctccacagaccccaagatcagcctcataccgtgngtggttccatgggaagatctcgggtcaggaggctgtccagcagctgcagccacctgaggatgggctgttcctggtgcgggagtccgcgcgccatcctggcgactacgtcctgtgcgtgagctttggccgtgacgtcatccactaccgcgtgatgcaccgcgacggccacctcaccatcgatgaggccgtgttcttctgcaacctcatggacatggtggagnagcattacagcaaggacaagggcgctatctgcaccaagctggtgagaccaaagcggaaacacgggaccaagtctgccgaggaggagctggccaggg

SEQ ID NO: 26721 - DNA, 109 bp, Macaca Mulatta
ggacgagaagctcactgtgacccaggacctccctgtgaatgatggaaaacctcacatcgtccacttccagtatgaggtcaccgaggtgaaggtctcttcttgggatgca

SEQ ID NO: 26722 - DNA, 1410 bp, Macaca Mulatta
atggcgggcgagaaccaccagtggcagggcagcatcctctacaacatgcttatgagcgcgaagcaaacgcgcgcggctcctgaggctccagagacgcggctggtggatcagtgctggggctgttcgtgcggcgatgagcccggggtgggcagagaggggctgctgggcgggcggaacgtgtcgctcctgtaccgctgctgcttttgcggtaaagaccacccacggcagggcagcatcctctacagcatgctcacgaacgcaaagcaaacgtacgcggcaccgaaggcgcccgaggcgacgctgggtccgtgctggggctgttcctgcggctctgatcccggggtgggcagaacggggcttccgggtgggcggcccgtggcactcctgtaccgctgctgcttttgtggtgaagaccacccgcggcagggcagcatcctctacagcttgctcactagcgcaaagcaaacgcacgtggctccggcagcgcccgaggcacggccagggggcgcgtggtgggaccgctcctacttcgcgcagaggccagggggtagagaggcgctaccaggcgggcgggccatggggcttctgtaccgctgctgcttttgcggtgaagaccacccgcagcagggcagcaccctctactgcatgcccacgagcacaaatcaagcgcaggcggctccggaggagcggccgagggccccctggtgggacacctcctctggtgcgctgcggccggtggcgctcaagaatccacaggtggtctgcgaggcagcctcagcgggcctgttgaagacgctgcgctttgtcaagtacttgccctgcttccaggtgctgcccctggaccagcagctggtgctggtgcgcaactgctgggcgtccctgctcatgcttgagctggcccaggaccgcttgcagttcgagactgtggaagtctcggagcccagcatgctgcagaagatcctcaccaccaggcggcgggagaccgggggcgacgagccactgcccgtgcccacgctgcagcaccatttggcaccgccggcggaggccaggaaggtgccctccgcctcccaggtccaagccatcaagtgctttctttccaagtgctggagtctgaacatcagtaccaaggagtacgcctacctcaaggggaccgtgctctttaacccggacgtgccgggcctgcagtgcgtgaagtacattcagggactccagtggggaactcagcagatactcagtgaacacaccaggatgacgcaccaagggccccatgacagattcatcgaactgaatagtacccttttcctgctgagattcatcaatgccaatgtcattgctgaactgttcttcaggcccatcattggcacagtcagcatggatgatatgatgctggagatgctctgtacaaagttg

SEQ ID NO: 26723 - DNA, 2519 bp, Macaca Mulatta
  misc_feature (1)...(2519): n = A,T,C or G
cagcataaccagtgtgcagcgttcagacaatgggtcgtatatctgtaagatgaaaataaacaatgaagagatcgtgtctgatcccatctacatcgaagtgcaagnnnnnnnnnnnnnnnnnnnnnnnnnnnnnnnnnnnnnnnnnnnnnnnnnnnnnnnnnnnnnnnnnnnnnnnnnnnnnnnnnnnnnnnnnnnnnnnnnnnnnnnnnnnnnnnnnnnnnnnnnnnnnnnnnnnnnnnnnnnnnnnnnnnnnnnnnnnnnnnnnnnnnnnnnnnnnnnnnnnnnnnnnnnnnnnnnnnnnnnnnnnnnnnnnnnnnnnnnnnnnnnnnnnnnnnnnnnnnnnnnnnnnnnnnnnnnnnnnnnnnnnnnnnnnnnnnnnnnnnnnnnnnnnnnnnnnnnnnnnnnnnnnnnnnnnnnnnnnnnnnnnnnnnnnnnnnnnnnnnnnnnnnnnnnnnnnnnnnnnnnnnnnnnnnnnnnnnnnnnnnnnnnnnnnnnnnnnnnnnnnnnnnnnnnnnnnnnnnnnnnnnnnnnnnnnnnnnnnnnnnnnnnnnnnnnnnnnnnnnnnnnnnnnnnnnnnnnnnnnnnnnnnnnnnnnnnnnnnnnnnnnnnnnnnnnnnnnnnnnnnnnnnnnnnnnnnnnnnnnnnnnnnnnnnnnnnnnnnnnnnnnnnnnnnnnnnnnnnnnnnnnnnnnnnnnnnnnnnnnnnnnnnnnnnnnnnnnnnnnnnnnnnnnnnnnnnnnnnnnnnnnnnnnnnnnnnnnnnnnnnnnnnnnnnnnnnnnnnnnnnnnnnnnnnnnnnnnnnnnnnnnnnnnnnnnnnnnnnnnnnnnnnnnnnnnnnnnnnnnnnnnnnnnnnnnnnnnnnnnnnnnnnnnnnnnnnnnnnnnnnnnnnnnnnnnnnnnnnnnnnnnnnnnnnnnnnnnnnnnnnnnnnnnnnnnnnnnnnnnnnnnnnnnnnnnnnnnnnnnnnnnnnnnnnnnnnnnnnnnnnnnnnnnnnnnnnnnnnnnnnnnnnnnnnnnnnnnnnnnnnnnnnnnnnnnnnnnnnnnnnnnnnnnnnnnnnnnnnnnnnnnnnnnnnnnnnnnnnnnnnnnnnnnnnnnnnnnnnnnnnnnnnnnnnnnnnnnnnnnnnnnnnnnnnnnnnnnnnnnnnnnnnnnnnnnnnnnnnnnnnnnnnnnnnnnnnnnnnnnnnnnnnnnnnnnnnnnnnnnnnnnnnnnnnnnnnnnnnnnnnnnnnnnnnnnnnnnnnnnnnnnnnnnnnnnnnnnnnnnnnnnnnnnnnnnnnnnnnnnnnnnnnnnnnnnnnnnnnnnnnnnnnnnnnnnnnnnnnnnnnnnnnnnnnnnnnnnnnnnnnnnnnnnnnnnnnnnnnnnnnnnnnnnnnnnnnnnnnnnnnnnnnnnnnnnnnnnnnnnnnnnnnnnnnnnnnnnnnnnnnnnnnnnnnnnnnnnnnnnnnnnnnnnnnnnnnnnnnnnnnnnnnnnnnnnnnnnnnnnnnnnnnnnnnnnnnnnnnnnnnnnnnnnnnnnnnnnnnnnnnnnnnnnnnnnnnnnnnnnnnnnnnnnnnnnnnnnnnnnnnnnnnnnnnnnnnnnnnnnnnnnnnnnnnnnnnnnnnnnnnnnnnnnnnnnnnnnnnnnnnnnnnnnnnnnnnnnnnnnnnnnnnnnnnnnnnnnnnnnnnnnnnnnnnnnnnnnnnnnnnnnnnnnnnnnnnnnnnnnnnnnnnnnnnnnnnnnnnnnnnnnnnnnnnnnnnnnnnnnnnnnnnnnnnnnnnnnnnnnnnnnnnnnnnnnnnnnnnnnnnnnnnnnnnnnnnnnnnnnnnnnnnnnnnnnnnnnnnnnnnnnnnnnnnnnnnnnnnnnnnnnnnnnnnnnnnnnnnnnnnnnnnnnnnnnnnnnnnnnnnnnnnnnnnnnnnnnnnnnnnnnnnnnnnnnnnnnnnnnnnnnnnnnnnnnnnnnnnnnnnnnnnnnnnnnnnnnnnnnnnnnnnnnnnnnnnnnnnnnnnnnnnnnnnnnnnnnnnnnnnnnnnnnnnnnnnnnnnnnnnnnnnnnnnnnnnnnnnnnnnnnnnnnnnnnnnnnnnnnnnnnnnnnnnnnnnnnnnnnnnnnnnnnnnnnnnnnnnnnnnnnnnnnnnnnnnnnnnnnnnnnnnnnnnnnnnnnnnnnnnnnnnnnnnnnnnnnnnnnnnnnnnnnnnnnnnnnnnnnnnnnnnnnnnnnnnnnnnnnnnnnnnnnnnnnnnnnnnnnnnnnnnnnnnnnnnnnnnnnnnnnnnnnnnnnnnnnnnnnnnnnnnnnnnnnnnnnnnnnnnnnnnnnnnnnnnnnnnnnnnnnnnnnnnnnnnnnnnnnnnnnnnnnnnnnnnnnnnnnnnnnnnnnnnnnnnnnnnnnnnnnnnnnnnnnnnnnnnnnnnnnnnnnnnnnnnnnnnnnnnnnnnnnnatggggtcccctggtcccactcgagcacgctgcccttttgaagctcactgcctgatgaacttttgtttgctgacgactcctcagaaagctcagaagtcctgatgtga

SEQ ID NO: 26724 - DNA, 1030 bp, Macaca Mulatta
  misc_feature (1)...(1030): n = A,T,C or G
gcggcggcagcgggttcggttgcgcgtggcgcacggggtgggagcggagcccaggccgggagcaggcgccgccgccagngcgaccatggggaatgtgttggccgccagctnnnnnnnnnnnnnnnnnnnnnnnnnnnnnnnnnnnnnnnnnnnnnnnnnnnnnnnnnnnnnnnntcgccgccgggcttcacgctgccaccgctgggaggcggcctgggcgccggcaccagtacgagtcgaggttcggaacggacccnnnnnnnnnnnnnnnnnnnnnnnnnnnnnnnnnnnnnnnnnnnnnnnnnnnnnnnnnnnnnnnnnnnnnnnnnnnnnnnnnnnnnnnnnnnnnnnnnnnnnnnnnnnnnnnnnnnnnnnnnnnnnnnnnnnnnnnnnnnnnnnnnnnnnnnnnnnnnnnnnnnnnnnnnnnnnnnnnnnnnnnnnnnnnnnnnnnnnnnnnnnnnnnnnnnnnnnnnnnnnnnnnnnnnnnnnnnnnnnnnnnnnnnnnnnnnnnnnnnnnnnnnnnnnnnnnnnnnnnnnnnnnnnnnnnnnnnnnnnnnnnnnnnnnnnnnnnnnnnnnnnnnnnnnnnnnnnnnnnnnnnnnnnnnnnnnnnnnnnnnnnnnnnnnnnnnnnnnnnnnnnnnnnnnnnnnnnnnnnnnnnnnnnnnnnnnnnnnnnnnnnnnnnnnnnnnnnnnnnnnnnnnnnnnnnnnnnnnnnnnnnnnnnnnnnnnnnnnnnnnnnnnnnnnnnnnnnnnnnnnnnnnnnnnnnnnnnnnnnnnnnnnnnnnnnnnnnnnnnnnnnnnnnnnnnnnnnnnnnnnnnnnnnnnnnnnnnnnnnnnnnnnnnnnnnnnnnnnnnnnnnnnnnnnnnnnnnnnnnnnnnnnnnnnnnnnnnnnnnnnnnnnnnnnnnnnnnnnnnnnnnnnnnccagctgcaggtaggcgtggagtttgaggccagcacaaggatgcaggacaccagtgtctccttcgggtaccagctggacctgcccaaggccaacctcctcttcaaag

SEQ ID NO: 26725 - DNA, 1614 bp, Macaca Mulatta
  misc_feature (1)...(1614): n = A,T,C or G
ggagagaagagagtgcccggccagacccactgcgatgacacannnnnnnnnnnnnnnnnnnnnnnnnnnnnnnnnnnnnnnnnnnnnnnnnnnnnnnnnnnnnnnnnnnnnnnnnnnnnnnnnnnnnnnnnnnnnnnnnnnnnnnnnnnnnnnnnnnnnnnnnnnnnnnnnnnnnnnnnnnnnnnnnnnnnnnnnnnnnnnnnnnnnnnnnnnnnnnnnnnnnnnnnnnnnnnnnnnnnnnnnnnnnnnnnnnnnnnnnnnnnnnnnnnnnnnnnnnnnnnnnnnnnnnnnnnnnnnnnnnnnnnnnnnnnnnnnnnnnnnnnnnnnnnnnnnnnnnnnnnnnnnnnnnnnnnnnnnnnnnnnnnnnnnnnnnnnnnnnnnnnnnnnnnnnnnnnnnnnnnnnnnnnnnnnnnnnnnnnnnnnnnnnnnnnnnnnnnnnnnnnnnnnnnnnnnnnnnnnnnnnnnnnnnnnnnnnnnnnnnnnnnnnnnnnnnnnnnnnnnnnnnnnnnnnnnnnnnnnnnnnnnnnnnnnnnnnnnnnnnnnnnnnnnnnnnnnnnnnnnnnnnnnnnnnnnnnnnnnnnnnnnnnnnnnnnnnnnnnnnnnnnnnnnnnnnnnnnnnnnnnnnnnnnnnnnnnnnnnnnnnnnnnnnnnnnnnnnnnnnnnnnnnnnnnnnnnnnnnnnnnnnnnnnnnnnnnnnnnnnnnnnnnnnnnnnnnnnnnnnnnnnnnnnnnnnnnnnnnnnnnnnnnnnnnnnnnnnnnnnnnnnnnnnnnnnnnnnnnnnnnnnnnnnnnnnnnnnnnnnnnnnnnnnnnnnnnnnnnnnnnnnnnnnnnnnnnnnnnnnnnnnnnnnnnnnnnnnnnnnnnnnnnnnnnnnnnnnnnnnnnnnnnnnnnnnnnnnnnnnnnnnnnnnnnnnnnnnnnnnnnnnnnnnnnnnnnnnnnnnnnnnnnnnnnnnnnnnnnnnnnnnnnnnnnnnnnnnnnnnnnnnnnnnnnnnnnnnnnnnnnnnnnnnnnnnnnnnnnnnnnnnnnnnnnnnnnnnnnnnnnnnnnnnnnnnnnnnnnnnnnnnnnnnnnnnnnnnnnnnnnnnnnnnnnnnnnnnnnnnnnnnnnnnnnnnnnnnnnnnnnnnnnnnnnnnnnnnnnnctgcgctggctgagtcagcagactcgctggtccaagtcgtacttccgtgaatggctgtacaacgcgctctggtggcaccggcatcacgcctggatgacctacgaggcggtggtctcgggcctgttccccttcttcgtggcggccacggtgctgcgtctgttctatgcgggccgcccgtgggcgctgctgtgggtgctgctatgcgtgcagggcgtggcactggccaaggcggcctttgcggcctggctgcggggctgcctgcgtatggtgctgctgtcgctctacgcgcccctctacatgtgtggcctcctgcccgccaagttcctggcgctggtcaccatgaaccagagtggctggggcacctcgggccggcggaagctggccgctaattacgtccctctgctgcccctggcgctctgggcgctgaaactgcttgggggcctggtccgcagtgtggcacacgaggccagggcc

SEQ ID NO: 26726 - DNA, 225 bp, Macaca Mulatta
actgggttccaactcaatatgtggatgcaatcaaagacactgtgctggggaaatggcagtatttttgaaagcactttcacctctggcccaggagactgacccaaagtgaaggacattgccgggagaggcctgcagcatccctggatttcagagttctggaactttgttcacaaaaaatctatattcagtctgaggtgatgtggtgactgaagccagaggtgatgt

SEQ ID NO: 26727 - DNA, 1731 bp, Macaca Mulatta
  misc_feature (1)...(1731): n = A,T,C or G
tcatggctggctcaaaccgctctggggacctccgtgatgcccagaagtccatccctgtggggaccattctggccatcattacaacttccctcgtgtnnnnnnnnnnnnnnnnnnnnnnnnnnnnnnnnnnnnnnnnnnnnnnnnnnnnnnnnnnnnnnnnnnnnnnnnnnnnnnnnnnnnnnnnnnnnnnnnnnnnnnnnnnnnnnnnnnnnnnnnnnnnnnnnnnnnnnnnnnnnnnnnnnnnnnnnnnnnnnnnnnnnnnnnnnnnnnnnnnnnnnnnnnnnnnnnnnnnnnnnnnnnnnnnnnnnnnnnnnnnnnnnnnnnnnnnnnnnttggccacgggaaggtgaatggtgaacccacatgggcactcctcctgacggcactcatcgccgagctgggcatcctcatcgcctccctcgacatggtggcccccatcctatccatgtnnnnnnnnnnnnnnnnnnnnnnnnnnnnnnnnnnnnnnnnnnnnnnnnnnnnnnnnnnnnnnnnnnnnnnnnnnnnnnnnnnnnnnnnnnnnnnnnngggcgctgtccttcctgggcatgagcctctgcctggcccttatgtttgtctcctcctggtactatgccctggtggccatgctcatcgccggcatgatctacaaatacatcgagtaccaaggnnnnnnnnnnnnnnnnnnnnnnnnnnnnnnnnnnnnnnnnnnnnnnnnnnnnnnnnnnnnnnnnnnnnnnnnnnnnnnnnnnnnnnnnnnnnnnnnnnnnnnnnnnnnnnnnnnnnnnnnnnnnnnnnnnnnnnnnnnnnnnnnnnnnnnnnnnnnnnnnnnnnnnnnnnnnnnnnnnnnnnnnnnnnnnnnnnnnnnnnnnnnnnnnnnnnnnnnnnnnnnnnnnnnnnnnnnnnnnnnnnnnnnnnnnnnnnnnnnnnnnnnnnnnnnnnnnnnnnnnnnnnnnnnnnnnnnnnnnnnnnnnnnnnnnnnnnnnnnnnnnnnnnnnnnnnnnnnnnnnnnnnnnnnnnnnnnnnnnnnnnnnnnnnnnnnnnnnnnnnnnnnnnnnnnnnnnnnnnnnnnnnnnnnnnnnnnnnnnnnnnnnnnnnnnnnnnnnnnnnnnnnnnnnnnnnnnnnnnnnnnnnnnnnnnnnnnnnnnnnnnnnnnnnnnnnnnnnnnnnnnnnnnnnnnnnnnnnnnnnnnnnnnnnnnnnnnnnnnnnnnnnnnnnnnnnnnnnnnnnnnnnnnnnnnnnnnnnnnnnnnnnnnnnnnnnnnnnnnnnnnnnnnnnnnnnnnnnnnnnnnnnnnnnnnnnnnnnnnnnnnnnnnnnnnnnnnnnnnnnnnnnnnnnnnnnnnnnnnnnnnnnnnnnnnnnnnnnnnnnnnnnnnnnnnnnnnnnnnnnnnnnnnnnnnnnnnnnnnnnnnnnnnnnnnnnnnnnnnnnnnnnnnnnnnnnnnnnnnnnnnnnnnnnnnnnnnnnnnnnnnnnnnnnnnnnnnnnnnnnnnnnnnnnnnnnnnnnnnnnnnnnnnnnnnnnnnnnnnnnnnnnnnnnnnnnnnnnnnngcccagctggtcaaggatcggcactcggccctgcggctggagagcctgtactcagacgaggaagatgagtctgcagtgggggctgacaagatccagatgacatggaccagggacaagtacatgactgagacctgggaccccagccatgcccctgacaatttccgggagctggtacatattaagcc

SEQ ID NO: 26728 - DNA, 367 bp, Macaca Mulatta
  misc_feature (1)...(367): n = A,T,C or G
gcagttgagaaagattgggggtgggggctttggagaaatttacgatgccttggacatgctcaccagggagaatgttgcactgaaggtggaatcagatcaacaaccaaaacaagttctgaaaatggaggttgctgttttgaaaannnnnnnnnnnnnnnnnnnnnnnnnnnnnnnnnnnnnnnnnnnnnnnnnnnnnnnnnnnnnnnnnnnnnnnnnnnnnnnnncagggtcggaatctggcagatcttcgccgtagccagtcccgaggcacattcaccattagtactactctccggctgggtagacagattttggagtctattgaaagcattcattctgtggggttcttgcatcgagacatcaaacc

SEQ ID NO: 26729 - DNA, 687 bp, Macaca Mulatta
  misc_feature (1)...(687): n = A,T,C or G
gcttttgataaactgtagtgtagcattattacacatccgattatgccttattatatacgaagagtaaagttaccatgttatactgttatgtcctaaaattcaaatcactatttgagaaaccctcaaattggtgctttcattatataatgatacatttagacaaaaccccaaaccaagccatttgaaacaagattctctccattgcagtttgtagcaatgttatttctgtgtatatcatgagaaggctaaatatcagtgttaatttcttgtttgaatccatgaaatcgtgcctgtaaagcccaaacgtttgtaacaaactccctaataaatttagagaaagtcactctgttaccatttcatttattttagttttatttgaggaattaagaccagaagttttgctcatgtctttttcacttagaaatcttagtacttagtttgtctctctgccatcatttcaaggtgttcacttctgttaatcacagatgatccatccttgtgttgtgctgcttgactaaaagcactgannnnnnnnnnnnnnnnnnnnnngaggataggatacagggtggcttttcagtctagtaaacaggaggggagagattgggtgggtgcgggtgtgtctgcatgtctcaaatatagcacatgcccatttttttatggtacgaggttagggcttagtaaatgtat

SEQ ID NO: 26730 - DNA, 1275 bp, Macaca Mulatta
  misc_feature (1)...(1275): n = A,T,C or G
accccagaacctcatagcacagagccagtcgggaacaggaaagacagcggcattcgtgttggcaatgttaagcagagttaatgccttggaattgttcccacannnnnnnnnnnnnnnnnnnnnnnnnnnnnnnnnnnnnnnnnnnnnnnnnnnnnnnnnnnnnnnnnnnnnnnnnnnnnnnnnnnnnnnnnnnnnnnnnnnnnnnnnnnnnnnnnnnnnnnnnnnnnnnnnnnnnnnnnnnnnnnnnnnnnnnnnnnnnnnnnnnnnnnnnnnnnnnnnnnnnnnnnnnnnnnnnnnnnnnnnnnnnnnnnnnnnnnnnnnnnnnnnnnnnnnnnnnnnnnnnnnnnnnnnnnnnnnnnnnnnnnnnnnnnnnnnnnnnnnnnnnnnnnnnnngagctctgccctccgaatgccaaatgctcctcttttcagcaacctttgaggactctgtgtggcacttcgctgaacgaatcatccctgaccctaatgttatcaagttacgcaaagaggagcttaccctgaacaacatccggcaatattacgtgttgtgtgagcacaggaaagacaaataccaagctctgtgcaacatttatggcagcatcaccattggccaggccatcatcttctgccagnnnnnnnnnnnnnnnnnnnnnnnnnnnnnnnnnnnnnnnnnnnnnnnnnnnnnnnnnnnnnnnnnnnnnnnnnnnnnnnnnnnnnnnnnnnnnnnnnnnnnnnnnnnnnnnnnnnnnnnnnnnnnnnnnnnnnnnnnnnnnnnnnnnnnnnnnnnnnnnnnnnnnnnnnnnnnnnnnnnnnnnnnnnnnnnnnnnnnnnnnnnnnnnnnnnnnnnnnnnnnnnnnnnnnnnnnnnnnnnnnnnnnnnnnnnnnnnnnnnnnnnnnnnnnnnnnnnnnnnnnnnnnnnnnnnnnnnnnnnnnnnnnnnnnnnnnnnnnnnnnnnnnnnnnnnnnnnnnnnnnnnnnnnnnnnnncagcagtattaaacaactcaacgctgaagacatggatgaaattgaaaagattgactattgaagaaagaactttattgtttgtgcagtatcctagtttatgtgagaacatctcagtgggttttgaaggtagtttttttatgttgaggctttttcaacatgaaactgtcacagatggcaaaataaatgtcactgtacttagtgttaagacatgaggtctttttgaaaccaaattgatgtgaagcttgtgatccttttgaataaaaaaaaagcaagattatttcttattctaa

SEQ ID NO: 26731 - DNA, 178 bp, Macaca Mulatta
aggttgatgggaaaacaaatcctaaaatccagagcatctatttggaaaggtttccaatctttaaggcttgttttagtgctaatggggaagaagttttagccacgagtacccacagcaaggttctttatgtctatgacatgctagctggaaagttaattcctgtgcatcaattgagagg

SEQ ID NO: 26732 - DNA, 1096 bp, Macaca Mulatta
  misc_feature (1)...(1096): n = A,T,C or G
agtactcggggtagtgaaaagtaggagttggaacatggatagccgcttgcaggagatccgggagcggcagaagttacggcgacagctcctcgcgcagcagnnnnnnnnnnnnnnnnnnnnnnnnnnnnnnnnnnnnnnnnnnnnnnnnnnnnnnnnnnnnnnnnnnnnnnnnnnnnnnnnnnnnnnagggcttcctatgatacctctgctccaaatacgaaacgtaagtatctggatgaaggagagacagatgaagacaaaatgggagaanaaatgcaacaggaagaagaaaatttgccatatgaagaagagatttacaaagattctagtacttttcttaaggnagggaacacagagcttaaatccccataatgattactgccaacattttgtagacactggacatagacctcagaatttcatcagggatgtaggtnaggtttagctgacagatttgaagaatatcctaaactgagggagctcatcaggctaaaggatgagttaatagctaaatctaacactcctcctatgtangtacttacaagctgatatagaagcctttgacatcagagaactaacacccaaatttgatgtgattcttctggaaccccctttagaagaatattacagagaaactggtatcactgctaatgaaaagtgctggacttgggatgatattatgaagttagaaattgatgagattgcagcacctcgatcatttatttttctctggtgtggttctggggagggcctggaccttggaagagtnnnnnnnnnnnnnnnnnnnnnnnnnnnnnnnnnnnnnnnnnnnnnnnnnnnnnnnnnnnnnnnnnnnnnnnnnnnnnnnnnnnnnnnnnnnnnnnnnnnnnnnnnnnnnnnnnnnggaacactgcctcatggggatcaaaggaactgtgaagcgtagcacagatggggacttcattcatgctaatgttgacattgacttaattatcacagaagaacctgaaattggcaatatagaaaaacctgtagaaatttttcatataattgagcatttttgtcttggtagaagacgccttcatctatttggaagagatagtacaattcgaccagg

SEQ ID NO: 26733 - DNA, 639 bp, Macaca Mulatta
ggttagtgaagaaaaatgcaaagtagcaatgagaagggttatggagtaaaaatgaagtcagttggtatttaatcccaaagtgttgttctgatgatctaaaatttgacatggtagaccttgtaatttagaatcaagtgggtgagacggaaagaagtatgcctgcttaattacttaaactgtgtacttttgttttgacactgaatattttaaacagcaaataataaaataactaagcctttgaggaaagttttaaggataaattgaggaaactgattaacagagatagaaagagataactgaataaatattccctatgtagcaatagtggttagatgacctttgtctgaatgtaattaaactttgaagagttttagtgtccttaaagccaagtatatgctttaacatcaaatggaagtcaaattcctaatgcaaagatagagctaaactgtgcaatttaatggtaccttctttgctggatgtggcagaatccacaccagcttatcaatcaacacagctaattttagcctagatgcttttatctttcatatggcacacataagaaagtgtttttctactattaatattaaattaaaacctttaattttgtataataaattaaaactcagaataaacctgtga

SEQ ID NO: 26734 - DNA, 520 bp, Macaca Mulatta
  misc_feature (1)...(520): n = A,T,C or G
aacaataaaaccatatcctgctgatattgtagttcagttcaaggatgtatatgcactgatgggccaaaatgtgaccttagaatgttttgcacttggaaantcctgttccggatatccgatggcggaaggttctagaaccaatgccaagcactgctgagattagcacctctnnnnnnnnnnnnnnnnnnnnnnnnnnnnnnnnnnnnnnnnnnnnnnnnnnnnnnnnnnnnnnnnnnnnnnnnnnnnnnnnnnnnnnnnnnnnnnnnnnnnnnnnnnnnnnnnnnnnnnnnnnnnnnnnnnnnnnnnnnnnnnnnnnnnnnnnnnnnnnnnnnnnnnnnnnnnnnnnnnnnnnnnnnnnnnnnnnnnnnnnnnnnnnnnnnnnnnnnnnnnnnnnnnnnnnnnnnnngtatcataaaggggaattaagactgtatgatgtgacttttgaaaatgctggaatgtatcagtgcatagctgaaaacacatatggagccatttatgcaaatgctgagttgaagat

SEQ ID NO: 26735 - DNA, 724 bp, Macaca Mulatta
cggtcagtgtactgccctcctcccttatatctctgaccaacattggtcttttgtgaagtggccttgtacagactctcatttgctggctggacaaaaagatggaaatatatttgtataccactactcataagttattttaaagcgaaaacacaattttctgggtatatggggcctcttagtattttttggagttttaaatataaaggagaatatctgaatgacatttaaaataattacttgtatatgtccagacagacttattttttattctgatgatggtggcaccactgatcttggatgtacatttatgtttactttgagaaaaagggttttaggttgatttttgtaattccccacatttgtacatgtgcttttaaaggtgtacataaagcttcaaatggcaataaatatttatttttatacattctgcttggcatattattgtttcccattctttcaagatcacttgcagaagcaagaactaatcattatacaactaggatatttaatcaatagtgtttgcctagtaagtgtaaatttcagtccagttaacttactacactaatacgcaatatactttttgtgctatttgtaatactttatttttacatacatactaaaataatatgaaacctattaagatatccaaatttaggaatactcttattctttttcattctcatgcatccttcatgccagtgctgcattataactagagtcacct

SEQ ID NO: 26736 - DNA, 212 bp, Macaca Mulatta
acttcccttttcttggggtatggctgtctcagcacaatactcaacataactgcagaactgatgtggctcaggcaccctggttttaattccttgaggatctggcaattggcttacgcaaagggtcaccatttgaggtcctgccttactaattatgtgctgcccaacaactaaatttgtaatttgtttttctctagtttgagcagggtctgaat

SEQ ID NO: 26737 - DNA, 157 bp, Macaca Mulatta
  misc_feature (1)...(157): n = A,T,C or G
ttattgcatttctctctccactgtctctgatcttcctggccaaatttctcaagaaggcagacacaagagacagcagacaagcctgcctggngctgccagccttgccctggctctgaatggcgtctttaccaacacaataaagctgatcgtagggagg

SEQ ID NO: 26738 - DNA, 1593 bp, Macaca Mulatta
  misc_feature (1)...(1593): n = A,T,C or G
agtttgacttggtatgtgacgcggagacgaagaaggacactgcacatatcatgttcatggcaggaatcctgataggctctctcatcttcgggctcataactgacaannnnnnnnnnnnnnnnnnnnnnnnnnnnnnnnnnnnnnnnnnnnnnnnnnnnnnnnnnnnnnnnnnnnnnnnnnnnnnnnnnnnnnnnnnnnnnnnnnnnnnnnnnnnnnnnnnnnnnnnnnnnnnnnnnnnnnnnnnnnnnnnnnnnnnnnnnnnnnnnnnnnnnnnnnnnnnnnnnnnnnnnnnnnnnnnnnnnnnnnnnnnnnnnnnnnnnnnnnnnnnnnnnnnnnnnnnnnnnnnnnnnnnnnnnnnnnnnnnnnnnnnnnnnnnnnnnnnnnnnnnnnnnnnnnnnnnnnnnnnnnnnnnnnnnnnnnnnnnnnnnnnnnnnnnnnnnnnnnnnnnnnnnnnnnnnnnnnnnnnnnnnnnnnnnnnnnnnnnnnnnnnnnnnnnnnnnnnnnnnnnnnnnnnnnnnnnnnnnnnnnnnnnnnnnnnnnnnnnnnnnnnnnnnnnnnnnnnnnnnnnnnnnnnnnnnnnnnnnnnnnnnnnnnnnnnnnnnnnnnnnnnnnnnnnnnnnnnnnnnnnnnnnnnnnnnnnnnnnnnnnnnnnnnnnnnnnnnnnnnnnnnnnnnnnnnnnnnnnnnnnnnnnnnnnnnnnnnnnnnnnnnnnnnnnnnnnnnnnnnnnnnnnnnnnnnnnnnnnnnnnnnnnnnnnnnnnnnnnnnnnnnnnnnnnnnnnnnnnnnnnnnnnnnnnnnnnnnnnnnnnnnnnnnnnnnnnnnnnnnnnnnnnnnnnnnnnnnnnnnnnnnnnnnnnnnnnnnnnnnnnnnnnnnnnnnnnnnnnnnnnnnnnnnnnnnnnnnnnnnnnnnnnnnnnnnnnnnnnnnnnnnnnnnnnnnnnnnnnnnnnnnnnnnnnnnnnnnnnnnnnnnnnnnnnnnnnnnnnnnnnnnnnnnnnnnnnnnnnnnnnnnnnncagggcgacaggtctggggctggtgtttctggcctcggcgactggagccatcttgtccttgacaatcatcaaccagaccccctccttcctgcccatctttctctgctgtgtcttagccatcgtgcccttttccctctccttcctgctaccggaaacgcgagatcagcccctcttcgacagcctggaccactccccacagatnnnnnnnnnnnnnnnnnnnnnnnnnnnnnnnnnnnnnnnnnnnnnnnnnnnnnnnnnnnnnnnnnnnnnnnnnnnnnnnnnnnnnnnnnnnnnnnnnnnnnnnnnnnnnnnnnnnnnnnnnnnnnnnnnnnnnnnnnnnnnnnnnnnnnnnnnnnnnnnnnnnnnnnnnnnnnnnnnnnnnnnnnnnnnnnnnnnnnnnnnnnnnnnnnnnnnnnnnnnnnnnnnnnnnnnnnnnnnnnnnnnnnnnnnnnnnnnnnnnnnnnnnnnnnnnnnnnnnnnnnnnnnnnnnnnnnnnnnnnnnnnnnnnnnnnnnnnnnnnnnnnnccttctgcgggagctctgctgtgattcattccaataaaggtacaatgttggtctt

SEQ ID NO: 26739 - DNA, 190 bp, Macaca Mulatta
ggaatgattgctcaaagatcattcatcagaggaccaacacagtgccctttgacctggtgccccacgaggatggtgtggatgtggccgtgcgagtgctgaagcccctggactcagtggatctgggcgtagagactgtgtatgagaagttccacccctcgattcaaacgttcaccgatgtcatcggccacta

SEQ ID NO: 26740 - DNA, 1498 bp, Macaca Mulatta
  misc_feature (1)...(1498): n = A,T,C or G
gctcaccccggcgcccgctctctccctcgcccacagctgccggatagtgctgaagaggagggggcgttccccagaccatggcatccacggaagnnnnnnnnnnnnnnnnnnnnnnnnnnnnnnnnnnnnnnnnnnnnnnnnnnnnnnnnnnnnnnnnnnnnnnnnnnnnnnnnnnnnnnnnnnnnnnnnnnnnnnnnnnnnnnnnnnnnnnnnnnnnnnnnnnnnnnnnnnnnnnnnnnnnnnnnnnnnnnnnnnnnnnnnnnnnnnnnnnnnnnnnnnnnnnnnnnnnnnnnnnnnnnnnnnnnnnnnnnnnnnnnnnnnnnnnnnnnnnnnnnnnnnnnnnnnnnnnnnnnnnnnnnnnnnnnnnnnnnnnnnnnnnnnnncagggttgtcaggcctggatgctaaggctagtggccgcttgggcacaagagccatggtgtattacatgtccacaaccatcatcgccgcagtgctgggggtcattctggttttggctatccatccagggaatcccaagctcaagaagcagctggggcctgggaagaagaacgatgaagtgtccagcctggatgccttcctggcccttattggaaatttcttccctgaaaaccttgtccaagcctgctttcaacannnnnnnnnnnnnnnnnnnnnnnnnnnnnnnnnnnnnnnnnnnnnnnnnnnnnnnnnnnnnnnnnnnnnnnnnnnnnnnnnnnnnnnnnnnnnnnnnnnnnnnnnnnnnnnnnnnnnnnnnnnnnnnnnnnnnnnnnnnnnnnnnnnnnnnnnnnnnnnnnnnnnnnnnnnnnnnnnnnnnnnnnnnnnnnnnnnnnnnnnnnnnnnnnnnnnnnnnnnnnnnnnnnnnnnnnnnnnnnnnnnnnnnnnnnnnnnnnnnnnnnnnnnnnnnnnnnnnnnnnnnnnnnnnnnnnnnnnnnnnnnnnnnnnnnnnnnnnnnnnnnnnnnnnnnnnnnnnnnnnnnnnnnnnnnnnnnnnnnnnnnnnnnnnnnnnnnnnnnnnnnnnnnnnnnnnnnnnnnnnnnnnnnnnnnnnnnnnnnnnnnnnnnnnnnnnnnnnnnnnnnnnnnnnnnnnnnnnnnnnnnnnnnnnnnnnnnnnnnnnnnnnnnnnnnnnnnnnnnnnnnnnnnnnnnnnnnnnnnnnnnnnnnagtgctggaactttgcctgtcaccttccgttgcctggaagaaaatctggggattgataaacgtgtgactagattcgtccttcctgttggagcaaccattaacatggatggtacagccctttacgaagcggtggccgccatctttatagcccaaatgaatggtgttgtcctggatggaggacagattgtgactgtaagngcctcacatccttcctggcaagcgtcggcgcggccagtatccccagtgccggactggtcaccatgctcctcattctgacggccgtgggcttgccaacagaggacatcagcctgctggtggctgtggactggctgctg

SEQ ID NO: 26741 - DNA, 242 bp, Macaca Mulatta
aaatccaatttggtgtagcaggttgcgcatttccatcatcaatgatttagccacgctgtctccgcacgtggcctgcagcacgtggccacccagcacatccccctgctcacctcggtccactgccagtgctgcccggtccccctccctgcctcgctgtgcagcgccgggcccccctgggttgacactcatgagccccagcctcattctatggacgattccattccgcagtgatgcgtatggtt

SEQ ID NO: 26742 - DNA, 935 bp, Macaca Mulatta
  misc_feature (1)...(935): n = A,T,C or G
ntgaatcnttactgtcatataggaaatgatgatgaaagctgatcgagatggagatggagaggtcagtgagcaagagttcntgcgcatcatgaaaaagaccagcctctattaagatcagtgtcttctttttctactgcaagcacatgtaactagatttagtgcctgccattgtgtgaaatctggcttttgagaatacaaacttttcccccactgacctccctttatcactttaatagtgaccttgagtctattttagctgtttggaagtgttctttgatattacagttctttgtaaaatgacctgcgaattaccctaattctcaaaagcaaaacaagagcacattagcatgaagaaaaagatcttaaagctttgagcacctgccattttgccttgcattgtttccctcttatcatgcatttccacatatccacaaacacaggacgactttagacaagcacatgttacacttgtgtcaccacaagcagtcattcttgagtggctccagtttttatttgacacttgagtttagttttctctttaataaaacccagtgaagtcttgcactggcatttggatgtgtgttaatgctatttgttttgtcttaaaaataaaacctttctcagtttgaacttgtgttctctaaggatgagttctttagctttgcttatgagttcctcttctcaactattgtgttgaaggcagcctgttagatacaaaactccttaccagcctatggacagaaatgaataatcctttgctactttcctggcgtgaattgttttttgccttgggaacctgctggtttgtaaaactagcagaaattttatattagctaagcctaaatgatgctctaaaaatagttttggcaaagtgtaagactggaaaagagtcttgttagtaatttgtgcttgaataaaatggggagagccaggct

SEQ ID NO: 26743 - DNA, 140 bp, Macaca Mulatta
  misc_feature (1)...(140): n = A,T,C or G
ttggtttgaagcaacgttcggttgtattgtttatttttctaagcctgatctgggagcaccgtataaaggattttctgctgnccttaaacacagcaagtcatggcattgtaccccttcatctttttaaaaatccaccctga

SEQ ID NO: 26744 - DNA, 128 bp, Macaca Mulatta
cccgccaggcctcgcaagcagcgtaggactgcggagaagggtggtgggcaaggagcctccatgggcacagaggagagctggtgcctgcttgtactgcctggctctatctggagcagcagaacccaagc

SEQ ID NO: 26745 - DNA, 524 bp, Macaca Mulatta
  misc_feature (1)...(524): n = A,T,C or G
agtgtcggtggtgatgggcatcccgagcgtgcggcgcgaggtgcactcgtacctgactgacactctgcactcgctcatctccgagctgagcccgcaggagaaggaggactcggtcatcgtggtgctgatcgctgaggnnnnnnnnnnnnnnnnnnnnnnnnnnnnnnnnnnnnnnnnnnnnnnnnnnnnnnnnnnnnnnnnnnnnnttccccacggagatccattctgggctcctggaggtcatctcaccctccccccacttctaccctgacttctcccgcctccgagagtcctttggggaccccaaggagagagtcaggtncaggtggaggaccaaacagaacctcgattactgcttcctcatgatgtacgcgcagtccaaaggcatctactacgtgcagntgcagctggaggatgacatcgtggccaagcccaactacctgagcaccatgaagaactttgcgctgcagcagccttcagaggactggatgatcctggagttctcccagctgggcttcattggt

SEQ ID NO: 26746 - DNA, 174 bp, Macaca Mulatta
tgacccaggcctctctccggtctcacattggagttgtgccccaagatactgttctctttaatgacaccatcgctgacaatatccgttacggccgtgtcacagctgggaatgatgaggtggaggctgctgctcaggctgcaggcatccatgatgccattatggctttccctgaag

SEQ ID NO: 26747 - DNA, 816 bp, Macaca Mulatta
  misc_feature (1)...(816): n = A,T,C or G
agggaacttctacttcctggagggctccagcgatgccctactctgtgggaacagcagtgatgctgggnggcactgccccgagggttatgagtgcatcaagaccgggcggaaccccaactatggctacaccagctacgacaccttcagctgggccttcctggctctcttccgcctcatgacacaggactattgggagaacctcttccagctgnnnnnnnnnnnnnnnnnnnnnnnnnnnnnnnnnnnnnnnnnnnnnnnnnnnnnnnnnnnnnnnnnnnnnnnnnnnnnnnnnnnnnnnnnnnnnnnnnnnnnnnnnnnnnnnnnnnnnnnnnnnnnnnnnnnnnnnnnnnnnnnnnnnnnnnnnnnnnnnnnnnnnnnnnnnnnnnnnnnnnnnnnnnnnnnnnnnnnnnnnnnnnnnnnnnnnnnnnnnnnnnnnnnnnnnnnnnnnnnnnnnnnnnnnnnnnnnnnnnnnnnnnnnnnnnnnnnnnnnnnnnnnnnnnnnnnnnnnnnnnnnnnnnnnnnnnnnnnnnnnnnnnnnnnnnnnnnnnnnnnnnnnnnnnnnnnnnnnnnnnnnnnnnnnnnnnnnnnnnnnnnnnnnnnnnnnnnnnnnnnnnnnnnnnnnnnnnnnnnnnnnnnnnnnnnnnnnnnnnnnnnnnnnnnnnnnnnnnnnnnnacatcatccacctgatcgtcatggacccgttcgtggacctgggcatcaccatctgcatcgtgctcaacaccctcttcatggccatggaacattaccccatgacggagcactttgaccacgtgctcactgtgggcaacctggtn

SEQ ID NO: 26748 - DNA, 468 bp, Macaca Mulatta
  misc_feature (1)...(468): n = A,T,C or G
aggacctgatggatcccctcgctccgttgggccaaagggacaaaaagnggagaacctggtgtgcctggatctcgtggatttccagnnnnnnnnnnnnnnnnnnnnnnnnnnnnnnnnnnnnnnnnnnnnnnnnnnnnnnnnnnnnnnnnnnnnnnnnnnnnnnnnnnnnnnnnnnnnnnnnnnnnnnnnnnnnnnnnnnnnnnnnnnnnnnnnnnnnnnnnnnnnnnnnnnnnnnnnnnnnnnnnnnnnnnnnnnnnnnnnnnnnnnnnnnnnnnnnnnnnnnnnnnnnnnnnnnnnnnnnnnnnnnnnnnnnnnnnnnnnnnnnnnnnnnnnnnnnnnnnnnnnnnnnnnnnnnnnaagggtgaagaaggtgaccagggagaactgggagaagttggagctcaaggacctccagagcccagggtttgcgaggcatcaccggcatagttggagacaaaggggaaaaag

SEQ ID NO: 26749 - DNA, 177 bp, Macaca Mulatta
aggtatctcccgaagatcctggagctcagttcttgattcgtactgggtctgttggccgaaatagggctgaagcctctttggagcgagctcagaatctcaaccccatggtggatgtgaaggtggacactgaggatatagagaagaaaccagagtcatttttcactcaatttgatgctg

SEQ ID NO: 26750 - DNA, 157 bp, Macaca Mulatta
cctgaaaatgcaacagcgcatcatgaacctgatctgtgacccggacctaaccaaggtgagccaatgcctggagcatgccctgactgctcgacacccccgaacccgctacagcccaggctgggatgccaagctgctctggctgcctgcctcctacctg

SEQ ID NO: 26751 - DNA, 1176 bp, Macaca Mulatta
  misc_feature (1)...(1176): n = A,T,C or G
gcccaacatgtgtagcaccagtgcgtgtgacctggaagaaatccccctagatgatgatgacctaaacaccatagaattcaaaatcctcgcctactacgccagacaccatgtcttcaagagcacccccgctctcttctcgccaaagctgctgagaacaagaagtttgtcgcagaggggcctggggaattggtcagcaaatgagtcatggacacaggtgtcatggccttgcagaaattcccaatccagtgagaaggccatcaaccttggcaagaaaaagtcttcttggaaagcactctttggagtagtggagaaggaagattcgcagagctcgcctgccaagatctctgctcagggtcaaaggacattggaataccaaggttcgcacagccagcagtggtccaggtctctttccagcgtggagcagtgcttggagcatgaannnnnnnnnnnnnnnnnnnnnnnnnnnnnnnnnnnnnnnnnnnnnnnnnnnnnnnnnnnnnnnnnnnnnnnnnnnnnnnnnnnnnnnnnnnnnnnnnnnnnnnnnnnnnnnnnnnnnnnnnnnnnnnnnnnnnnnnnnnnnnnnnnnnnnnnnnnnnnnnnnnnnnnnnnnnnnnnnnnnnnnnnnnnnnnnnnnnnnnnnnnnnnnnnnnnnnnnnnnnnnnnnnnnnnnnnnnnnnnnnnnnnnnnnnnnnnnnnnnnnnnnnnnnnnnnnnnnnnnnnnnnnnnnnnnnnnnnnnnnnnnnnnnnnnnnnnnnnnnnnnnnnnnnnnnnnnnnnnnnnnnnnnnnnnnnnnnnnnnnnnnnnnnnnnnnnnnnnnnnnnnnnnnnnnnnnnnnnnnnnnnnnnnnnnnnnnnnnnnaggtatccaaaagccccaaacaagcacttcggaatagtccctaacttggcagcaggcctcaagttcagtacaagacacccggcagagaggcagcactgctttttcattgtttgcactgctgtcaaatcctcctcttcagctaccatctctggactcacagcttccatcctttcacataattcatgtcatcagacagagaaagntagattaggctttaagtgaagaggggtttgaagaatttacggatttctgcttcctaatagaagtgaaaagaaaaaaagaattgtgaagaaatcagacatacttctacacttcccc

SEQ ID NO: 26752 - DNA, 276 bp, Macaca Mulatta
ctaatcttggatatattctttaaggcattccacttagcttgccagtttagacaatcaccacagttattacccaaatactaggaacatatttttgtaaaccaatcattttgaattatagtgatgagaatttaaatatatgcttttctagaatttgatgtttgaccatttatgacttaattacaagagagccagtaaattaagacagtgtctcaacaagcctaggctatcttttaagttgaaaaataccccactgtagttgcttcatgagtatgaaga

SEQ ID NO: 26753 - DNA, 698 bp, Macaca Mulatta
  misc_feature (1)...(698): n = A,T,C or G
gggaggacaagagatgatcattctgcaagcaggcaacctgaatacagggaaatgagagatggctttagaagaaaaagtttctactcttcccattatgcgagagagcggtctcctcataaaagggacaatacttttttcagagaatcacctgttggccgaaaggattctccacacagcagatctggttccagtgtcagtagcagaagctactctccagaaaggagcaaatcatactctttccatcagtctcaacatagaaataaagagaggcctgtccagtctttgaaaacatcaagagatacttcaccctcaagtggttcagcagtttcttcatcaaaggtgttagacaaacccagtaggctaactgaaaaggagcttgctgaggctgcaagcaagtgggctgctgaaaagctagagaaatcagatgaaaataacttgcctgaaatttctgagtatgaggcgggatccacagcaccattgtttactgatcagccagaggaacctgagtcaaacacaacgcatgggatagaattatttgaagatagtcagctaaccactcgctctaaagcaatagcatcaaaaaccaaagagattgaacaggtttaccgacaagactgtgaaactttcggggagggtggtgaaaaatngctgattgaaaaaagatcctttcctttagaaaagtctattacaagttttgc

SEQ ID NO: 26754 - DNA, 98 bp, Macaca Mulatta
agactcctaacagtggagcttcagtttaaactgaaagccattaatctgcagacagttcgtcatcaagaactccctgactgttatgactttactctgac

SEQ ID NO: 26755 - DNA, 212 bp, Macaca Mulatta
ggtcctgcaaagtgtggttctcttgtccgacagtcagttgcacctcttcctgcaaagccagctctcagtgcctgagatagaagcctgtgtccagggccgaagcaccatgactgtgtctgatgccattcttcgatatgctatgtcaaactgtggctgggcccaggaagagaggcagagctcttctcacctggctaaaggagaccagcctaaga

SEQ ID NO: 26756 - DNA, 813 bp, Macaca Mulatta
  misc_feature (1)...(813): n = A,T,C or G
ggcagatgaagcatattccatcggtcctgctccctcccagcagagctacctatctatggagaaaatcattcaagtggccaagacctctgctgcacagnnnnnnnnnnnnnnnnnnnnnnnnnnnnnnnnnnnnnnnnnnnnnnnnnnnnnnnnnnnnnnnnnnnnnnnnnnnnnnnnnnnnnnnnnnnnnnnnnnnnnnnnnnnnnnnnnnnnnnnnnnnnnnnnnnnnnnnnnnnnnnnnnnnnnnnnnnnnnnnnnnnnnnnnnnnnnnnnnnnnnnnnnnnnnnnnnnnnnnnnnnnnnnnnnnnnnnnnnnnnnnnnnnnnnnnnnnnnnnnnnnnnnnnnnnnnnnnnnnnnnnnnnnnnnnnnnnnnnnnnnnnnnnnnnnnnnnnnnnnnnnnnnnnnnnnnnnnnnnnnnnnnnnnnnnnnnnnnnnnnnnnnnnnnnnnnnnnnnnnnnnnnnnnnnnnnnnnnnnnnnnnnnnnnnnnnnnnnnnnnnnnnnnnnnnnnnnnnnnnnnnnnnnnnnnnnnnnnnnnnnnnnnnnnnnnnnnnnnnnnnnnnnnnnnnnnnnnnnnnnnnnnnnnnnnnnnnnnnnnnnncctggtattaaacctgaagtaagaaaaaagctgggagaagctgcagtcagagctgctaaagctgtaaattatgttggagcaggnngggactgtggagtttattatggactcgaaacataatttctatttcatggagatgaatacaaggctgcaagtggaacatcctgttactgagatgatcacaggaactgacttggtggagtggcagcttaga

SEQ ID NO: 26757 - DNA, 855 bp, Macaca Mulatta
  misc_feature (1)...(855): n = A,T,C or G
gaccatagttacatttgatgcctgcaatcgtgtaagtgttcatactagtctcctctagtagacctgtgacttactgtgttggacatattatttagacttagtcatacaaagaaacttagctcttttttcatctcacagtagagcctatttccccaggaaaaaaataaatgcctttgaatgaaaattctgaaattgtaaatgtctattttaatattcaactatgaaaaaatctgtgaatatatgtaaatatgtttaataaattttattggtcatgttaaatcattgtaaaacttttttacattgcttaatgttttaagcttaatagcctttgcacttttaaaataaaaaccaagtatgcaaatcaaaagaagatatttggtagtcaaaataagtaaaagaaatataggaatattccagtcagtctctgaaatgtttatgaaaaacaggttaatatgttgtatttttttccttgtatcaagatgcaaaacataatttgcagaattttataattgaataaaacttggtatgctgttttataataaattagcaatatacttagaaaaaaatccagtttctcctattacatgatgtaaattaaatattcaggaatatttcaggtctgaaatctgctgctgaacttgttagacatttttgaaaggaaactccggtagtgtccaacctcctacgcatatgacgcgaacattgcccaatttcccccggactttcttgatagtataacgaaagattctgttgcccatctaaaaggagcccctttttggacctacgctctctggaatgagacccnatggcacagtcatgtctgtcgagaatacatgaaccaagaagacatccaca

SEQ ID NO: 26758 - DNA, 658 bp, Macaca Mulatta
  misc_feature (1)...(658): n = A,T,C or G
aataaggagtttgtgtgtcgagggcatgactacgagaggctggaagccttccaacagagaatgctgaacgagttcccccacgccatcgccatgcagcatgccaaccagcccgatgagaccattttccaggcagaagctcaatgtatccgcacctacaagggctggactcannnnnnnnnnnnnnnnnnnnnnnnnnnnnnnnnnnnnnnnnnnnnnnnnnnnnnnnnnnnnnnnnnnnnnnnnnnnnnnnnnnnnnnnnnnnnnnnnnnnnnnnnnnnnnnnnnnnnnnnnnnnnnnnnnnnnnnnnnnnnnnnnnnnnnnnnnnnnnnnnnnnnnnnnnnnnnnnnnnnnnnnnnnnnnnnnnnnnnnnnnnnnnnnnnnnnnnnnnnnnnnnnnnnnnnnnnnnnnnnnnnnnnnnnnnnnnnnnnnnnnnnnnnnnnnnnnnnnnnnnnnnnnnnnnnnnnnnnnnnnnnnnnnnnggtagaaatgagtcctctggaaaatgcaattgaagtgctggaaaataagaatcagcaactaaagactctgattagtcagtgtcagacaagacagatgcagaatattaatcccctgacgatgtgcctgaatggagttatagatgctgcagttaatggtggtgtttccaggtaccaagagg

SEQ ID NO: 26759 - DNA, 842 bp, Macaca Mulatta
  misc_feature (1)...(842): n = A,T,C or G
tgcagagccaggattcctggctcctggagcccgttctaacatccagtacctcagtctgccccggccagccaaatccagttctatgagcgtgaccggcgggcggggtggacctcgccctgtgagcagcagcattgaccccagcctcctcagcaccaagcagggaggccttacaccttccagactgaaggagcctaccaaggtagccagtgggcggaccactccagcccctgtcaatcagacagatcgggaaaaggagaaggccaaagccaaggcagtggccttggactcagacaacatctccttgaagagtattggctccccagaaagtactcccaagaaccaagcaagccaccccacagccaccaagctggcagagctgccaccaacccctctcaggnnnnnnnnnnnnnnnnnnnnnnnnnnnnnnnnnnnnnnnnnnnnnnnnnnnnnnnnnnnnnnnnnnnnnnnnnnnnnnnnnnnnnnnnnnnnnnnnnnnnnnnnnnnnnnnnnnnnnnnnnnnnnnnnnnnnnnnnnnnnnnnnnnnnnnnnnnnnnnnnnnnnnnnnnnnnnnnnnnnnnnnnnnnnnnnnnnnnnnnnnnnnnnnnnnnnnnnnnnnnnnnnnnnaatgagtggtttcagtgtgcccaaagagactcgcatgtaccccaaactctcaggcctgcacaggagcatggagtccctccagatgccaatgagcctgcccagtgccttccccagcagtactcccgtccccaccccacctgctcccactgctgctcccccagaggaagagacggaagagctgacttggagtggaagccccagagctgggcaactggaca

SEQ ID NO: 26760 - DNA, 103 bp, Macaca Mulatta
tgtaatactgggaagcgattttgaaagattatagataatcccaggagctaaacatggaaatattcaagtggtatgtgtagactgttcaatgcaacaaggcaag

SEQ ID NO: 26761 - DNA, 254 bp, Macaca Mulatta
ctcacgcctgtaatcccagcactccgggaggctgacatgggcgaatcacttagggtcaggaattcgagaccagcctggtcaacatggtgaaactcccatctttactaaaaatacaaaaattagccgggcatggtggcatgcacctgtagtccctgctgctccagagactgagaaaggagaatcgcttgaactcggaaggcggaggttgcagtgagctgagatcgtgccaccgcactccagcctgggcgacagag

SEQ ID NO: 26762 - DNA, 1716 bp, Macaca Mulatta
  misc_feature (1)...(1716): n = A,T,C or G
aggatggtgctgctccactggtgtctgctgtggcttctgtttccactcagctcaaggacccagaagttacccacccgggatgaggaactttttcagatgcagatccgggacaaggcattttttcatgattcgtcagtaattccagatggagctgaaattagcagttatctctttagagatacacctaaaaggtnnnnggtatttctttgtggttgaagaagacaatactccattatcagtcacagtgacgccctgtgatgcacctttggagtggaagctgagccttcaggagcttccggaggacacaagtggggaaggctcaggtnnnnnnnnnnnnnnnnnnnnnnnnnnnnnnnnnnnnnnnnnnnnnnnnnnnnnnnnnnnnnnnnnnnnnnnnnnnnnnnnnnnnnnnnnnnnnnnnnnnnnnnnnnnnnnnnnnnnnnnnnnnnnnnnnnnnnnnnnnnnnnnnnnnnnnnnnnnnnnnnnnnnnnnnnnnnnnnnnnnnnnnnnnnnnnnnnnnnnnnnnnnnnnnnnnnnnnnnnnnnnnnnnnnnnnnnnnnnnnnnnnnnnnnnnnnnnnnnnnnnnnnnnnnnnnnnnnnnnnnnnnnnnnnnnnnnnnnnnnnnnnnnnnnnnnnnnnnnnnnnnnnnnnnnnnnnnnnnnnnnnnnnnnnnnnnnnnnnnnnnnnnnnnnnnnnnnnnnnnnnnnnnnnnnnnnnnnnnnnnnnnnnnnnnnnnnnnnnnnnnnnnnnnnnnnnnnnnnnnnnnnnnnnnnnnnnnnnnnnnnnnnnnnnnnnnnnnnnnnnnnnnnnnnnnnnnnnnnnnnnnnnnnnnaactggtgcgtcatgtctactccaggcccaaggttgacattcagaaaatctgcataggaaacaagaacatcttcaccgtctccgatctgaaacccgacacgcagtactactttgatgtatttgtggtcaacgtcaacagcaacatgagcaccgcttacgtaggtacctttgccaggaccaaggaagaagccaaacagaagacagttgagctaaaagatgggaaggtaacagatatatttgttaaaaggaagggagcaaagtttctacggttcgctccagtgtcttctcaccaaaaagtcaccttctttattcactcgtgtctggatgctgtccaaatccaagtgagaagagatgggaaacttcttctgtctcagaatgtggaaggcattcagcagtttcagcttagaggaaaacctaaagcgaaatacctcattcgactgaaaggaaacaagaaaggagcatctgtgttgaaaatactagctaccacaaggcctactaagcagtcatttccctctcttcctgaagacacaagaatcaaagcctttgacaagctccgtacctgttcctcggccaccgtggcttggctaggcactcaggaaaggaataagttttgcatctacaaaaaagaagtggatgataactacaatgaagaccagaagagaagagagcanaaccaatgcctaggaccagatatcaggaagaagtcagaaaaggtcctctgtaaatatttccatagtcaaaacctgcagaaagcagtgaccacagaaacaattaaaggtcttcagcctggcaaatcttacctgctggatgtttatgtcatangacatggggggcactctgtaaagtatcagagntaggttgtgaaaactagaaaagtctgttag

SEQ ID NO: 26763 - DNA, 116 bp, Macaca Mulatta
gtgtatgactccagatgaaattcagtcccatctgagagatgaattagaggtaccctgtggcctgagcgcagttcaagccaagaccccaattggcagaaacacttttatcattttga

SEQ ID NO: 26764 - DNA, 1541 bp, Macaca Mulatta
  misc_feature (1)...(1541): n = A,T,C or G
gcccacctgcctggccgagttcaagcagatcaggtccatcaggtgcctgccactggaggannnnnnnnnnnnnnnnnnnnnnnnnnnnnnnnnnnnnnnnnnnnnnnnnnnnnnnnnnnnnnnnnnnnnnnnnnnnnnnnnnnnnnnnnnnnnnnnnnnnnnnnnnnnnnnnnnnnnnnnnnnnnnnnnnnnnnnnnnnnnnnnnnnnnnnnnnnnnnngatggcgagaagcggaacaacctgccccagatccccatgctnaaacctggaggcccggcggtcccacnnnnnnnnnnnnnnnnnnnnnnnnnnnnnnnnnnnnnnnnnnnnnnnnnnnnnnnnnnnnnnnnnnnnnnnnnnnnnnnnnnnnnnnnnnnnnnnnnnnnnnnnnnnnnnnnnnnnnnnnnnnnnnnnnnnnnnnnnnnnnnnnnnnnnnnnnnnnnnnnnnnnnnnnnnnnnnnnnnnnnnnnnnnnnnnnnnnnnnnnnnnnnnnnnnnnnnnnnnnnnnnnnnnnnnnnnnnnnnnnnnnnnnnnnnnnnnnnnnnnnnnnnnnnnnnnnnnnnnnnnnnnnnnnnnnnnnnnnnnnnnnnnnnnnnnnnnnnnnnnnnnnnnnnnnnnnnnnnnnnnnnnnnnnnnnnnnnnnnnnnnnnnnnnnnnnnnnnnnnnnnnnnnnnnnnnnnnnnnnnnnnnnnnnnnnnnnnnnnnnnnnnnnnnnnnnnnnnnnnnnnnnnnnnnnnnnnnnnnnnnnnnnnnnnncagggacattgctgtccggaacatcctggtggcctcctctgagtgtgtgaagctgggggactttggtctttcccggtacattgaggatgaggactattacaaannnnaaagcctctgtgactcgtctccccatcctttgaatgtccccagagtccattaacttccgacgcttcacgacagccagtgatgtctggatgttnnnnnnnnnnnnnnnnnnnnnnnnnnnnnnnnnnnnnnnnnnnnnnnnnnnnnnnnnnnnnnnnnnnnnnnnnnnnnnnnnnnnnnnnnnnnnnnnnnnnnnnnnnnnnnnnnnnnnnnnnnnnnnnnnnnnnnnnnnnnnnnnnnnnnnnnnnnnnnnnnnnnnnnnnnnnnnnnnccgcttcaccgagctagtgtgcagcctcannnnnnnnnnnnnnnnnnnnnnnnnnnnnnnnnnnnnnnnnnnnnnnnnnnnnnnnnnnnnnnnnnnnnnnnnnnnnnnnnnnnnnnnnnnnnnnnnnnnnnnnnnnagcccagccgacctaagtacagactccctccgcaaaccaacctcctggctccgaagctgcagttccagnnnnnnnnnnnnnnnnnnnnnnnnnnnnnnnnnnnnnnnnnnnnnnnnnnnnnnnnnnnnnnnnnnnnnnnnnnnnnnnnnnnnnnnnnnnnnnnnnnnnnnnnnnnnnnnnnnnnnnnnnnnnnnnnnnnnnnnnnnnnnnnnnnnnnnnnnnnnnnnnnnnnnnnnnnnnnnnnnnnnngacgccagagaaggaggtcggcta

SEQ ID NO: 26765 - DNA, 165 bp, Macaca Mulatta
agattgcttctgtgatcaactcagccttggacctgtacttcccagagggctgtggtgtggacatccttgctgagctggggcgctactacgtgacctcggccttcaccgtggcagtcagcatcattgccaagaaggaggttctgctggatcaacctggcaaggagg

SEQ ID NO: 26766 - DNA, 140 bp, Macaca Mulatta
gcatccttatccacaggacctccagggcagggtcagaacagcagaaccagagcagctcgggtccgagagcacagacaaggctcctcccgttcctccacgccaaagggcgacaggtcagcagtcaatgatgaatctttctg

SEQ ID NO: 26767 - DNA, 318 bp, Macaca Mulatta
aaagaaagatagaggcggggaggaccttcacaaagagtcccagggttttggctgtgaatgtctcaaataccttgacaagtagatctataaaatgttactgaaaaagtaaaatgcctaatgtcgtttccaacagttcctctggacttctccccacataacacaccacagcccagatggcagagcccaaaggccacacttttgaaaaaagaaaaacaagaataagccctgttgctctttaaggagaaaggaaggagctgaaggctactggggcctttcccatgtggcctgtgttgtataaagcaacttcccagcagcagc

SEQ ID NO: 26768 - DNA, 653 bp, Macaca Mulatta
tcacaaaagtctttgtcgctttccaaactttcctccggggtatggtcctgtacaccagcaaggaccgcactttctattttgggaagctcgatggccagatcttctctgcctaccccagccaagaggggcaggtgctggtgggcatctatggccaatatggactcctcggcatcaagagcattggctttgaatggaattacccactagaggagccgaccactgaaccgccagttactgtaacatgaccatcaaaggcaccctcgggtctctagggtggggtacggggccatctgagctgaggccatctgggtggtggtggctgatggtactggagtaactgagtcgtgacgctgaacctgaatccaccaataaataaagcttctgcaaaatcagtgcatccaggattggtccttgcatctggggtacaaccaaaccctcccctgctccttggagacaaaggccgcagtgctggagcccagtgaactgagatgagggatagggcaaaggtgactctgccgaggacagaaagagagcagcaccaccccctcaggggtgctgtgggtctctgtgccagtcccacaatctttgaagagtcaggcttcaagaccaccactccccactgtccctcaccccaggcccatccagcgggcctc

SEQ ID NO: 26769 - DNA, 120 bp, Macaca Mulatta
agtgaagcctctctcacagtgagaacacctgtaagactgttcaccagtgtgggtttttcagtgggcactgaagtgggagctattgttgaagcttttcccacactgtgcacacttgtatgg

SEQ ID NO: 26770 - DNA, 157 bp, Macaca Mulatta
tactggatttctttttctcctgattttggcctcagctcctagagtggcctcagctcagtaaccaacgggagtcgacttatccatgccaggcctgcagtttcacatctgtggcaagatgggacagatgacactgctgtattcaacgacagctcccagg

SEQ ID NO: 26771 - DNA, 220 bp, Macaca Mulatta
ctcctactccccagaggggccctagtgcctctgttcctgaattacacaagaatgtaccatgccgggaagccagagacctgcgggggcctcggcccctcacattgtgtatgtctctccttgatttgtgttgtgtccagtttggttttgtcttttttatttggcaagtggaggaggcttttatgtgacttttatgttgtggttggtgtcttaactctcctgg

SEQ ID NO: 26772 - DNA, 1680 bp, Macaca Mulatta
  misc_feature (1)...(1680): n = A,T,C or G
aggtgatctttgatgagactctacagaagtgcctggactcctacctgcgctatgtcccccgcaagtttgacgagggggtggcctcagcccctgaggttgttgacatgcagaagcgcctccatcgaagtgtttttctcaccttcctccgcatgtccactcacaaggaatccaaannnnnnnnnnnnnnnnnnnnnnnnnnnnnnnnnnnnnnnnnnnnnnnnnnnnnnnnnnnnnnnnnnnnnnnnnnnnnnnnnnnnnnnnnnnnnnnnnnnnnnnnnnnnnnnnnnnnnnnnnnnnnnnnnnnnnnnnnnnnnnnnnnnnnnnnnnnnnnnnnnnnnnnnnnnnnnnnnnnnnnnnnnnnnnnnnnnnnnnnnnnnnnnnnnnnnnnnnnnnnnnnnnnnnnnnnnnnnnnnnnnnnnnnnnnnnnnnnnnnnnnnnnnnnnnnnnnnnnnnnnnnnnnnnnnnnnnnnnnnnnnnnnnnnnnnnnnnnnnnnnnnnnnnnnnnnnnnnnnnnnnnnnnnnnnnnnnnnnnnnnnnnnnnnnnnnnnnnnnnnnnnnnnnnnnnnnnnnnnnnnnnnnnnnnnnnnnnnnnnnnnnnnnnnnnnnnnnnnnnnnnnnnnnnnnnnnnnnnnnnnnnnnnnnnnnnnnnnnnnnnnnnnnnnnnnnnnnnnnnnnnnnnnnnnnnnnnnnnnnnnnnnnnnnnnnnnnnnnnnnnnnnnnnnnnnnnnnnnnnnnnnnnnnnnnnnnnnnnnnnnnnnnnnnnnnnnnnnnnnnnnnnnnnnnnnnnnnnnnnnnnnnnnnnnnnnnnnnnnnnnnnnnnnnnnnnnnnnnnnnnnnnnnnnnnnnnnnnnnnnnnnnnnnnnnnnnnnnnnnnnnnnnnnnnnnnnnnnnnnnnnnnnnnnnnnnnnnnnnnnnnnnnnnnnnnnnnnnnnnnnnnnnnnnnnnnnnnnnnnnnnnnnnnnnnnnnnnnnnnnnnnnnnnnnnnnnnnnnnnnnnnnnnnnnnnnnnnnnnnnnnnnnnnnnnnnnnnnnnnnnnnnnnnnnnnnnnnnnnnnnnnnnnnnnnnnnnnnnnnnnnnnnnnnnnnnnnnnnnnnnnnnnnnnnnnnnnnnnnnnnnnnnnnnnnnnnnnnnnnnnnnnnnnnnnnnnnnnnnnnnnnnnnnnnnnnnnnnnnnnnnnnnnnnnnnnnnnnnnnnnnnnnnnnnnnnnnnnnnnnnnnnnnnnnnnnnnnnnnnnnnnnnnnnnnnnnnnnnnnnnnnnnnnnnnnnnnnnnnnnnnnnnnnnnnnnnnnnnnnnnnnnnnnnnnnnnnnnnnnnnnnnnnnnnnnnnnnnnnnnnnnnnnnnnnnnnnnnnnnnnnnnnnnnnnnnnnnnnnnnnnnnnnnnnnnnnnnnnnnnnnnnnnnnnnnnnnnnnnnnnnnnnnnnnnnnnnnnnnnnnnnnnnnnnnnnnnnnnnnnnnnnnnnnnnnnnnnnnnnnnnnnnnnnnnnnnnnnnnnnnnnnnnnnnnnnnnnnnnnnnnnnnnnnnnnnnnnnnnnnnnnnnnnnnnnnnaggtgccactgcagccaggcgagagcctaccctaccacagtgtctactacgaggatgagtacgatgacacatacgacggcaaccaggtgggcgccaatgatgcagactcagacgacgagctcatcagccgcag

SEQ ID NO: 26773 - DNA, 133 bp, Macaca Mulatta
aggtagtaattacagtgaaaaatgtgacgtcttcagctggggtattattctttgggaagtgataacgcgtcggaaaccctttgatgagattggtggcccagctttccgaatcatgtgggctgttcataatggt

SEQ ID NO: 26774 - DNA, 782 bp, Macaca Mulatta
cagcttttttgagcattacaccaaacattaaggaagaaggagcaatgaaagaggatccggaatgcaagatacaccatacaatgagaatatcctggtggagcagctatacatgtgtgtggagtttctctggaagtctgagcgatacgaactcattgctgatgtcaacaagcccatcattgctgtctttgagaaacaacgagacttcaaaaaattgtcagatctctactatgacattcatcggtcatacctgaaagtggcagaggtggtgaattcagagaagcggctgtttggtcgctactatcgtgtggcattttatgggcagggcttttttgaagaagaagaaggtaaagagtatatttataaaggaggctaagctgacagtgtctgtccgagatttcccaaagactcctcaagctctatgcagataaatttggagcagacaatgtgaagataatccaggattccaacaaggtaaaccccaaggatttggacaccaaatatgcctacatccaggtgacctatgtcacgccattctttgaggaaaaggaagtcgaagaccggaagacagatttcgaaatgcaccacaacatcaaccgctttgtcttcgagacgcccttcacgctgtcgggcaagaagcacggtggagtggcggagcagtgcaagcgacggacaatcctgacaaagagtcacctgttcccctacgtgaagaagagaatacaagtcgttagccaatcgagcacagaactgaatccaattgaagtggcaattgacgagatgtccaa

SEQ ID NO: 26775 - DNA, 928 bp, Macaca Mulatta
  misc_feature (1)...(928): n = A,T,C or G
tcttctgttgacatttgggggtgatcctgttctgcgctgtgtacatatgtgagatacgtgcggctcgtgatgtttcgccgcggcttggggattgtacacaggaccggctcacgtaatgcattgcctgtaacaatgtaataaaaagcctcnnnnnnnnnnnnnnnnnnnnnnnnnnnnnnnnnnnnnnnnnnnnnnnnnnnnnnnnnnnnnnnnnnnnnnnnnnnnnnnnnnnnnnnnnnnnnnnnnnnnnnnnnnnnnnnnnnnnnnnnnnnnnnnnnnnnggggcccccccgnnnnnnnnnnnnnnnnnnnncccttttttttggccccggggcccnnnnnnnnnnnnnnnnnnnnccaccgggtcccccaagaaaaccgggaaaggaaaagggttttatttnnnnnnnnnnnnnnnnnnnnnngggggaacgaannnnnnnnnnnnnnnnnnnnnnggggggtttccagagggctttttggaaaatttccaaaaggggatccccaannnnnnnnnnnnnnnnnnnnnnncccccggcctcgggccaaagnnnnnnnnnnnnnnnnnnnngcccttccttaagcccatttttcccggaaattgggggggcctttttaaaaaaggggttttttggaaaccctgagaaacccccccggcgaaaaaacgcgcctttttgccacccccttgaannnnnnnnnnnnnnnnnnnnnngcgtttaaaaaaccnnnnnnnnnnnnnnnnnnnnnnnnnnccctttgggggcacaacaggtgggaagtaacaaaaaaatggtggtaaaacacctctccccccccgcgtttttttgtctctttaaacccggaagagaaacatcttctctcccaacaagaataccctctttgtgtnnnnnnnnnnnnnnnnnncacattatttttcttctaacacaca

SEQ ID NO: 26776 - DNA, 166 bp, Macaca Mulatta
gaggccccaagatgagcgccaacagcagcagagcgggccagcttctctcgcaggcttcagcgtgcgttagctggaagcaggatgtggaaggggctgtctaccatttagccaactgcctcttactcctgggcttcatggggggcattggggtgtatggatgcttcta

SEQ ID NO: 26777 - DNA, 1779 bp, Macaca Mulatta
  misc_feature (1)...(1779): n = A,T,C or G
atggcggcagggtccactacgctgcacgcagtggagaagctgcaggtgcgtctggccactaagacggacccgaaaaagctagagaaatatttgcagaaactctccgccttgcccatgacggcagacatcctggcggagactggaatcagaaagacggtgaagcgcctgcggaagcaccagcacgtgggcgactttgccagagacttagcggcccggtggaagaagctggagcttgtggacccaaacaccgggcctgatgcacaggaccccgaggagagnnnnnnnnnnnnnnnnnntggcggcagggtccactatgctgcacgcagtggagaagctgcaggtgcgtctggccactaagacggacccgaaaaagctagagaaatatttgcagaaactctccgccttgcccatgacggcagacatcctggcggagactggaatcagaaagacggtgaagcgcctgcggaagcaccagcacgtgggcgactttgccagagacttagcggcccggtggaagaagctggtgcttgtggacccaaacaccgggcctgatgcacaggaccccgaggagagcgcttcccgaaagcgccatggggaggctcttcaggaccaggaaaaggcctggggcttcccagagaacgggacggtccccaggagcccacctgacagtcctgagcacagacggacagcacacagaacacctccggggctccagagacctcaccgaaggtctcccagtcgcgagcacagagcccagagaaagcgccccagaagggccccagctgattcaggcccccatcgggcccctccattgcacaccgctcccctcccgacgcccgaggaccatgaaccgacctggaaccgggtagcaaccacgaaagaggccacgctcacgccgctcagggcggacctccgtagggtcagggctgccagggccaaccccagggggaagcgcttgtgagccacagcaaggggcacaaatcgtcccgctgggcttccgcgcagaaattgcctcctgtccaggaaagccagtcagagaggctgcaggtggccggcgctgattccgcggggccgaaaacggtgcccagccatgccttctcagagctctgggacccctcagaggcctggatgcaggccaactacgatctactttctgcttttgaggacaagacctcccaggaaaagccagaagcactctccgcaccaaaaaaacaggaggaagccgccttcactggacacagagtgaatgctaagatgcaagtgtactcgggctccaggcctgcctgccagccccaggtgctgacgctgcgccagcagtgcatccgggggcttagacacaatccggacgccgtcggcgacgtgggaggggtcccctactcggttctcgaaccccttccggaagggtggacgcctgatcagctgtatcgcagagagaaatacaatcacgcactcgctggggacacagatgaattatggaggattcattgtctccgggacttcaaggaagaaaagccacaggagcacgagtcttggcgggagctgtatctgcggcttcgggactcccgagagcagcggctgcgagcagtcaccacgaaaatccgatctgcacgtgaaaacaaacccatccgccgacagacaaagatgatctgtttcatctctggggccaagacgccttatgatgcttcaaggaggcaagagaagtctgcaggagccgctgaccccgaagagggagagatcaagccagccgccaaagccgcgggcagcagccacgttccctcc

SEQ ID NO: 26778 - DNA, 787 bp, Macaca Mulatta
  misc_feature (1)...(787): n = A,T,C or G
ggcacagccataaaatgaaaacctgttacaactatgtagagaagggtttgacattttattgggcttttgtcttttgaagaatatgtctactacgtgtnnnnnnnnnnnnnnnnnnnnnntaatatgggccaggtaaaaggggggctgcttttctgttaagcatcgataggtaagttgatggataaatgttactatgtaagcctatttttttgagtccttatttgaatattgaaaacattcttgataaaatgtgttagtccatgttggaaacaaccgaaagaacagaattcaagttccagttctgatgtttattatatatgttggatcttgggcaacttacttgatttctctgaaatttatgttattgtaaccttgaaagctattaagagtaaaatggttttacagcaggtaacatgtgagaagacagctacatatttgtaaagccaaaccaacaaagaaatatagcaaaattcacaggtagattacaggaaatgtcctttcacgggggaagtaacattttcactagtgnnnnnnnnnnnnnnnnnnnnngctttaagtgagaaaactaatttgcaaaaggcaagagaaaaaagctgatgggacagtttagacagctacatttaaaattcagaatggaaagataaagcctttgaactaaaggtaatagaaaagattttttgtgaaagtgccactgacctattcatataagtggctttagcttttcaaagttaaagcctgagtatttaaaagggttatagcttgtatttgctgggataaaaaaattaaa

SEQ ID NO: 26779 - DNA, 770 bp, Macaca Mulatta
aatgttcctgtgttccagggtaactccaggtgggttttgagagctgggtcggtacttcagacatctcttctccattgtcaggtgccgtctctgctctatgtggtcattgccccctggcatccccaggggaatggcagcagtgaggtagatgggaggatatttctggtcggggaactggcatcccattcagcatctcaggactcacaggccagcatgtgttccatggctaggaattgcttaccacccacatcagcttctgtttacctttttggcattaaataatgacagtgtttggaaatctttctacaggaaattacctccccaagagaagccttccttactttggagtaaggtcctacgacagctggatgagtcaggaaaaccatgtcccctctaggtattattaatataagcaggaagggatctactataggaatgaagtatttataaaaccactgaaagggacagagaagtgaaaattggagaaagccagtagcaactgtcagaaatcagcaacgtgcaggaggcacagaaaactcctgctgatggtcttagcttccagctgcacaaaagcagatgatgtacaggaaaatgctcagaagatgctccaaaactcatgcctactgtctgctactgctggaaaaggaatcatggtttctagaagtgcctctcattagtggactttaaagcaaatcctggctggcaggaaattctgaggaatatagttcttaggcttccagcctctactatgcaggagagaacacagaagg

SEQ ID NO: 26780 - DNA, 685 bp, Macaca Mulatta
ggagcttgtctctggggagggttctgggtggaagccggcaggcatacaaaaccctctaccctccgtggccatggcaacgtccagggcccagaaccctgaagaatgagcagctgaggcgctgctccccatcccccacctccatacctcagcctttgcctaccctaggaatgagcttggcctccaacatcccttgcctgctgccattagaagagggggccctcttctgcatctgagccccccatccctgtgccacctgggtgtggagcccatggaacactctggtccgcctcattttaaaccaaaaaactgctccttcaccctcaccctgaggccccaggggagaggacccatgggttggtgcccaggggttgccttgggacctcggatctcctctggggggcttggctgctgctgttgctgctctgtacttgcctctcgtgattctgtttgttacccatgttcacttcccccaggagaccccctctcccctggggcatccctctgccttggaatccctgtagcccagcagccctgcccctccccagcatcccagctgggccagagagagccaactgtgccaacaaggactgggccctgcccggctgcccgcctcagggatgggcacctcatgcctgtctcgccacctcctgtgccaatgtcctacactccacctgggggtggggtg

SEQ ID NO: 26781 - DNA, 297 bp, Macaca Mulatta
atggtttatttgtgggatagtggagattttcttgtattatgacttttctaatgtaattaggagaaatataagttcgtaactgacatttcctcctgagtactgatttgaatgaacaccagtcatttttctatgttgagcttttgtttttgtttaaattaaaatgtacccaatttctgtttgggtattcattttaagccattgattattttctattgtgtatttaatctgcagataaataagttagtggggttagattttattttggatttcaaatgatatatatgcttataatttggt

SEQ ID NO: 26782 - DNA, 1982 bp, Macaca Mulatta
  misc_feature (1)...(1982): n = A,T,C or G
tgttggagcagaactactgagcaaaagcaggcattgtatcntcagttgtcatcaagtttgcaatcagattggaaaagttcaacttgaagctttcttgcctgcagtgaagcagagagatacatattattcacgtaataaaaaacatgggcttcaacctgactttccacctttcctacaaattacgattactgttgcttctgactttgtgccttacggtggttgggtgggccaccagtaactacttcgtgggtgccattcaagagattcctaaagcaaaggagcttgtggctaatttccataaggccctcattttggggaagggaaaaactctgactaatgaagcatccacgcagaaagcagaacttgacaactgcccttctgtatctccttacctcannnnnnnnnnnnnnnnnnnnnnnaccagatctcactttggaagaggtacaggcagaaaatcccaaggtggccagaggccggtatcgccctgaggaatgtagagctttacagagggtcgccatcctcattccccaccggaacagagagaaacacctgatgtacctgctggaacatctgcatcccttcctgcagaggcagnnnnnnnnnnnnnnnnnnnnnnnnnnnnnnnnnnnnnnnnnnnnnnnnnnnnnnnnnnnnnnnnnnnnnnnnnnnnnnnnnnnnnnnnnnnnnnnnnnnnnnnnnnnnnnnnnnnnnnnnnnnnnnnnnnnnnnnnnnnnnnnnnnnnnnnnnnnnnnnnnnnnnnnnnnnnnnnnnnnnnnnnnnnnnnnnnnnnnnnnnnnnnnnnnnnnnnnnnnnnnnnnnnnnnnnnnnnnnnnnnnnnnnnnnnnnnnnnnnnnnnnnnnnnnnnnnnnnnnnnnnnnnnnnnnnnnnnnnnnnnnnnnnnnnnnnnnnnnnnnnnnnnnnnnnnnnnnnnnnnnnnnnnnnnnnnnnnnnnnnnnnnnnnnnnnnnnnnnnnnnnnnnnnnnnnnnnnnnnnnnnnnnnnnnnnnnnnnnnnnnnnnnnnnnnnnnnnnnnnnnnnnnnnnnnnnnnnnnnnnnnnnnnnnnnnnnnnnnnnnnnnnnnnnnnnnnnnnnnnnnnnnnnnnnnnnnnnnnnnnnnnnnnnnnnnnnnnnnnnnnnnnnnnnnnnnnnnnnnnnnnnnnnnnnnnnnnnnnnnnnnnnnnnnnnnnnnnnnnnnnnnnnnnnnnnnnnnnnnnnnnnnnnnnnnnnnnnnnnnnnnnnnnnnnnnnnnnnnnnnnnnnnnnnnnnnnnnnnnnnnnnnnnnnnnnnnnnnnnnnnnnnnnnnnnnnnnnnnnnnnnnnnnnnnnnnnnnnnnnnnnnnnnnnnnnnnnnnnnnnnnnnnnnnnnnnnnnnnnnnnnnnnnnnnnnnnnnnnnnnnnnnnnnnnnnnnnnnnnnnnnnnnnnnnnnnnnnnnnnnnnnnnnnnnnnnnnnnnnnnnnnnnnnnnnnnnnnnnnnnnnnnnnnnnnnnnnnnnnnnnnnnnnnnnnnnnnnnnnnnnnnnnnnnnnnnnnnnnnnnnnnnnnnnnnnnnnnnnnnnnnnnnnnnnnnnntgttcttgtccagtgtagaaaggtacgaagatacaatactgttattcatttatcctgtacaatcgtctgtgaagtggtgggtcccaggtgagaagaaggccacaaaagaggggagaaaaggtgacgaatcaagatggagtgaacttgggaatgaatgggtagcaggagggcagagtgtctcctgcagaggcagcagcagctgagctggttgcagctgctgatagcctgcaggggaggcacctgcctaggtatgccttccagtgatgcccaccagaggacacattatctattagtttttagagtttttgtaaaatgattttgtacaagtaggatatgaagtagcagtttacaagtttacatattaactgataatcagtatgtctatcaaatacctctgtagtaaaatgtgaaaaag

SEQ ID NO: 26783 - DNA, 3657 bp, Macaca Mulatta
  misc_feature (1)...(3657): n = A,T,C or G
cagatgctccagtggctttgaccgctatcgccaggaatggatggactatggctgtgcacaggagnnnnnnnnnnnnnnnnnnnnnnnnnnnnnnnnnnnnnnnnnnnnnnnnnnnnnnnnnnnnnnnnnnnnnnnnnnnnnnnnnnnnnnnnnnnnnnnnnnnnnnnnnnnnnnnnnnnnnnnnnnnnnnnnnnnnnnnnnnnnnnnnnnnnnnnnnnnnnnnnnnnnnnnnnnnnnnnnnnnnnnnnnnnnnnnnnnnnnnnnnnnnnnnnnnnnnnnnnnnnnnnnnnnnnnnnnnnnnnnnnnnnnnnnnnnnnnnnnnnnnnnnnnnnnnnnnnnnnnnnnnnnnnnnnnnnnnnnnnnnnnnnnnnnnnnnnnnnnnnnnnnnnnnnnnnnnnnnnnnnnnnnnnnnnnnnnnnnnnnnnnnnnnnnnnnnnnnnnnnnnnnnnnnnnnnnnnnnnnnnnnnnnnnnnnnnnnnnnnnnnnnnnnnnnnnnnnnnnnnnnnnnnnnnnnnnnnnnnnnnnnnnnnnnnnnnnnnnnnnnnnnnnnnnnnnnnnnnnnnnnnnnnnnnnnnnnnnnnnnnnnnnnnnnnnnnnnnnnnnnnnnnnnnnnnnnnnnnnnnnnnnnnnnnnnnnnnnnnnnnnnnnnnnnnnnnnnnnnnnnnnnnnnnnnnnnnnnnnnnnnnnnnnnnnnnnnnnnnnnnnnnnnnnnnnnnnnnnnnnnnnnnnnnnnnnnnnnnnnnnnnnnnnnnnnnnnnnnnnnnnnnnnnnnnnnnnnnnnnnnnnnnnnnnnnnnnnnnnnnnnnnnnnnnnnnnnnnnnnnnnnnnnnnnnnnnnnnnnnnnnnnnnnnnnnnnnnnnnnnnnnnnnnnnnnnnnnnnnnnnnnnnnnnnnnnnnnnnnnnnnnnnnnnnnnnnnnnnnnnnnnnnnnnnnnnnnnnnnnnnnnnnnnnnnnnnnnnnnnnnnnnnnnnnnnnnnnnnnnnnnnnnnnnnnnnnnnnnnnnnnnnnnnnnnnnnnnnnnnnnnnnnnnnnnnnnnnnnnnnnnnnnnnnnnnnnnnnnnnnnnnnnnnnnnnnnnnnnnnnnnnnnnnnnnnnnnnnnnnnnnnnnnnnnnnnnnnnnnnnnnnnnnnnnnnnnnnnnnnnnnnnnnnnnnnnnnnnnnnnnnnnnnnnnnnnnnnnnnnnnnnnnnnnnnnnnnnnnnnnnnnnnnnnnnnnnnnnnnnnnnnnnnnnnnnnnnnnnnnnnnnnnnnnnnnnnnnnnnnnnnnnnnnnnnnnnnnnnnnnnnnnnnnnnnnnnnnnnnnnnnnnnnnnnnnnnnnnnnnnnnnnnnnnnnnnnnnnnnnnnnnnnnnnnnnnnnnnnnnnnnnnnnnnnnnnnnnnnnnnnnnnnnnnnnnnnnnnnnnnnnnnnnnnnnnnnnnnnnnnnnnnnnnnnnnnnnnnnnnnnnnnnnnnnnnnnnnnnnnnnnnnnnnnnnnnnnnnnnnnnnnnnnnnnnnnnnnnnnnnnnnnnnnnnnnnnnnnnnnnnnnnnnnnnnnnnnnnnnnnnnnnnnnnnnnnnnnnnnnnnnnnnnnnnnnnnnnnnnnnnnnnnnnnnnnnnnnnnnnnnnnnnnnnnnnnnnnnnnnnnnnnnnnnnnnnnnnnnnnnnnnnnnnnnnnnnnnnnnnnnnnnnnnnnnnnnnnnnnnnnnnnnnnnnnnnnnnnnnnnnnnnnnnnnnnnnnnnnnnnnnnnnnnnnnnnnnnnnnnnnnnnnnnnnnnnnnnnnnnnnnnnnnnnnnnnnnnnnnnnnnnnnnnnnnnnnnnnnnnnnnnnnnnnnnnnnnnnnnnnnnnnnnnnnnnnnnnnnnnnnnnnnnnnnnnnnnnnnnnnnnnnnnnnnnnnnnnnnnnnnnnnnnnnnnnnnnnnnnnnnnnnnnnnnnnnnnnnnnnnnnnnnnnnnnnnnnnnnnnnnnnnnnnnnnnnnnnnnnnnnnnnnnnnnnnnnnnnnnnnnnnnnnnnnnnnnnnnnnnnnnnnnnnnnnnnnnnnnnnnnnnnnnnnnnnnnnnnnnnnnnnnnnnnnnnnnnnnnnnnnnnnnnnnnnnnnnnnnnnnnnnnnnnnnnnnnnnnnnnnnnnnnnnnnnnnnnnnnnnnnnnnnnnnnnnnnnnnnnnnnnnnnnnnnnnnnnnnnnnnnnnnnnnnnnnnnnnnnnnnnnnnnnnnnnnnnnnnnnnnnnnnnnnnnnnnnnnnnnnnnnnnnnnnnnnnnnnnnnnnnnnnnnnnnnnnnnnnnnnnnnnnnnnnnnnnnnnnnnnnnnnnnnnnnnnnnnnnnnnnnnnnnnnnnnnnnnnnnnnnnnnnnnnnnnnnnnnnnnnnnnnnnnnnnnnnnnnnnnnnnnnnnnnnnnnnnnnnnnnnnnnnnnnnnnnnnnnnnnnnnnnnnnnnnnnnnnnnnnnnnnnnnnnnnnnnnnnnnnnnnnnnnnnnnnnnnnnnnnnnnnnnnnnnnnnnnnnnnnnnnnnnnnnnnnnnnnnnnnnnnnnnnnnnnnnnnnnnnnnnnnnnnnnnnnnnnnnnnnnnnnnnnnnnnnnnnnnnnnnnnnnnnnnnnnnnnnnnnnnnnnnnnnnnnnnnnnnnnnnnnnnnnnnnnnnnnnnnnnnnnnnnnnnnnnnnnnnnnnnnnnnnnnnnnnnnnnnnnnnnnnnnnnnnnnnnnnnnnnnnnnnnnnnnnnnnnnnnnnnnnnnnnnnnnnnnnnnnnnnnnnnnnnnnnnnnnnnnnnnnnnnnnnnnnnnnnnnnnnnnnnnnnnnnnnnnnnnnnnnnnnnnnnnnnnnnnnnnnnnnnnnnnnnnnnnnnnnnnnnnnnnnnnnnnnnnnnnnnnnnnnnnnnnnnnnnnnnnnnnnnnnnnnnnnnnnnnnnnnnnnnnnnnnnnnnnnnnnnnnnnnnnnnnnnnnnnnnnnnnnnnnnnnnnnnnnnnnnnnnnnnnnnnnnnnnnnnnnnnnnnnnnnnnnnnnnnnnnnnnnnnnnnnnnnnnnnnnnnnnnnnnnnnnnnnnnnnnnnnnnnnnnnnnnnnnnnnnnnnnnnnnnnnnnnnnnnnnnnnnnnnnnnnnnnnnnnnnnnnnnnnnnnnnnnnnnnnnnnnnnnnnnnnnnnnnnnnnnnnnnnnnnnnnnnnnnnnnnnnnnnnnnnnnnnnnnnnnnnnnnnnnnnnnnnnnnnnnnnnnnnnnnnnnnnnnnnnnnnnnnnnnnnnnnnnnnnnnnnnnnnnnnnnnnnnnnnnnnnnnnnnnnnnnnnnnnnnnnnnnnnnnnnnnnnnnnnnnnnnnnnnnnnnnnnnnnnnnnnnnnnnnnnnnnnnnnnnnnnnnnnnnnnnnnnnnnnnnnnnnnnnnnnnnnnnnnnnnnnnnnnnnnnnnnnnnnnnnnnnnnnnnnnnnnnnnnnnnnnnnnnnnnnnnnnnnnnnnnnntgagacacacacaggtggtagatgctttgctggtgggctgtgcttccctcatccagagagctctgttacagcccactgtgtccttcagaagcttgaaaggaacccaaatctttgctgcgctgtcctttttcttcctctaattcagaccctccttccaccagcacccctctacctccaccctcagctcttccttgcctaaaatatgaagcagggctgaggccccacgtttccaactc

SEQ ID NO: 26784 - DNA, 2425 bp, Macaca Mulatta
  misc_feature (1)...(2425): n = A,T,C or G
attcagccggaacacaactccagctactattagaactattattattcatgattcctctccaaatctagcnccttggcttctgatgtcaggatttctcccttcctcctagaaacttgataagtgtcctgcacttccctttttctaagactacacgtttgtcatcttataaagcaaagcagtgaataaaggaaccaagtcaataacttctggaatatctgcaaacaacaataatatcagctatgccatctttcattattttagccagtatcaagttgaatgaacgtagaaaaatacaaaactgaattcttccctgtaaattccccgttttgacgacgtacttgtagccacgcctacttaagacaattacaaaaggcgaagaagactgactcaggcttaagctgccagccagagagggagtcatttcattggcgtttgagtcagcaaannnnnnnnnnnnnnnnnnnnnnnnnnnnnnnnnnnnnnnnnnnnnnnnnnnnnnnnnnnnnnnnnnnnnnnnnnnnnnnnnnnnnnnnnnnnnnnnnnnnnngaaatccttctatgatgtaagctatggcccactccatgaaggctgcatggatcagtctgtgtctctgagtatctctgaaatctctaaaacatccaagctgaccttcaagcagagcatggtggtagtatcaaccaatgggaaggttctgaagaagagacggttgagtttaagccagtccatcactgataataacctggaggccatcgccaacgactcagaggaagnnnnnnnnnnnnnnnnnnnnnnnnnnnnnnnnnnnnnnnnnnnnnnnnnnnnnnnnnnnnnnnnnnnnnnnnnnnnnnnnnnnnnnnnnnnnnnnnnnnnnnnnnnnnnnnnnnnnnnnnnnnnnnnnnnnnnnnnnnnnnnnnnnnnnnnnnnnnnnnnnnnnnnnnagtgaaatttgacatgggtgcttatacgtcatcaaaggatgatactaaagttcctgtgattctaagaatctcaaaaactcaattgtatgtgagtgcccaagannnnnnnnnnnnnnnnnnnnnnnnnnnnnnnnnnnnnnnnnnnnnnnnnnnnnnnnnnnnnnnnnnnnnnnnnnnnnnnnnnnnnnnnnnnnnnnnnnnnnnnnnnnnnnnnnnnnnnnnnnnnnnnnnnnnnnnnnnnnnnnnnnnnnnnnnnnnnnnnnnnnnnnnnnnnnnnnnnnnnnnnnnnnnnnnnnnnnnnnnnnnnnnnnnnnnnnnnnnnnnnnnnnnnnnnnnnnnnnnnnnnnnnnnnnnnnnnnnnnnnnnnnnnnnnnnnnnnnnnnnnnnnnnnnnnnnnnnnnnnnnnnnnnnnnnnnnnnnnnnnnnnnnnnnnnnnnnnnnnnnnnnnnnnnnnnnnnnnnnnnnnnnnnnnnnnnnnnnnnnnnnnnnnnnnnnnnnnnnnnnnnnnnnnnnnnnnnnnnnnnnnnnnnnnnnnnnnnnnnnnnnnnnnnnnnnnnnnnnnnnnnnnnnnnnnnnnnnnnnnnnnnnnnnnnnnnnnnnnnnnnnnnnnnnnnnnnnnnnnnnnnnnnnnnnnnnnnnnnnnnnnnnnnnnnnnnnnnnnnnnnnnnnnnnnnnnnnnnnnnnnnnnnnnnnnnnnnnnnnnnnnnnnnnnnnnnnnnnnnnnnnnnnnnnnnnnnnnnnnnnnnnnnnnnnnnnnnnnnnnnnnnnnnnnnnnnnnnnnnnnnnnnnnnnnnnnnnnnnnnnnnnnnnnnnnnnnnnnnnnnnnnnnnnnnnnnnnnnnnnnnnnnnnnnnnnnnnnnnnnnnnnnnnnnnnnnnnnnnnnnnnnnnnnnnnnnnnnnnnnnnnnnnnnnnnnnnnnnnnnnnnnnnnnnnnnnnnnnnnnnnnnnnnnnnnnnnnnnnnnnnnnnnnnnnnnnnnnnnnnnnnnnnnnnnnnnnnnnnnnnnnnnnnnnnnnnnnnnnnnnnnnnnnnnnnnnnnnnnnnnnnnnnnnnnnnnnnnnnnnnnnnnnnnnnnnnnnnnnnnnnnnnnnnnnnnnnnnnnnnnnnnnnnnnnnnnnnnnnnnnnnnnnnnnnnnnnnnnnnnnnnnnnnnnnnnnnnntaattatataataaatgtatattaattactttgagctgataattggtccaatctttgactcttttgcaattaaacttgcctgggcgttcttgtttcattcaattccacctgcaatcaagtccaacaagctaaaattagatgaactcaactttgacaaccatgagaccactgttatcaaaactttcttttctggaatgtaatcaacgtttcttctaggttataaaaattgtgatcagaccatatgttacattattatcaacaatagtgattgatagattattatcagtcataactgaataaagcttgcaacaaaattctctgactcat

SEQ ID NO: 26785 - DNA, 668 bp, Macaca Mulatta
cgggatgtcggtggccttcgtaccggactggctgaggggcaaggcggaagtcaatcaagagactatccagcggctccttgaggagaatgaccagctgatccgctgtattgtggagtatcagaacaagggccgggggaacgagtgcgtccagtaccagcatgtgttacatagaaatctcatttatttggctaccattgcagatgccagtccaaccagcacttcaaaagcaatggaataatctttcaaaagcaatagaataatcttccatttggctgtcatgaggagtaattgaatgtaatccatctcttacaaaatggagacagggtctttatcagctcaactggttaaaacatgaatgaaacctccgtggctctttcaaaaaatgtgaaaatgtgaagaaagctcctaacttaactgtattctcaatgtaaatattttttaaataattaagcaaatccctcaataagttgagcccaggtgtcctctttcctgaacttggagcatgtttggaccacaaagacatcactgggatgttcaagtctactttttagtttcaacctgaagaggaaactgagtacgtgttgggcaggaattggtgagaatcctgacttgagaccttgctaaatggacatgtaacctgtatgctccttccttaccagtttgcaaat

SEQ ID NO: 26786 - DNA, 611 bp, Macaca Mulatta
taggcacacgtggctttattgaccagtccagccacccagctcagagaaaggtgctgggtgccaggcccaggtacagaacgggcaaggcagagaggatgagcaggaggaagaagcagggatgtggccccagcccgtcggccaggcctccagccagagcgcccagcagcagcttccccagtagttccagagtggccagaaggctgtagtgtgtggcctgagggggtgggggtcaggatcagagtaaggcccacacagccccagccctgcagtccctctgtgtccctgcaatgtgtcctcacctgcagggccctgggggccagctggctgcaacgcatcatcccagtgaaggtgactgtggtgaccaggcctcccaagaagtgctgcagacataggctcagcaaggctgaccctgggagggcagaggtcagcagtgccccaggctcctggccccttttcctccctcctcaaagccagcctctcacctctcaagattgtgccagggcccatgctggcccccagggtgtccaggtggaagaccaaggcagtctggcaggctaggcccccgaagcggagccgcagcactgacctcaacggaggcagcagttccctgg

SEQ ID NO: 26787 - DNA, 190 bp, Macaca Mulatta
gaatgactatcggaagctctccatgcagtgcaaagactttgtagtgggtgtgctggatctctgccgagactcagaagaggtagaagccattctgaatggagatctggagtcagcagaacctctggaggtacacaggcacaaagcttcattaagtcgtgtcaaacttgccattaagtatgaagtcaaaaag

SEQ ID NO: 26788 - DNA, 215 bp, Macaca Mulatta
agatggaagggatggatgatgaccctgaagaccgcatgtcctacttaaccgccatgggcgcggactatctgagttgcgacagccgcctcatcagtgactttgaagacacggacggcgaaggaggcgcctacactgacaatgagctggatgagccagccgaggagccgctggtgtcgtccatcacccgctcctcggagccggtgcagcacgaggag

SEQ ID NO: 26789 - DNA, 1385 bp, Macaca Mulatta
  misc_feature (1)...(1385): n = A,T,C or G
tnnnnnccggcccccctcgagtttttctgttgtgtttaaatttatttattattattatactttaagttgtagggtacatgtgcataacgtgcaggtttgttacatatgtatacttgtgccggtatgatcttgaagttatcagaaacttgtattcaagagtcattgtcagagtcttttccatatatctcgttgaagaaaaagcaattttggactgtagctgaatataaatactttgaggaagaatcaaagcaactgtctgccagtcttcctgaaatacagaaatgacatcatggttgttgtttcggaataacccaagatagatatcctcttcctaaaggagcagagactatgaccatcttgaatgtggaacattccctgccagtggctgagttacgagcagagcaaccatagatcccgttatgctttgtactaatttgggggataaagagctcttgtcctgattgcacaaacttcccattaatcgtccaagaatactctgccggtgggttagagttcgcgaggcaggacaagtagaggttatctcctgaacggtaatccgtgaatgaagggaaaatcctggggaagtcaggaccataaaggagattcagggtgactgggtcactgcggctggaactcactgggttcttcatttcacattcatagggtcctgcagtatcctttgtgacaccaaatagaacgagggtcctgttgtttccagacagctgccacttgcgactgatagggaggctctgaccgtttatccaccacaggtagcttacatcctgagtgtcaggatcacaggataagatcacagtctccacggcctctctggggtttaagttgctgctggagatgtagggcttgggagtctccaggtataaggtgaaatgtccaattactcctttagtcttatcaccttgctttatcatttgaatggtgtaggatcctgtgtccttcttggtgacattctggatcagcagggatgcattggaatatactgtttctcgtccactgtatgcaggcccaaatataattgtttcagtgtctattgtatatgatgtaatgtaatggtggaagtccgtttttttgccctttgtaccagatgtaggcagtaagattctggggcaaattgtggacaagtagaagaacatccttcccctcagaaactttggttggctgagcttcaatcgtgacttgggcagtggtgggcgtgttccagaagattaaaagtgatgctgtgagcaggagctccttccaggtgatgtgcagtgtgtagggaggcgctgagaggggccccatggcctgtgctgcctgtgtgttctcctctgtggagatgaccttggatccaaaatctttccgagcctcgtgccagctgtgctgtccta

SEQ ID NO: 26790 - DNA, 348 bp, Macaca Mulatta
tgggtctggaagttggcacgaacagacacactccatgtttgtcccacactcactcactttcttaggagcccacttctcatccaacttttcccttctcagtttctctgtcaaaagtcttaattctgtgtcagtaagtctttaacacgtactagtgtccctgagaacacagacagtgaccactgccctgggttgtgatatcacaggaggccagggaggggcaaaggctcaggccaagagtcaacgctgtgggaggccggtcagtagccactccctccagagcgcacctgcaggtctgccatctacggccctttctggcaagagaagggcccaggaaggatgttcccataa

SEQ ID NO: 26791 - DNA, 1159 bp, Macaca Mulatta
  misc_feature (1)...(1159): n = A,T,C or G
tggacagttttgtacagtaggaanttcttattaattcaggatcaagatatgaagcaaaatatcttagtggaattgctcactttttggaaaaattggcattttcgngtctactgctcgatttgacagcaaagatgaaattctgcttacactggaaaagcacgggggtatttgtgactgccagacatcaagnnnnnnnnnnnnnnnnnnnnnnnnnnnnnnnnnnnnnnnnnnnnnnnnnnnnnnnnnnnnnnnnnnnnnnnnnnnnnnnnnnnnnnnnnnnnnnnnnnnnnnnnnnnnnnnnnnnnnnnnnnnnnnnnnnnnnnnnnnnnnnnnnnnnnnnnnnnnnnnnnnnnnnnnnnnnnnnnnnnnnnnnnnnnnnnnnnnngcggcttacagggagaacacagttggcctccaccgtttctgccccacagaaaacatagccaagatcaatcgggaggtgctgcattcctacctgaggaactactacactcccgaccgcatggtgctggccggtgtgggtgtggagcacgaacatctggtggactgtgcccagaagtacctcctggnnnnnnnnnnnnnnnnnnnnnnnnnnnnnnnnnnnnnnnnnnnnnnnnnnnnnnnnnnnnnnnnnnnnnnnnnnnnnnnnnnnnnnnnnnnnnnnnnnnnnnnnnnnnnnnnnnnnnnnnnnnnnnnnnnnnnnnnnnnnnnnnnnnnnnnnnnnnnnnnnnnnnnnnnnnnnnnnnnnnnnnnnnnnnnnnnnnnnnnnnnnnnnnnnnnnnnnnnnnnnnnnnnnnnnnnnnnnnnnnnnnnnnnnnnnnnnnnnnnnnnnnnnnnnnnnnnnnnnnnnnnnnnnnnnnnnnnnnnnnnnnnnnnnnnnnnnnnnnnnnnnnnnnnnnnnnnnnnnnnnnnnnnnnnnnnnnnnnnnnnnnnnnnnnnnnnnnnnnnnnnnnnnnnnnnnnnnnnnnnnnnnnnnnnnnnnnnnnnnnnnnnnnnnnnnnnnnnnnnnnnnnggtggagctggaacgagccaagacacagctgacgtccatgctcatgatgaacctggagtccaggcctgtgatcttcgaggatgtggggaggcaggtgctggccactcgctccagaaagctgccgcatgagctgtgcacgctcatcc

SEQ ID NO: 26792 - DNA, 6742 bp, Macaca Mulatta
  misc_feature (1)...(6742): n = A,T,C or G
ggtaaacctctccagttgactcttcaggcatgtgatgtcaaaggaaaagaagataagtctggacccgaaaacctccttgttgaaccatggacaagggatggnnnnnnnnnnnnnnnnnnnnnnnnnnnnnnnnnnnnnnnnnnnnnnnnnnnnnnnnnnnnnnnnnnnnnnnnnnnnnnnnnnnnnnnnnnnnnnnnnnnnnnnnnnnnnnnnnnnnnnnnnnnnnnnnnnnnnnnnnnnnnnnnnnnnnnnnnnnnnnnnnnnnnnnnnnnnnnnnnnnnnnnnnnnnnnnnnnnnnnnnnnnnnnnnnnnnnnnnnnnnnnnnnnnnnnnnnnnnnnnnnnnnnnnnnnnnnnnnnnnnnnnnnnnnnnnnnnnnnnnnnnnnnnnnnnnnnnnnnnnnnnnnnnnnnnnnnnnnnnnnnnnnnnnnnnnnnnnnnnnnnnnnnnnnnnnnnnnnnnnnnnnnnnnnnnnnnnnnnnnnnnnnnnnnnnnnnnnnnnnnnnnnnnnnnnnnnnnnnnnnnnnnnnnnnnnnnnnnnnnnnnnnnnnnnnnnnnnnnnnnnnnnnnnnnnnnnnnnnnnnnnnnnnnnnnnnnnnnnnnnnnnnnnnnnnnnnnnnnnnnnnnnnnnnnnnnnnnnnnnnnnnnnnnnnnnnnnnnnnnnnnnnnnnnnnnnnnnnnnnnnnnnnnnnnnnnnnnnnnnnnnnnnnnnnnnnnnnnnnnnnnnnnnnnnnnnnnnnnnnnnnnnnnnnnnnnnnnnnnnnnnnnnnnnnnnnnnnnnnnnnnnnnnnnnnnnnnnnnnnnnnnnnnnnnnnnnnnnnnnnnnnnnnnnnnnnnnnnnnnnnnnnnnnnnnnnnnnnnnnnnnnnnnnnnnnnnnnnnnnnnnnnnnnnnnnnnnnnnnnnnnnnnnnnnnnnnnnnnnnnnnnnnnnnnnnnnnnnnnnnnnnnnnnnnnnnnnnnnnnnnnnnnnnnnnnnnnnnnnnnnnnnnnnnnnnnnnnnnnnnnnnnnnnnnnnnnnnnnnnnnnnnnnnnnnnnnnnnnnnnnnnnnnnnnnnnnnnnnnnnnnnnnnnnnnnnnnnnnnnnnnnnnnnnnnnnnnnnnnnnnnnnnnnnnnnnnnnnnnnnnnnnnnnnnnnnnnnnnnnnnnnnnnnnnnnnnnnnnnnnnnnnnnnnnnnnnnnnnnnnnnnnnnnnnnnnnnnnnnnnnnnnnnnnnnnnnnnnnnnnnnnnnnnnnnnnnnnnnnnnnnnnnnnnnnnnnnnnnnnnnnnnnnttaatgctcagtggggccccctgagaggttggctctgtgctcttctccctgttctggtcctttaaggcagcctgctatcctggtgctacctgcagctgaagagcacggactctggagccaaagatcttgccgtggaccttattgaaaaatnnnnnnnnnnnnnnnnnnnnnnnnnnnnnnnnnnnnnnnnnnnnnnnnnnnnnnnnnnnnnnnnnnnnnnnnnnnnnnnnnnnnnnnnnnnnnnnnnnnnnnnnnnnnnnnnnnnnnnnnnnnnnnnnnnnnnnnnnnnnnnnnnnnnnnnnnnnnnnnnnnnnnnnnnnnnnnnnnnnnnnnnnnnnnnnnnnnnnnnnnnnnnnnnnnnnnnnnnnnnnnnnnnnnnnnnnnnnnnnnnnnnnnnnnnnnnnnnnnnnnnnnnnnnnnnnnnnnnnnnnnnnnnnnnnnnnnnnnnnnnnnnnnnnnnnnnnnnnnnnnnnnnnnnnnnnnnnnnnnnnnnnnnnnnnnnnnnnnnnnnnnnnnnnnnnnnnnnnnnnnnnnnnnnnnnnnnnnnnnnnnnnnnnnnnnnnnnnnnnnnnnnnnnnnnnnnnnnnnnnnnnnnnnnnnnnnnnnnnnnnnnnnnnnnnnnnnnnnnnnnnnnnnnnnnnnnnnnnnnnnnnnnnnnnnnnnnnnnnnnnnnnnnnnnnnnnnnnnnnnnnnnnnnnnnnnnnnnnnnnnnnnnnnnnnnnnnnnnnnnnnnnnnnnnnnnnnnnnnnnnnnnnnnnnnnnnnnnnnnnnnnnnnnnnnnnnnnnnnnnnnnnnnnnnnnnnnnnnnnnnnnnnnnnnnnnnnnnnnnnnnnnnnnnnnnnnnnnnnnnnnnnnnnnnnnnnnnnnnnnnnnnnnnnnnnnnnnnnnnnnnnnnnnnnnnnnnnnnnnnnnnnnnnnnnnnnnnnnnnnnnnnnnnnnnnnnnnnnnnnnnnnnnnnnnnnnnnnnnnnnnnnnnnnnnnnnnnnnnnnnnnnnnnnnnnnnnnnnnnnnnnnnnnnnnnnnnnnnnnnnnnnnnnnnnnnnnnnnnnnnnnnnnnnnnnnnnnnnnnnnnnnnnnnnnnnnnnnnnnnnnnnnnnnnnnnnnnnnnnnnnnnnnnnnnnnnnnnnnnnnnnnnnnnnnnnnnnnnnnnnnnnnnnnnnnnnnnnnnnnnnnnnnnnnnnnnnnnnnnnnnnnnnnnnnnnnnnnnnnnnnnnnnnnnnnnnnnnnnnnnnnnnntcaacagtggaggcaaaatagccctgagtgatgagtttgcccaggtttattccttggcagatgggattcgaatatggatgnnnnnnnnnnnnnnnnnnnnnnnnnnnnnnnnnnnnnnnnnnnnnnnnnnnnnnnnnnnnnnnnnnnnnnnnnnnnnnnnnnnnnnnnnnnnnnnnnnnnnnnnnnnnnnnnnnnnnnnnnnnnnnnnnnnnnnnnnnnnnnnnnnnnnnnnnnnnnnnnnnnnnnnnnnnnnnnnnnnnnnnnnnnnnnnnnnnnnnnnnnnnnnnnnnnnnnnnnnnnnnnnnnnnnnnnnnnnnnnnnnnnnnnnnnnnnnnnnnnnnnnnnnnnnnnnnnnnnnnnnnnnnnnnnnnnnnnnnnnnnnnnnnnnnnnnnnnnnnnnnnnnnnnnnnnnnnnnnnnnnnnnnnnnnnnnnnnnnnnnnnnnnnnnnnnnnnnnnnnnnnnnnnnnnnnnnnnnnnnnnnnnnnnnnnnnnnnnnnnnnnnnnnnnnnnnnnnnnnnnnnnnnnnnnnnnnnnnnnnnnnnnnnnnnnnnnnnnnnnnnnnnnnnnnnnnnnnnnnnnnnnnnnnnnnnnnnnnnnnnnnnnnnnnnnnnnnnnnnnnnnnnnnnnnnnnnnnnnnnnnnnnnnnnnnnnnnnnnnnnnnnnnnnnnnnnnnnnnnnnnnnnnnnnnnnnnnnnnnnnnnnnnnnnnnnnnnnnnnnnnnnnnnnnnnnnnnnnnnnnnnnnnnnnnnnnnnnnnnnnnnnnnnnnnnnnnnnnnnnnnnnnnnnnnnnnnnnnnnnnnnnnnnnnnnnnnnnnnnnnnnnnnnnnnnnnnnnnnnnnnnnnnnnnnnnnnnnnnnnnnnnnnnnnnnnnnnnnnnnnnnnnnnnnnnnnnnnnnnnnnnnnnnnnnnnnnnnnnnnnnnnnnnnnnnnnnnnnnnnnnnnnnnnnnnnnnnnnnnnnnnnnnnnnnnnnnnnnnnnnnnnnnnnnnnnnnnnnnnnnnnnnnnnnnnnnnnnnnnnnnnnnnnnnnnnnnnnnnnnnnnnnnnnnnnnnnnnnnnnnnnnnnnnnnnnnnnnnnnnnnnnnnnnnnnnnnnnnnnnnnnnnnnnnnnnnnnnnnnnnnnnnnnnnnnnnnnnnnnnnnnnnnnnnnnnnnnnnnnnnnnnnnnnnnnnnnnnnnnnnnnnnnnnnnnnnnnnnnnnnnnnnnnnnnnnnnnnnnnnnnnnnnnatgtttattgctcgctactgtgacctgtnnnnnnnnnnnnnnnnnnnnnnnnnnnnnnnnnnnnnnnnnnnnnnnnnnnnnnnnnnnnnnnnnnnnnnnnnnnnnnnnnnnnnnnnnnnnnnnnnnnnnnnnnnnnnnnnnnnnnnnnnnnnnnnnnnnnnnnnnnnnnnnnnnnnnnnnnnnnnnnnnnnnnnnnnnnnnnnnnnnnnnnnnnnnnnnnnnnnnnnnnnnnnnnnnnnnnnnnnnnnnnnnnnnnnnnnnnnnnnnnnnnnnnnnnnnnnnnnnnnnnnnnnnnnnnnnnnnnnnnnnnnnnnnnnnnnnnnnnnnnnnnnnnnnnnnnnnnnnnnnnnnnnnnnnnnnnnnnnnnnnnnnnnnnnnnnnnnnnnnnnnnnnnnnnnnnnnnnnnnnnnnnnnnnnnnnnnnnnnnnnnnnnnnnnnnnnnnnnnnnnnnnnnnnnnnnnnnnnnnnnnnnnnnnnnnnnnnnnnnnnnnnnnnnnnnnnnnnnnnnnnnnnnnnnnnnnnnnnnnnnnnnnnnnnnnnnnnnnnnnnnnnnnnnnnnnnnnnnnnnnnnnnnnnnnnnnnnnnnnnnnnnnnnnnnnnnnnnnnnnnnnnnnnnnnnnnnnnnnnnnnnnnnnnnnnnnnnnnnnnnnnnnnnnnnnnnnnnnnnnnnnnnnnnnnnnnnnnnnnnnnnnnnnnnnnnnnnnnnnnnnnnnnnnnnnnnnnnnnnnnnnnnnnnnnnnnnnnnnnnnnnnnnnnnnnnnnnnnnnnnnnnnnnnnnnnnnnnnnnnnnnnnnnnnnnnnnnnnnnnnnnnnnnnnnnnnnnnnnnnnnnnnnnnnnnnnnnnnnnnnnnnnnnnnnnnnnnnnnnnnnnnnnnnnnnnnnnnnnnnnnnnnnnnnnnnnnnnnnnnnnnnnnnnnnnnnnnnnnnnnnnnnnnnnnnnnnnnnnnnnnnnnnnnnnnnnnnnnnnnnnnnnnnnnnnnnnnnnnnnnnnnnnnnnnnnnnnnnnnnnnnnnnnnnnnnnnnnnnnnnnnnnnnnnnnnnnnnnnnnnnnnnnnnnnnnnnnnnnnnnnnnnnnnnnnnnnnnnnnnnnnnnnnnnnnnnnnnnnnnnnnnnnnnnnnnnnnnnnnnnnnnnnnnnnnnnnnnnnnnnnnnnnnnnnnnnnnnnnnnnnnnnnnnnnnnnnnnnnnnnnnnnnnnnnnnnnnnnnnnnnnnnnnnnnnnnnnnnnnnnnnnnnnnnnnnnnnnnnnnnnnnnnnnnnnnnnnnnnnnnnnnnnnnnnnnnnnnnnnnnnnnnnnnnnnnnnnnnnnnnnnnnnnnnnnnnnnnnnnnnnnnnnnnnnnnnnnnnnnnnnnnnnnnnnnnnnnnnnnnnnnnnnnnnnnnnnnnnnnnnnnnnnnnnnnnnnnnnnnnnnnnnnnnnnnnnnnnnnnnnnnnnnnnnnnnnnnnnnnnnnnnnnnnnnnnnnnnnnnnnnnnnnnnnnnnnnnnnnnnnnnnnnnnnnnnnnnnnnnnnnnnnnnnnnnnnnnnnnnnnnnnnnnnnnnnnnnnnnnnnnnnnnnnnnnnnnnnnnnnnnnnnnnnnnnnnnnnnnnnnnnnnnnnnnnnnnnnnnnnnnnnnnnnnnnnnnnnnnnnnnnnnnnnnnnnnnnnnnnnnnnnnnnnnnnnnnnnnnnnnnnnnnnnnnnnnnnnnnnnnnnnnnnnnnnnnnnnnnnnnnnnnnnnnnnnnnnnnnnnnnnnnnnnnnnnnnnnnnnnnnnnnnnnnnnnnnnnnnnnnnnnnnnnnnnnnnnnnnnnnnnnnnnnnnnnnnnnnnnnnnnnnnnnnnnnnnnnnnnnnnnnnnnnnnnnnnnnnnnnnnnnnnnnnnnnnnnnnnnnnnnnnnnnnnnnnnnnnnnnnnnnnnnnnnnnnnnnnnnnnnnnnnnnnnnnnnnnnnnnnnnnnnnnnnnnnnnnnnnnnnnnnnnnnnnnnnnnnnnnnnnnnnnnnnnnnnnnnnnnnnnnnnnnnnnnnnnnnnnnnnnnnnnnnnnnnnnnnnnnnnnnnnnnnnnnnnnnnnnnnnnnnnnnnnnnnnnnnnnnnnnnnnnnnnnnnnnnnnnnnnnnnnnnnnnnnnnnnnnnnnnnnnnnnnnnnnnnnnnnnnnnnnnnnnnnnnnnnnnnnnnnnnnnnnnnnnnnnnnnnnnnnnnnnnnnnnnnnnnnnnnnnnnnnnnnnnnnnnnnnnnnnnnnnnnnnnnnnnnnnnnnnnnnnnnnnnnnnnnnnnnnnnnnnnnnnnnnnnnnnnnnnnnnnnnnnnnnnnnnnnnnnnnnnnnnnnnnnnnnnnnnnnnnnnnnnnnnnnnnnnnnnnnnnnnnnnnnnnnnnnnnnnnnnnnnnnnnnnnnnnnnnnnnnnnnnnnnnnnnnnnnnnnnnnnnnnnnnnnnnnnnnnnnnnnnnnnnnnnnnnnnnnnnnnnnnnnnnnnnnnnnnnnnnnnnnnnnnnnnnnnnnnnnnnnnnnnnnnnnnnnnnnnnnnnnnnnnnnnnnnnnnnnnnnnnnnnnnnnnnnnnnnnnnnnnnnnnnnnnnnnnnnnnnnnnnnnnnnnnnnnnnnnnnnnnnnnnnnnnnnnnnnnnnnnnnnnnnnnnnnnnnnnnnnnnnnnnnnnnnnnnnnnnnnnnnnnnnnnnnnnnnnnnnnnnnnnnnnnnnnnnnnnnnnnnnnnnnnnnnnnnnnnnnnnnnnnnnnnnnnnnnnnnnnnnnnnnnnnnnnnnnnnnnnnnnnnnnnnnnnnnnnnnnnnnnnnnnnnnnnnnnnnnnnnnnnnnnnnnnnnnnnnnnnnnnnnnnnnnnnnnnnnnnnnnnnnnnnnnnnnnnnnnnnnnnnaggataaagttcacattcctggtgccatctacctctcaatcaaattcgactctcagtgcaacacagaggagggctgtgacgagttagccatgtccagcagtagtgacttccagcaagaccgacacagcttcagcgggtctcagcagaagtggaaagattttgagcttccag

SEQ ID NO: 26793 - DNA, 351 bp, Macaca Mulatta
gttaccacgtcaacatcaggcctgaaccagtgtctctgaatgagaacacgtctctagcaaccagcatgtgcctgtcatctgcctcgtaagtcggagagagaacatgcttgatttttgctgtggcaaaagaacattggagggaaaaccctcatgatctttctttacagttgaccattatgtcatgtagaaattatatacttggctcaatggaagaagacaaatctttcatttttattttagtaaattttttaggaatgggtttcttcagagtgagtactcttagttaatattacacaggtagctgcaaagatattgtaatattctcttttggtatgtgtgatcttagtgact

SEQ ID NO: 26794 - DNA, 715 bp, Macaca Mulatta
  misc_feature (1)...(715): n = A,T,C or G
ggtctggggaggcgacaagacccctcaggagcccagccagtgcgaggagagcccagcagccatgtttctggttgggaagggcagtcctgacaagaaagccatgaagaagaaaggnnnnnnnnnnnnnnnnnnnnnnnnnnnnnnnnnnnnnnnnnnnncagctacggtgacaaagaacagcaatcaaaagggcaaagccaaaggaaaaggcaaaaagnnnnnnnnnnnnnnnnnnnnnnnnnnnnnnnnnnnnnnnnnnnnnnnnnnnnnnnnnnnnnnnnnnnnnnnnnnnnnnnnnnnnnnnnnnnnnnnnnnnnnnnnnnnnnnnnnnnnnnnnnnnnnnnnnnnnnnnnnnnnnnnnnnnnnnnnnnnnnnnnnnnnnnnnnnnnnnnnnnnnnnnnnnnnnnnnnnnnnnnnnnnnnnnnnnnnnnnnnnnnnnnnnnnnnnnnnnnnnnnnnnnnnnnnnnnnnnnnnnnnnnnnnnnnnnnnnnnnnnnnnnaggtccaacctcctggggaatcgcttcacggtctttgacaacgggcagaacccacagcgtgggtacagcactaatgtggcaagccttcggcaggagctggcagctgtgatctatgngaaaccaacgtgctgggcttccgtggcccccggcgcatgaccgtcatcattcctggcatgagtgcggagaacgagagggtccccatccggccccgaaatg

SEQ ID NO: 26795 - DNA, 845 bp, Macaca Mulatta
cagaggggtggcatgaagatggccatcctgcggctcgttgcaggagtgtctgaccctgcaccacttggtggtggagatcaaggggttgcttggactgcagcacctgggccgagatcacagtgatggtatctgtctgaatgtgctggtgactgtggcttttcggagcccagggatccaggatgaacccccaaagattcggggtgagaacttcttttggtggaaggtgactgaggaagacctgcaaagccagctcctcaagcggcttcagggatcctctgttgtcccagtgaacagatagggaggtggaggaggtgacaaggagctaggcagccatgctccctccagtgcagacatgtctctctctgagggaggcaagaggctggcgatcagggatcttgttgcattgggagcaggggcggctctcctggttcccgggagagatgctttgaggagcattcctctacattgcacaagggacagtgcctttaaccaagcaaggagtccaaagctcaggacctcacaaccctgagggcacactgacacctctccccagggggatggggagctttctgcaccaccagtggcatctcctcctcatgctctgtgccctccttgggaaaggcctgcatcctgatccttccaggcccttggagcctggaggggcactggggaaggtgtcctgagggaggagccccttgctgagtaaagaggtgttacttaccttgcctccctgcctaaacgtttctgtggggagcaagtgttggggactgctgtccaagagctgctgttcccatcgtgttacccacagctgcccatgcctttcccagtgcactgacagtgtgggc

SEQ ID NO: 26796 - DNA, 1363 bp, Macaca Mulatta
  misc_feature (1)...(1363): n = A,T,C or G
agtccgagaccagcctgcggggccgcgcatccgcggtcccgtccgggccccccaaataaaacacggcggagcgggaagagcctcggccgccacaaactagaaacggcccagcgcccacgctggcggcccaggccgcagggtcctgccgtcgctggcgctccactgcggagatcgacgctgctgatnnnnnnnnnnnnnnnnnnnnnnnnnnnnnnnnnnnnnnnnnnnnnnnnnnnnnnnnnnnncagctccccagcgtcgtctgctctacggctgcgcgggcagcgactcagagtgctcaaccgggcgcctggggcccctgggacgccgggggccnnnnnnnnnnnnnnnnnnnnnnnnnnnnnnnnnnnnnnnnnnnnnnnnnnnnnnnnnnnnnnnnnnnnnnnnnnnnnnnnnnnnnnnnnnnnnnnnnnnnnnnnnnnnnnnnnnnnnnnnnnnnnnnnnnnnnnnnnnnnnnnnnnnnnnnnnnnnnnnnnnnnnnnnnnnnnnnnnnnnnnnnnnnnnnnnnnnnnnnnnnnnnnnnnnnnnnnnnnnnnnnnnnnnnnnnnnnnnnnnnnnnnnnnnnnnnnnnnnnnnnnnnnnnnnnnnnntgagtttggggatttgcttgggctcccccttccttgactctgcacctccacactctcaaccactgacccttccacatctaccttccaaagaccatcgttttctctgcttccaaagacccccctcactgtccccactcctagcagtcttggttgaaaaggctcccccaccactagcgagaggaatggggaggagccctgtttgacccagttcagcttctagcttggaagtccttgggcaagacagttccccttctctgggcgtcacttttctcatctgtacagtaagtgtccatgtatgcaaaaggggtaatttggtttgaatttccccgttttagtttagaagcctagtctgtttgttccccttcaccactctctctctcattcctgatgagccctctcattcctcctttccttgcccagctatggccccctctcattcacaaagtgccccctccatgtccctggacctttaagatatccccttggcaccctggtcagagactctgtgtctgactcaggtggttcctgcagagtgccctgggaagggaaggagcactgatttgggggttttgagggtcaagtaggggttggcaacacctggaaagaaggactctttcacctcgattcctggacaattatggaggattcggaggtagaagaggggaaggaagatggtttctatctcataccccccactccctgtaagagggaatgggggaagcctgatgaccctcagctgttccaatctagta

SEQ ID NO: 26797 - DNA, 310 bp, Macaca Mulatta
agacttaatttgtaaatacttaaatgaaaaataatgaaaatggtaataaatatatttgctttcttttcttttttttaaacagggaagcatatagcaaacttttgtctcaccttggacaggtgggacgagatgagatgcagagactggaaaatgataatacttaatatattttgtgagtcatcctgtctattgattatcagtatctaaagccacattgttccactccaattcctacttttaattaattgtataatgttctgtttaaaataatttctaggatttttttcccttttatatctgtaagtaaaaa

SEQ ID NO: 26798 - DNA, 155 bp, Macaca Mulatta
ataatggctgtgcttaatcaaaagtctgtcctggatatgattaaagagtttcgaaagaactggcgtgctctttgtaactctgagagaactacgctatgtggtgcagactccatgctcttggcattgcagctttctatggcagagaaagacaaaca

SEQ ID NO: 26799 - DNA, 386 bp, Macaca Mulatta
  misc_feature (1)...(386): n = A,T,C or G
gtcctggaggccctgaatgtgctggtgaatagaccgaatatcaaggagcccctgcgggtggacctcgctgacctgctgacagagaatccggagctgttcagaaagaatgctgaagagttcaccctccaatatggagtggaccggccctcctaactcatgttctgaccctctgtgcactggatccttggcatggtggatggacacatctcatggactgaggccagagccccctatggccccctccccactcattttttctctcttaggttgttagtcnnnnnnnnnnnnnnnnnnnnnnnnnnnnnnnnnnnnnnnnnnnnnnnnnnnnnnnnnnnnactcactcccgggttcatctggccacaggtacacccttcccacagccttt

SEQ ID NO: 26800 - DNA, 129 bp, Macaca Mulatta
atggcctttccacgcaatagcatcatgcacttgaaccacacagcaaaccccacctcaaatagtaatttcttggacttgaatctcccgccacagcacaacacaggtctgggagggatccctgtagcaggt

SEQ ID NO: 26801 - DNA, 1331 bp, Macaca Mulatta
  misc_feature (1)...(1331): n = A,T,C or G
gagcccgggaggcgcgggggctggggcgactgggggcagcacggcccgcaagttccccacgtgtcccgagcatgaaatggagaactacagcatgtactgcgtgagctgtcgaaccccggtgtgctatttgtgcctggaggagggccggcatgccaagcacgaggtgaagccgctgggggccatgtggaagcagcacaagnnnnnnnnnnnnnnnnnnnnnnnnnnnnnnnnnnnnnnnnnnnnnnnnnnnnnnnnnnnnnnnnnnnnnnnnnnnnnnnnnnnnnnnnnnnnnnnnnnnnnnnnnnnnnnnnnnnnnnnnnnnnnnnnnnnnnnnnnnnnnnnnnnnnnnnnnnnnnnnnnnnnnnnnnnnnnnnnnnnnnnnnnnnnnnnnnnnnnnnnnnnnnnnnnnnnnnnnnnnnnnnnnnnnnnnnnnnnnnnnnnnnnnnnnnnnnnnnnnnnnnnnnnnnnnnnnnnnnnnnnnnnnnnnnnnnnnnnnnnnnnnnnnnnnnnnnnnnnnnnnnnnnnnnnnnnnnnnnnnnnnnnnnnnnnnnnnnnnnnnnnnnnnnnnnnnnnnnnnnnnnnnnnnnnnnnnnnnnnnnnnnnnnnnnnnnnnnnnnnnnnnnnnnnnnnnnnnnnnnnnnnnnnnnnnnnnnnnnnnnnnnnnnnnnnnnnnnnnnnnnnnnnnnnnnnnnnnnnnnnnnnnnnnnnnnnnnnnnnnnnnnnnnnnnnnnnnnnnnnnnnnnnnnnnnnnnnnnnnnnnnnnnnnnnnnnnnnnnnnnnnnnnnnnnnnnnnnnnnnnnnnnnnnnnnnnnnnnnnnnnnnnnnnnnnnnnnggaagtgtacgtcggtaaggagactttgtgtaccatcgacggtcttcacttcaacagcacctacaacgcccgagtcaaagctttcaactcgtctggtgtcgggccttacagtaaaactgtcgtcctgcagacgtccgatggtgagcatcggggtctcttagtgggaagaacagatccatcattttgtccaatgacaagcagacagccacttgcagcagctgtgatgnnnnnnnnnnnnnnnnnnnnnnnnnnnnnnnnnnnnnnnnnnnnnnnnnnnnnnnnnnnnnnnnnnnnnnnnnnnnnnnnnnnnnnnnnnnnnnnnnnnnnnnnnnnnnnnnnnnnnnnnnnnnnnnnnnnnnnnnnnnnnnnnnnnnnnnnnnnnnnnnnnnnnnnnnnnncatcattttgtccaatgacaagcagacagccacttgcagcagcnnnnnnnnngggtggtgctaggcacatctgggttctccaagggcgcgcccttctggg

SEQ ID NO: 26802 - DNA, 539 bp, Macaca Mulatta
aatttataatcttactaaagtgtttgtaccatgtcttacctctttaaacctgctgtgctttgacccttctttctgcctttctcctggttaggctcctcctgctggaccctccagccccgggcctcaggaaccagagaaggaggagaggagggtctggactatgcctcctgtggctgtggccctgaagcctgtattgcagcagagccgggaagcaagggactagctacctggagcacctcctgttctttgcagttcctcctcagatcttagcctcctgttggggccctcttttcagagccaacattctttccaacccctggagcccaaaccagacctcactccatccacaggtaactggggacagaagtcactggggttccccttctgtgcatgaattggctccctctttcgtaccttgctttctctctggtacttgagcatttagtttcccagatgcctttagtgatcacaaattgcaaaaaggagcagaaatctgctcacgttggtccacataaaggaactgagatctcatggaaatg

SEQ ID NO: 26803 - DNA, 986 bp, Macaca Mulatta
gtaattcacaccgttcgcaaggcatcagctaattcatactaggagagaaaccttacaagtgtaatgagtgtggcaaagcctttagagcacattcgaacctaaccacccatcaggtcatccatactaggagaaaaaccttacaaatgtaatgaatgtggcaaggtcttcactcaaaattcacaccttgcaaatcatcaaagaattcatactggagtgaaaccttatatgtgtaatgagtgtggcaaagcattcactgtgtattcaagcctaactacccatcaggtcatccatactggagaaaaaccttacaaatgtaatgagtgtggcaaggtcttcactcagaattcacaccttgcaagacatcggggaattcatactggagagaaaccttataaatgtaatgtatgtggcaaggtctttaggcataattcatacctttcaaggcatcagcgaattcatactggagagaaaccttacaagtataatgagtatggcaaagcctttagtgaacattcaaacctaactacccatcaggtcatccatactggcgaaaaaccttacaagtgtaatgagtgtggcaaggtcttcactcagaattcacaccttgcaagacatcggagagttcatactggagataaaccttacaagtgtagtgaatgtggcagagcctttagtcaaacatcaaagcttgcaaggcatcagagagttcatactggagagaaaccatatgagtgtaatcagtgtgggaaagcctttagtgtccgttcaagcctaactacccatcaagcaatccatagtggaaaaaaaccttacaaatgcaatgagtgtgggaaggtcttcactcagaattcgcaccttgcaagacatcgaggaattcatactggagattatccttacaagtgtagtgagtgtggcaaagcctttagtcaaacttcaaaacttgaaaggcatcagagagttcataccggagagaaacatatgagtgt

SEQ ID NO: 26804 - DNA, 146 bp, Macaca Mulatta
gtggaatttaggcaaaacttacaatatcgttctgggatctgggcaagttgtgttgggaatggacatgggtctcagagagatgtgcgttggcgagaaacggaccgtgatcattccagccccacttgggctatggggaagctggcgtg

SEQ ID NO: 26805 - DNA, 736 bp, Macaca Mulatta
ccttctactgtgaaaatacatcacagttagaagatcatctgccaagtccgggcgtttttatggtgtagattgaaataacagtacactgttctgaatttttatataaattgtggttgggaaggtgtactaatatataatttatcttaatttttctaactttgtatggataatctttctattcatatcacataaagaaatgcgttgaagcattttgtatatgttttgatttagtacccttgcctttttcatcaaaggagttttcaaatcattcactcttaacattggtctcacattttcactgtgataatgaatattacttgaaatagttttgtaaagctgtcatttagttcagtattgaaatagtgaagggttagtcttaatagaagaaaatatagttattgaccttccttcttataaatttcttacaaaagcagaattttaatgtcagtgttacagctagtctactaccatctaaatctgacatcaaaagtctgatcagtttacatattttcattatttcagagatgtatggctatccattctaatttatacagttgcattagtttcgtctcttcatttctatctttactgaaaaattgaagagcaataccttgcactctcttatgaggttattctttttatttgttgcagtgttatgatactaatttaatgtgtacacagtaagctctgaggctggaagcaaggtcatgcagactgagagagtgccttatcctgt

SEQ ID NO: 26806 - DNA, 319 bp, Macaca Mulatta
cagtccctgcctcttccccacaagatcactctcgcctgacctccctctcaagggcaggaaaggagcagagacgcactctgagccttattgggaagacctcagggactcccctgaatccactgcggctacagtggctgcttccaccactgaagtcccctccaggcttccctgggcagccagggcggggtttaacaggaggacaggtgtctgcattgctctacctacctaacagggctgtgcagggtgaagagcgctgctctgtgggaaggcacccggaccaaggccgaagcactggacaaagagctatgagcaccacctg

SEQ ID NO: 26807 - DNA, 661 bp, Macaca Mulatta
  misc_feature (1)...(661): n = A,T,C or G
taatataagcacccccggnatcatgacataaggaaagatgcccaattgtacttttgttctataacctatgaaatggctagttgatcatttttccacaaagaattaggtgttaagagttttccttcgggctttacttaggagtatggactaagctgaaggtgtacttcaccagcaagagtcaactctagaattcaggacgttccttctattgttttctcatccatctgtcaggaaatgtaactttggttttatttttggcttattccaaggggtaagccagaaaatagaaatgattatttctgattaatagcagaaactttttcaaactcaaatatgtaaggtgtctgctcttttaaaagctctaagctaagtcaagagctaggaagtgttgatacaaataaaagtttttnnnnnnnnnnnnnnnnnnnnnnnnnnnnnnnnnnnnnnnnnnnnnnnnnnnnnnnnnnnnnnnnnnnnnnnnnnnnnnnnnnnnnnnnnnnnnnnnnnnnnnnnnnnnnnnnnnnnnnnnnnnnnnnnnnnnnnnnnnnnnnnnnnnnnnnnnnnnnnnnnnnnnnnnnnnnnnnnnnnnnnnnnnnnnnnnnnnnnnnnnnnnnnnnnnnnnnnnnnnnnnnnnnnnnnnnnnnnnnnnnnnnnnnnnnnn

SEQ ID NO: 26808 - DNA, 605 bp, Macaca Mulatta
  misc_feature (1)...(605): n = A,T,C or G
atgaagaacttcctgattacattatggtgatggtggccaacaagaaaagtcaggaccaaatgacagaggatctgtccctgtttctaggaaacaacacaattcgattcaccgtatggnnnnnnnnnnnnnnnnnnnnnnnnnnnnnnnnnnnnnnnnnnnnnnnnnnnnnnnnnnnnnnnnnnnnnnnnnnnnnnnnnnnnnnnnnnnnnnnnnnnnnnnnnnnnnnnnnnnnnnnnnnnnnnnnnnnnnnnnnnnnnnnnnnnnnnnnnnnnnnnnnnnnnnnnnnnnnnnnnnnnnnnnnnnnnnnnnnnnnnnnnnnnnnnnnnnnnnnnnnnnnnnnnnnnnnnnnnnnncagacttatgatgatggagctgcaacccgactaatgtcaacagtgaagcctttgagggagccagcaccctctgaagatgtgattgatattaagccagaaccagatgatctcattgatgaagacctcaactttgtgcaggagaatcccttatctcagaaaaaacctacagtgacacttacatatggttcttctcgcccttctattgaaatttatcgaccacctgcaagtagagataatgatagtggtgttcat

SEQ ID NO: 26809 - DNA, 285 bp, Macaca Mulatta
ttgtcacctcacccacagattgtatttatatctatatatatgttcataaaaagttatgtgatttcctcctctgtcttttccaccgtataggactttgaatagcaatgataggaaaaacagtggaatgagggtggatttgcacagattggagcacattcctgcacagactaccaagtatactggcgaaatctagatgggtttcagatattgtcagtgaatcatataatgcctggatatttcaggtttctgtaaaagaaagggaaatttaaaacaaatacccttcca

SEQ ID NO: 26810 - DNA, 1766 bp, Macaca Mulatta
  misc_feature (1)...(1766): n = A,T,C or G
gggggttggtgaatggtgccgaccgcggccatcgcagttggaggctattttttgggggggtgagtagcgtccatggagttactttgcgcccactcctagcggcaccggctcaggtccggcgggccgacagtccccggcggggggcgtggggccggggacgccgcgggcccggccgcctccctcgccgcgaccccggatggatgcgcgccccccgccctcccgcgccggccccaggagctcccggcttcgggagcatccttcccgcgccggtccctgcagcggcgcgtagccgagggcagcgccagtcaggggggcaccgcgaagcaagnnnnnnnnnnnnnnnnnnnnnnnnnnnnnnnnnnnnnnnnnnnnnnnnnnnnnnnnnnnnnnnnnnnnnnnnnnnnnnnnnnnnnnnnnnnnnnnnnnnnnnnnnnnnnnnnnnnnnnnnnnnnnnnnnnnnnnnnnnnnnnnnnnnnnnnnnnnnnnnnnnnnnnnnnnnnnnnnnnnnnnnnnnnnnnnnnnnnnnnnnnnnnnnnnnnnnnnnnnnnnnnnnnnnnnnnnnnnnnnnnnnnnnnnnnnnnnnnnnnnnnnnnnnnnnnnnnnnnnnnnnnnnnnnnnnnnnnnnnnnnnnnnnnnnnnnnnnnnnnnnnnnnnnnnnnnnnnnnnnnnnnnnnnnnnnnnnnnnnnnnnnnnnnnnnnnnnnnnnnnnnnnnnnnnnnnnnnnnnnnnnnnnnnnnnnnnnnnnnnnnnnnnnnnnnnnnnnnnnnnnnnnnnnnnnnnnnnnnnnnnnnnnnnnngagaggccggagctggatgagctgacattagagcgtgtgctggaggaactggagaccctgtgccaccagaatatggccagggccatcgagacgcaggaggggctgggcatcgagtacgacgaggatgttgtctgcgacgtgtgtcgctctcccgagggcgaggatggcaacgagatggtcttctgtgacaagtgcaacgtctgtgtgcatcaggnaggcatgctacgggatcctcaaggtgcccacgggcagctggctgtgccggacgtgtgccttgggtgtccagccaaagtgcctgctctgccccaagcgaggaggagccttgaagcccaccagaagtgggaccaagtgggtgcacgtcagctgcgccctatggattcctgaggtnnnnnnnnnnnnnnnnnnnnnnnnnnnnnnnnnnnnnnnnnnnnnnnnnnnnnnnnnnnnnnnnnnnnnnnnnnnnnnnnnnnnnnnnnnnnnnnnnnnnnnnnnnnnnnnncagtgttccatgccttcctgcgtcacggcattccatgtcacatgcgcctttgaccacagcctggaaatgcggactatattagcagacaatgatgaggtcaagttcaagtcattctgccaggaacacagtgatgggggcccacgtaatgagcccacatctgagcctgcagagcccagccaggctggcgaggacctggaaaaggtgaccttgcgcaagcagcggctgcagcagctagaggaggacttctatgagctggtggaacctgctgaggtggctgagcggctggacctggctgaggcgctggtcgatttcatctaccagtactggaagctgaagaggaaagccaatgccaaccagccgctgctgacccccaagactgacgaggtggacaacctggcccagcaggagcaggacgtcctgtaccgccgcctgaagctcttcacccatctgcggcaggacctagagagggt

SEQ ID NO: 26811 - DNA, 1131 bp, Macaca Mulatta
  misc_feature (1)...(1131): n = A,T,C or G
aagcaggacagaaggagcaagctgtgggatggtataagaaaggtattgaagaactggaaaaaggaatagctgttatagttacaggacaaggtnaggtgaacagtgtgaaagagctagacgccttcaagctaaaatgatgactaatttggttatggccaaggaccgcttacaacttctagnnnnnnnnnnnnnnnnnnnnnnnnnnnnnnnnnnnnnnnnnnnnnnnnnnnnnnnnnnnnnnnnnnnnnnnnnnnnnnnnnnnnnnnnnnnnnnnnnnnnnnnnnnnnnnnnnnnnnnnnnnnnnnnnnnnnnnnnnnnnnnnnnnnnnnnnnnnnnnnnnnnnnnnnnnnnnnnnnnnnnnnnnnnnnnnnnnnnnnnnnnnnnnnnnnnnnnnnnnnnnnnnnnnnnnnnnnnnnnnnnnnnnnnnnnnnnnnnnnnnnnnnnnnnnnnnnnnnnnnnnnnnnnnnnnnnnnnnnnnnnnnnnnnnnnnnnnnnnnnnnnnnnnnnnnnnnnnnnnnnnnnnnnnnnnnnnnnnnnnnnnnnnnnnnnnnnnnnnnnnnnnnnnnnnnnnnnnnnnnnnnnnnnnnnnnnnnnnnnnnnnnnnnnnnnnnnnnnnnnnnnnnnnnnnnnnnnnnnnnnnnnnnnnnnnnnnnnnnnnnnnnnnnnnnnnnnnnnnnnnnnnnnnnnnnnnnnnnnnnnnnnnnnnnnnnnnnnnnnnnnnnnnnnnnnnnnnnnnnnnnnnnnnnnnnnnnnnnnnnnnnnnnnnnnnnnnnnnnnnnnnnnnnnnnnnnnnnnnnnnnnnnnnnnnnnnnnnnnnnnnnnnnnnnnnnnnnnnnnntgggagaaggagagaaattggtgagggctctttttgctgtggctcgagaacttcagccttctataatttttatagntagatgaagttgatagccttttgtgtgaaagaagagaaggggagcacgatgctagtagacgcctaaaaactgaatttctaatagaatttgatggtgtannnnnnnnnnnnnnnnnnnnnnnnnnnnnnnnnnnnnnnnnnnnnnnnnnnnnnnnnnnnnnnnnnnnnnnnnnnaggcgtttcatcaaacgggtatatgtgtctttaccaaatgagga

SEQ ID NO: 26812 - DNA, 2601 bp, Macaca Mulatta
  misc_feature (1)...(2601): n = A,T,C or G
tcactgagaagcagcaaattcatgctggagagaaaccagtgaagatagcaatactttattgaataacagaaaatttttctggagagaaagcattgaatgtactgtgtgtgataacatttcctctcaaaccgtatcccttactctgcatttaggaggtcacacacagagaagcctcataaatgtaagagatgtggaaatatcttaagtcaaaagtccatcctcattcattaagaaatttgtactggagagaaaccttgtgaatatgggaaagcttccattcagatgtcacacctcagccggcagagaatttacagtggggaaaacccctttgcctgtaagctatgctatttttcagccgcaaatcaaacctcactgagcatgagcattttcacatgagagagaaaccttttgaatgtaacaagtgtggaaaagcctttagccaaaaggagtatgtcattaaacatcagaactcccatgccggtgagaagctttttgaatgtattgaatgtggaaaatcctttagccagaaggaaaacctccttatgcaccagaaaattcacactggagaaaaatcttttgaaagtaaagattgcaggaaagctttcattcagaagacaaacctcatcagacaccagagaactcacacaggagagaagccctttgtatgtaaggagtgtggaaaaacctttagtggtaaatccaaccttactgagcatgacaaaatgcaaattggagagaagacttttaaacgtagtgaatgtggaacaacctttgtttagaagaagtacctcatacaacataagaaccttcacagtggagagaaacgctatgaatgtaacgaatgtggaaaagccttctctcagagaacatcccttattgtacatgtgaggattcattcaggtgataaaccttacgaatgcaatgtgtgtggaaaagccttctctcagagctcatctctcacagtgcgtgtgagaagccatacaggtgagaagccctatggttgtaatgaatgtgggaaagctttctctcagttctcaacccttgctatgcatttgagaatacacacaggtaagaagccttatcagtggagcggctgtgggaaagctttcagcaagaagtcacacaacattagacactagaaaatgcatcctcactaaaaaccccatgaacgccttgaacgtgggaaagctttcattagaaatttgcacctcatcataccccagaaataatgcttctgaagcaaagcatcacgaatgaggttaactttaacaagtactaaaaacttaaaggacaccagaaaatttgtactgaagagagagataggcgtatgataaaannnnnnnnnnnnnnnnnnnnnnnnnnnnnnnnnnnnnnnnnnnnnnnnnnnnnnnnnnnnnnnnnnnnnnnnnnnnnnnnnnnnnnnnnnnnnnnnnnnnnnnnnnnnnnnnnnnnnnnnnnnnnnnnnnnnnnnnnnnnnnnnnnnnnnnnnnnnnnnnnnnnnnnnnnnnnnnnnnnnnnnnnnnnnnnnnnnnnnnnnnnnnnnnnnnnnnnnnnnnnnnnnnnnnnnnnnnnnnnnnnnnnnnnnnnnnnnnnnnnnnnnnnnnnnnnnnnnnnnnnnnnnnnnnnnnnnnnnnnnnnnnnnnnnnnnnnnnnnnnnnnnnnnnnnnnnnnnnnnnnnnnnnnnnnnnnnnnnnnnnnnnnnnnnnnnnnnnnnnnnnnnnnnnnnnnnnnnnnnnnnnnnnnnnnnnnnnnnnnnnnnnnnnnnnnnnnnnnnnnnnnnnnnnnnnnnnnnnnnnnnnnnnnnnnnnnnnnnnnnnnnnnnnnnnnnnnnnnnnnnnnnnnnnnnnnnnnnnnnnnnnnnnnnnnnnnnnnnnnnnnnnnnnnnnnnnnnnnnnnnnnnnnnnnnnnnnnnnnnnnnnnnnnnnnnnnnnnnnnnnnnnnnnnnnnnnnnnnnnnnnnnnnnnnnnnnnnnnnnnnnnnnnnnnnnnnnnnnnnnnnnnnnnnnnnnnnnnnnnnnnnnnnnnnnnnnnnnnnnnnnnnnnnnnnnnnnnnnnnnnnnnnnnnnnnnnnnnnnnnnnnnnnnnnnnnnnnnnnnnnnnnnnnnnnnnnnnnnnnnnnnnnnnnnnnnnnnnnnnnnnnnnnnnnnnnnnnnnnnnnnnnnnnnnnnnnnnnnnnnnnnnnnnnnnnnnnnnnnnnnnnnnnnnnnnnnnnnnnnnnnnnnnnnnnnnnnnnnnnnnnnnnnnnnnnnnnnnnnnnnnnnnnnnnaaaggggacttccattttgtatataaacatccacttctctttcaaaagacttcaagtaaatatgagaagatactgattgattctggattgtggtatatggatatcttgtcttattttttgtacttttctgtatttttaacatttctcaaaattagtaagaatgggagtgaggatgtgaatgctatctgtggaagtcatattatactggattcatttccaatcaaatacaaaacattttatagaaagtatttctaaaattttatcacagatgagtggatggatttgctctctatgtaatatgaaattaatctattttattaaaatttaaaaggacag

SEQ ID NO: 26813 - DNA, 278 bp, Macaca Mulatta
  misc_feature (1)...(278): n = A,T,C or G
ggatccctagagacgttgcagctggacgtaagggactcaaaatccgtggtctgctgcccgggaacgcgtgactgagggccgtgtggacgtgctggngtgtgtaacgcaggcctgggcctactggggccgctggaggcggtgggggaggacgctgtggcctctgtgctggacgtgaacgtggtggggacggtgcgggtgctgcaggccttcctgccagacatgaagcggcgcggttcgggacgcgtgttggtgaccgggagcgtgggaggattgatggg

SEQ ID NO: 26814 - DNA, 170 bp, Macaca Mulatta
gggtgaaaaaaggcaacccagttctcctggaggatccaatactcaatgccattgctgaaaagcacaggcgaactccaggccaggttgccttgcgctaccagctgcagtggggggtggtggtcctggcgaagagcttcaatgagaagagaatcaaataaaacttccaggta

SEQ ID NO: 26815 - DNA, 1236 bp, Macaca Mulatta
  misc_feature (1)...(1236): n = A,T,C or G
ccggccgggaacatgccagtggcggtgatggcggaaagtggcttcagtttcaaaaagttgctggatcagtgcgagaaccaggagctcgaggcccctggaggaattgctacacccccagtgtatggtcagcttctagctttatatttgctccataatgacatgaataatgcaagatatctttggaaaagaataccacctgctataaaatctgcaaattctgaacttgggggaatttggtcagtaggacaaagaatctggcagagagatttccctgggatctatacaaccatcaacgctcaccagtggtctgagacggtccagccaattatggaagcacttagagatgcaacaaggagacgcgccttcgccctggtctctcaagcgtatacttcaatcatcgctgatgattttgcagcctttgttggacttcctgtagaagaggctgtgaaaggtatattagagcaaggatggcaagctgattccaccacaagaatggttctgcccagaaagccagttgcaggggccctggatgtttcctttaacaagtttattcccttatcagagcctgctccagttcccccaatacccaatgaacagcagttagccagactgacggattatgtagctttccttgaaaactgaattatcactctgagttcaagattcatcttcagaatcctgtatactgacaaatatcgaaatgtaaagtttgtgttttcagtttattggatggcttaagcacctcagcattccttactgagtatgtgataaaatacatatagaatataaaatatactgtatacattttgtccttaaacattatgctgaatagttgttgaaacagttctcattttgtaatacttaataatctggatggagcccgtcagtattacagttagtttgttttctggtgactcataaaataaggtttcctgtttcatgtagaatagtgtttgtcaactgtcttttgtctgccctagcacatgccacactcttacctgtaccattggttgataattgtcatgactcatttggacttgaagcaagactgtccccaggcacagtatcggaatccctggagattatgattcacgcttttttggagaatatgctctcttttcacccccaccntcctaaagagcccactaatggtaaaantacggaaacatangctgaangaaacaaatagaccattttcccatactaaaccagttttgggttgaacttttagatttt

SEQ ID NO: 26816 - DNA, 167 bp, Macaca Mulatta
agaacaaaagccgccctcattctaggggagaatataatgtttacagcacttttcaaagtcatgaaccagagtttgactatttgaaaagtctagaaattgaggaaaaaattaataaaattaggtggttaccacaacagaatgctgctcattttctactctctacaaat

SEQ ID NO: 26817 - DNA, 790 bp, Macaca Mulatta
  misc_feature (1)...(790): n = A,T,C or G
tgtgaacccacatccctgcccccagggccacctacaggacgccgacacctacccttcagcagacgccggagagaaatgagtagcaacaaagnnnnnnnnnnnnnnnnnnnnnnnnnnnnnnnnnnnnnnnnnnnnnnnnnnnnnnnnnnnnnnnnnnnnnnnnnnnnnnnnnnnnnnnnnnnnnnnnnnnnnnnnnnnnnnnnnnnnnnnnnnnnnnnnnnnnnnnnnnnnnnnnnnnnnnnnnnnnnnnnnnnnnnnnnnnnnnnnnnnnnnnnnnnnnnnnnnnnnnnnnnnnnnnnnnnnnnnnnnnnnnnnnnnnnnnnnnnnnnnnnnnnnnnnnnnnnnnnnnnnnnnnnnnnnnnnnnnnnnnnnnnnnnnnnnnnnnnnnnnnnnnnnnnnnnnnnnnnnnnnnnnnnnnnnnnnnnnnnnnnnnnnnnnnnnnnnnnnnnnnnnnnnnnnnnnnnnnnnnnnnnnnnnnnnnnnnnnnnnnnnnnnnnnnnnnnnnnnnnnnnnnnnnnnnnnnnnnnnnnnnnnnnnnnnnnnnnnnnnnnnnnnnnnnnnnnnnnnnnnnnnnnnnnnnnnnnnnnnnnnnnnnnnnnnnnnnnnnnnnnnnnnnnnnnnnnnnnnnnnnnnnncaatttgacgatctcttccggggtgagacgggcaaggacaggnnncagggagaagtctcattcatggttgagcacaggctggtttaccatggtgattgcggtggagttgtgtgaccacgtgcacgtatatggcatggtccccccgaactactgca

SEQ ID NO: 26818 - DNA, 1085 bp, Macaca Mulatta
cccacagaagaccgagtaagaagcagcccggacaaaagggcaggccacaagaaagttacagggttcactgggggtagacatgttgcacaacccttccctgaccttgacccttggggctggtcccatgtccttgccaggaggtggccatgcgcaagctggtgcgctcagtgactgtggttgaggacgacgaggatgaggatggagatgacctgctccatcaccaccacgtgagtggtagccgccgctgaggcccagcctgcactggggccacccagccaggcctgggggcagcctctccccagcctccctgtgccaaaaatcttttcattaaagaatgttttggaacttcactcgctggcctggcctttcttctctctcctccctataccttgaacagggaacccaggtgtctgggtgccctactctggtaaggaagggagtgggaactttctgatgccatggaatattcctgtaggaacagtggacaagagtctggatttgtctcctgggaaagggaagggaggacagacgtggggcatgcccgccctgcctctctcccccattcctgttgcatgcatatcctctcatttccctcatttttcctgcaagaatgttctctctcattcctgcccctcctccaattaatagtgcatgcctgctgccctacgagcttgctccctttctctcttcttttcctcttaagctcagagtagctagaacagagtcagagtcccctctctggttctctgtccccaagtcttcctgagccttctccccttttatgtcttccctcccctcctcctggcccctggcctcccaaagccctgttgcccgctggctccttgggcacagaaccccaccttcctgcctggtggctgggagcctgcaggagcctggaccctggttgggcctgagtggtcagtcccagactcgccgtcccgcctgagccttgtctcccttcccagggctcccactgcaccagctcgggggaccccgtaaaggacaacctgcgctcgcgcaccgtgctgtgcgggacctaagggcagcctgccgacaaggcatctgccagcggctcaggagcccag

SEQ ID NO: 26819 - DNA, 2640 bp, Macaca Mulatta
  misc_feature (1)...(2640): n = A,T,C or G
atttcaaaaactttatgacttgtatattgaagaatgtgaaaaagaacctgaggttaaggtaagtatacnnnnnnnnnnnnnnnnnnnnnnnnnnnnnnnnnnnnnnnnnnnnnnnnnnnnnnnnnnnnnnnnnnnnnnnnnnnnnnnnnnnnnnnnnnnnnnnnnnnnnnnnnnnnnnnnnnnnnnnnnnnnnnnnnnnnnnnnnnnnnnnnnnnnnnnnnnnnnnnnnnnnnnnnnnnnnnnnnnnnnnnnnnnnnnnnnnnnnnnnnnnnnnnnnnnnnnnnnnnnnagactttaatttgtgatgtacattcaataacaagtgataaccataaatggacccaggttagttgttttgttttttaatctcaaacaggcaaaatataggatgaaaaaaacttatcattaagcaaaagtgattttctgcttatttttattcaataattaagtttgatactttatgtgaaaagctggtattcctttatgagatctggaagttaagggtctctttatacatgtagtaatccctcaagttgcctaagatcattttagggtgaagctggcctaatatgctcaatgagataaaacttagtctttatctcctctcaaatagaagaaaaannnnnnnnnnnnnnnnnnnnnnnnnnnnnnnnnnnnnnnnnnnnnnnataattgaagtttctaacccagcctagcctatctttctttgccatttatactggttgccttgaaatgagaggaactctcttacccctaagaataaccagttaaccctccagttctggctcagtgatatatgaggggacttcagaaagtttgtggaaaactgggattaaaagataaaaaatataaacttttcttctcagtataagctccattaagttcaagaaccttgtaaatgnnnnnnnnnnnnnnnnnnnnnnnnnnnnnnnnnnnnnnnnnnnnnnnnnnnnnnnnnnnnnnnnnnnnnnnnnnnnnnnnnnnnnnnnnnnnnnnnnnnnnnnnnnnnnnnnnnnnnnnnnnnnnnnnnnnnnnnnnnnnnnnnnnnnnnnnnnnnnnnnnnnnnnnnnnnnnnnnnnnnnnnnnnnnnnnnnnnnnnnnnnnnnnnnnnnnnnnnnnnnnnnnnnnnnnnnnnnnnnnnnnnnnnnnnnnnnnnnnnnnnnnnnnnnnnnnnnnnnnnnnnnnnnnnnnnnnnnnnnnnnnnnnnnnnnnnnnnnnnnnnnnnnnnnnnnnnnnnnnnnnnnnnnnnnnnnnnnnnnnnnnnnnnnnnnnnnnnnnnnnnnnnnnnnnnnnnnnnnnnnnnnnnnnnnnnnnnnnnnnnnnnnnnnnnnnnnnnnnnnnnnnnnnnnnnnnnnnnnnnnnnnnnnnnnnnnnnnnnnnnnnnnnnnnnnnnnnnnnnnnnnnnnnnnnnnnnnnnnnnnnnnnnnnnnnnnnnnnnnnnnnnnnnnnnnnnnnnnnnnnnnnnnnnnnnnnnnnnnnnnnnnnnnnnnnnnnnnnnnnnnnnnnnnnnnnnnnnnnnnnnnnnnnnnnnnnnnnnnnnnnnnnnnnnnnnnnnnnnnnnnnnnnnnnnnnnnnnnnnnnnnnnnnnnnnnnnnnnnnnnnnnnnnnnnnnnnnnnnnnnnnnnnnnnnnnnnnnnnnnnnnnnnnnnnnnnnnnnnnnnnnnnnnnnnnnnnnnnnnnnnnnnnnnnnnnnnnnnnnnnnnnnnnnnnnnnnnnnnnnnnnnnnnnnnnnnnnnnnnnnnnnnnnnnnnnnnnnnnnnnnnnnnnnnnnnnnnnnnnnnnnnnnnnnnnnnnnnnnnnnnnnnnnnnnnnnnnnnnnnnnnnnnnnnnnnnnnnnnnnnnnnnnnnnnnnnnnnnnnnnnnnnnnnnnnnnnnnnnnnnnnnnnnnnnnnnnnnnnnnnnnnnnnnnnnnnnnnnnnnnnnnnnnnnnnnnnnnnnnnnnnnnnnnnnnnnnnnnnnnnnnnnnnnnnnnnnnnngcaaaaaggtttgaaacctatgtatagttttttcttaatactcatttttcataaactcttaaagaccccttgtatgtgagatgcctactcaaaaaagtgttcagttgtctgtgactatagtgaggaataattactaagtcaaaagaaaatatcagtaatgatagttatcctttctgtgacgtgattataaaataagcttcagttcatcagtaactaccaagtattgtgttttggtttgggctataatgttatcatctgaaaaaagattaaaaactatcaaaagaatattagacaaccgaaaaactcattggttaccatcagaggatgctagggcatcagtttcttactctgaggattgataaaggagagaatataatatttattctgcccttcttgttatgaactgtattttaggcagccaagtaagtgagggaaaattcttaggaaaatttccagctaataggtgtaaaagaaatgatagacttttgaaaaataaaagtttgaaagtgttaatgaagtaatgaatctagacaacagtaattcttggatgtgaaaactattagatgataggttaatgggaaattttgtaatgtagcaatctgattaaacccactgattgaagatggaacagttaattattgtgtacctcccggtttgatgcaa

SEQ ID NO: 26820 - DNA, 315 bp, Macaca Mulatta
cctcttttgagatgatccgtttctaggtgagatgacaatttatctctttttatgactgattgaaagtctttaagtgtttcagtgtcatttggggaccagaagaagaccacgtgttagcctcaatttctacaagaaaatcttgagtttcactgcctagggtttagggaagccacagtttgacaaatagatttaaaatgatttatttaaatagtcattttaaagactagtgtgagagaggaggccatttctttgagcagtagatccacgactgttcacagtactcctgtggctaaagttttgaaactggactgggca

SEQ ID NO: 26821 - DNA, 672 bp, Macaca Mulatta
ttaacatgaaatttaatttatgtgaaagatttctggatttgaatgtcagttcataatatatggaagataattttatgttatagtaggattaatttatttagttgtgtagtcagtgtcaatccaatctgtaatttcattttagaaagttgtattaccttccacttccatgttgtcttataaacaaatgaattgtattttttgttgaaactaaaagttatgtgtaaccaactcagtacttttgtccaaaaatataataagaaaaaatttttcttgaggaacttttaatttcaaacttgaagaatatctaccagctatctatattcatttctactccgcacacttcttaatgtttagtttgtgaagtacagaaaaaatttaatatgcctagaaaatcataactaaatgacaactgtatgcccaaattatgattataatcttcaacattaagtacagttttgaaagtcctgtaggaaaatgctattgccaattgagaattggtcaaattgtcaatttaactccactgtcctagtaatacacgagtaatttaccatataaagaattttaaatcctttccagactcattatacaacattaaacactaccaataaagttgttttcatatacatcttttctattctaaaatgtgaagtctaaatggtatctgtatttcca

SEQ ID NO: 26822 - DNA, 1193 bp, Macaca Mulatta
  misc_feature (1)...(1193): n = A,T,C or G
tgcctcagaggatgtggagccacttctggaaagtatcaacgcaggggctttttgtggccatgttctggcccctcatccctcagtttgtttgcaactgtttgttttactgggccctgtactttaacccaattattaacattgatcttgtggtcaaggaactccggcggctggaaacccaggtgttgtgactggcactgcccaggctgagactcttcaagtcccgctgacgtctgnnnnnnnnnnnnnnnnnnnnnnnnnnnnnnnnnnnnnnnnnnnnnnnnnnnnnnnnnnnnnnnnnnnnnnnnnnnnnnnnnnnnnnnnnnnnnnnnnnnnnnnnnnnnnnnnnnnnnnnnnnnnnnnnnnnnnnnnnnnnnnnnnnnnnnnnnnnnnnnnnnnnnnnnnnnnnnnnnnnnnnnnnnnnnnnnnnnnnnnnnnnnnnnnnnnnnnnnnnnnnnnnnnnnnnnnnnnnnnnnnnnnnnnnnnnnnnnnnnnnnnnnnnnnnnnnnnnnnnnnnnnnnnnnnnnnnnnnnnnnnnnnnnnnnnnnnnnnnnnnnnnnnnnnnnnnnnnnnnnnnnnnnnnnnnnnnnnnnnnnnnnnnnnnnnnnnnnnnnnnnnnnnnnnnnnnnnnnnnnnnnnnnnnnnnnnnnnnnnnnnnnnnnnnnnnnnnnnnnnnnnnnnnnnnnnnnnnnnnnnnnnnnnnnnnnnnnnnnnnnnnnnnnnnnnnnnnnnnnnnnnnnnnnnnnnnnnnnnnnnnnnnnnnnnnnnnnnnnnnnnnnnnnnnnnnnnnnnnnnnnnnnnnnnnnnnnnnnnnnnnnnnnnnnnnnnnnnnnnnnnnnnnnnnnnnnnnnnnnnnnnnnnnnnnnnnnnnnnnnnnnnnnnnnnnnnnnnnnnnnnnnnnnnnnnnnnnnnnnnnnnnnnnnnnnnnnnnnnnnnnnnnnnnnnnnnnnnnnnnnnnnnnnnnnnnnnnnnnnnnnnnnnnnnnnnnnnnnnnnnnnnnnnnnnnnnnnnnnnnnnnnnnnnnnnnnnnnnnnnnnnnnnnnnnnnnnnnnnnnnnnnnnnnnnnnnnnnnnnnnnnnnnnacctgtaatcccagctacttggaattggaaatcgcctgaacccgggagacagaggttgcaggaagggagattgaaccactgcactccagcctgggtgacagagggagattctgt

SEQ ID NO: 26823 - DNA, 597 bp, Macaca Mulatta
aattcatatacatccaacatacactgaatggaaataatttttaaaaataagcaaggcttaaattggggtctttcaaaaaactcaaaaaattattggtgactgtatctttaacaaatggaatgacaaaactagttaagtctgattacctcaatcaactccaaaactcaatgttgccaacatgtttttctacttaaaagcaaacaaaaagcaaagcctcataatttagtaattaccgtgtttcttggtttctgttctcaaatgccacagaaagatatctgaggaaaggaagcaaagcacctagtctcaacagtccttcaaacattaaggttgctttcacaatctcgctataaatacttagattcctatctgacagatttcttgacttatgtgagtaggaatgctctcaaaaccttagtctttactcttgcttcacactagagttgtttgattaaaccacctctgtatttgctagactgcaacactaggtaagaactcattcctatctcttacaagaaaccaagataatctcaatacgaattttggtggccagtatgttacagtacttagcaatactttgtttcctaatggcaagtatgt

SEQ ID NO: 26824 - DNA, 443 bp, Macaca Mulatta
tcttggaggcaaagaaagaagaattggaaacagaaaatcaggtgttaaataggtaatgtgtttgtatgtgtatctaccccatgtggttattttgaggtcatagaactttgtctctaagtataatgtaccttcttttcttttaaaatatacatttacaagagttctaagacaacttgataactcctaatatactatccttttttttttaccccctaactgaatgttcctttaaaccaaaaggtctctatcacatgccaggtctctatcacatgccttatggttgggactaacagaaagtgtcactggctttggtagcaaggagtggtgttagtccttgctgctgagacaagacagttgtagctattgcatagttctgaaaattgtggctgcaactttgaatcaaaggtcagttttggtttcctggtgtggagatactattgagc

SEQ ID NO: 26825 - DNA, 723 bp, Macaca Mulatta
  misc_feature (1)...(723): n = A,T,C or G
aaggagatgcaggcgaaaatatgcattgctagaagccggcaggagtgactctcggcatggaggacccatctcctagcgcacgtgcccacgtgaggtggcaccggcagaagtttggcttgaactaaaggacattttattttttttactttagcacataatttgtatatttgaaaataatgtatattattttacctattagattctgatttgatatacaaaggactaagatattttcttcttaaagagacttttcgattagtcctcatatatttatctactaaaatttactatgaacagtgtgttgcttcagacttacaaagacaactggggcacgtactctaatgtaaaggacaggtggtgtttctgtataatagtctggctgctacggtactgtaaaaagctggttaattctatttttcaaggttttggctaagcacatcaattttagactagttgaagtggaactgtataattcaattcggtaatcgatcacatgggctttccctggaggaannnnnnnnnnnnnnnnnnnnnnncttgaaacttgtaactgagatgtctatagcttttttgcccatctgtgttgtatgtggagatttcaaaacctgagagcactttttctttgtgtagaattaggagaaagtcactagatgactttaggatttgcatttttccctttattggctcatttcttgtgacgccttgtatggggagggaaatctg

SEQ ID NO: 26826 - DNA, 2471 bp, Macaca Mulatta
  misc_feature (1)...(2471): n = A,T,C or G
tgaactttgattattcatatggttatcaagaacatggtgaaaggactgatcaaccatttcaaacagagcttaataccagtatgatgtattactatgatgatggtacaggtgtacaggtgtatcctgtggaagaagcattgcttaaagagtatattaagcgtcaaannnnnnnnnnnnnnnnnnnnnnnnnnnnnnnnnnnnnnnnnnnnnnnnnnnnnnnnnnnnnnnnnnnnnnnnnnnnnnnnnnnnnnnnnnnnnnnnnnnnnnnnnnnnnnnnnnnnnnnnnnnnnnnnnnnnnnnnnnnnnnnnnnnnnnnnnnnnnnnnnnnnnnnnnnnnnnnnnnnnnnnnnnnnnnnnnnnnnnnnnnnnnnnnnnnnnnnnnnnnnnnnnnnnnnnnnnnnnnnnnnnnnnnnnnnnnnnnnnnnnnnnnnnnnnnnnnnnnnnnnnnnnnnnnnnnnnnnnnnnnnnnnnnnnnnnnnnnnnnnnnnnnnnnnnnnnnnnnnnnnnnnnnnnnnnnnnnnnnnnnnnnnnnnnnnnnnnnnnnnnnnnnnnnnnnnnnnnnnnnnnnnnnnnnnnnnnnnnnnnnnnnnnnnnnnnnnnnnnnnnnnnnnnnnnnnnnnnnnnnnnnnnnnnnnnnnnnnnnnnnnnnnnnnnnnnggaatcagtgtctgtccctgaagggtcattaaatcagctatgttcttcagaagaaccagaacaagaagaacttgcttttttgtttgatgaagagattgaacaaataggacgaaaaaacacatttactgattggtctgataatgattcagattatgaaattgatgaccaagacttaaacaagatttccaaagtaactcagacgccccctttcgtgaaaaaaaaaaccggaggagatcgaacaggcaaccacatgtctcgggcaaaaatcacatctgaacttgctaaagttatcaatgatggcttatattattatgaacaggatctatggatggaagaagatgaaaacaaacatacagccataaannnnnnnnnnnnnnnnnnnnnnnnnnnnnnnnnnnnnnnnnnnnnnnnnnnnnnnnnnnnnnnnnnnnnnnnnnnnnnnnnnnnnnnnnnnnnnnnnnnnnnnnnnnnnnnnnnnnnnnnnnnnnnnnnnnnnnnnnnnnnnnnnnnnnnnnnnnnnnnnnnnnnnnnnnnnnnnnnnnnnnnnnnnnnnnnnnnnnnnnnnnnnnnnnnnnnnnnnnnnnnnnnnnnnnnnnnnnnnnnnnnnnnnnnnnnnnnnnnnnnnnnnnnnnnnnnnnnnnnnnnnnnnnnnnnnnnnnnnnnnnnnnnnnnnnnnnnnnnnnnnnnnnnnnnnnnnnnnnnnnnnnnnnnnnnnnnnnnnnnnnnnnnnnnnnnnnnnnnnnnnnnnnnnnnnnnnnnnnnnnnnnnnnnnnnnnnnnnnnnnnnnnnnnnnnnnnnnnnnnnnnnnnnnnnnnnnnnnnnnnnnnnnnnnnnnnnnncagcacttcaaatgcttcaccttcagaaggcgcaccactagcaggaagttatggatgtactcctcattcattcccaaagttccagcatccttctcatgaacttttgaaggaaaatggctttacccaacaagtgtaccacaaatatcgtcgaagatgcctaagtnnnnnnnnnnnnnnnnnnnnnnnnnnnnnnnnnnnnnnnnnnnnnnnnnnnnnnnnnnnnnnnnnnnnnnnnnnnnnnnnnnnnnnnnnnnnnnnnnnnnnnnnnnnnnnnnnnnnnnnnnnnnnnnnnnnnnnnnnnnnnnnnnnnnnnnnnnnnnnnnnnnnnnnnnnnnnnnnnnnnnnnnnnnnnnnnnnnnnnnnnnnnnnnnnnnnnnnnnnnnnnnnnnnnnnnnnnnnnnnnnnnnnnnnnnnnnnggtcagctgtatggactagaaaagttttgggcttatttgaaatattcacaatctacgacacagtctattgaccccaaacttcaggaatacctctgtagttttaagaggttagaagacttccgtgttgaccccctattagtgaggaatttggaagaaaaagacattcatctacttctggtgaggagagtaatcgtcatagacttccacctaattcctctacaaagccaccaaatgctgctaaacctacatctaccagtcagcttcaggtcccaataaacgatcccagaaggaatacttcaccggagtccagtgacaattcacattaaacagtgctgcctgtggcctgtggtctcaagaaatggtgaaatgcctgagaaatagactcttacggaagttctttgtccttgaagtcaacgtttacatcagtatttatttagggaaaatcttctgatgtttaattgtgataannnnnnnnnnnnnnnnnnnnnnnnntggtagcattttttctaacaagataaatgctaaaaatgttttccctgatttcacaaacaaggatag

SEQ ID NO: 26827 - DNA, 402 bp, Macaca Mulatta
cagataaattaaccttaagtgcatacatttagcccagagtagatgttcaataaaaaggtaaatgttaatacttagctttctttttttctgagttctgtaaatacaaaattgagtaattgtctattttttccataggctcctatggatattccaggtttaaacctgagtcaacaagaatactacccctatgtgtactacaagattgattgcaacttgctggaattcaagtgaaaatgggctcctcccccgacaatcctgtccttgtgttggtgtgtgctaacagaaataagttgcagtatggtcgtactttcacctctagtatcctttgcttgcttctgaccccctttcgtaggtgaattctcccacagtggtctgtatctcaacattttctttttaaaggaa

SEQ ID NO: 26828 - DNA, 2029 bp, Macaca Mulatta
  misc_feature (1)...(2029): n = A,T,C or G
aggagctgcaggagaagctncaggagcagggtgagaggctgcgaaagcaggaagagaggctgcaaaagcaggaagagagactgcgaatggaagaggagaggctgcaaaagcaggagaagaggctgtgggatcaggaagagaggctgtgggagaaggaggagaggctacgaaagcaggaggagaggcnnnnnnnnnnnnnnnnnnnnnnnnnnnnnnnnnnnnnnnnnnnnnnnnnnnnnnnnnnnnnnnnnnnnnnnnnnnnnnnnnnnnnnnnnnnnnnnnnnnnnnnnnnnnnnnnnnnnnnnnnnnnnnnnnnnnnnnnnnnnnnnnnnnnnnnnnnnnnnnnnnnnnnnnnnnnnnnnnnnnnnnnnnnnnnnnnnnnnnnnnnnnnnnnnnnnnnnnnnnnnnnnnnnnnnnnnnnnnnnnnnnnnnnnnnnnnnnnnnnnnnnnnnnnnnnnnnnnnnnnnnnnnnnnnnnnnnnnnnnnnnnnnnnnnnnnnnnnnnnnnnnnnnnnnnnnnnnnnnnnnnnnnnnnnnnnnnnnnnnnnnnnnnnnnnnnnnnnnnnnnnnnnnnnnnnnnnnnnnnnnnnnnnnnnnnnnnnnnnnnnnnnnnnnnnnnnnnnnnnnnnnnnnnnnnnnnnnnnnnnnnnnnnnnnnnnnnnnnnnnnnnnnnnnnnnnnnnnnnnnnnnnnnnnnnnnnnnnnnnnnnnnnnnnnnnnnnnnnnnnnnnnnnnnnnnnnnnnnnnnnnnnnnnnnnnnnnnnnnnnnnnnnnnnnnnnnnnnnnnnnnnnnnnnnnnnnnnnnnnnnnnnnnnnnnnnnnnnnnnnnnnnnnnnnnnnnnnnnnnnnnnnnnnnnnnnnnnnnnnnnnnnnnnnnnnnnnnnnnnnnnnnnnnnnnnnnnnnnnnnnnnnnnnnnnnnnnnnnnnnnnnnnnnnnnnnnnnnnnnnnnnnnnnnnnnnnnnnnnnnnnnnnnnnnnnnnnnnnnnnnnnnnnnnnnnnnnnnnnnnnnnnnnnnnnnnnnnnnnnnnnnnnnnnnnnnnnnnnnnnnnnnnnnnnnnnnnnnnnnnnnnnnnnnnnnnnnnnnnnnnnnnnnnnnnnnnnnnnnnnnnnnnnnnnnnnnnnnnnnnnnnnnnnnnnnnnnnnnnnnnnnnnnnnnnnnnnnnnnnnnnnnnnnnnnnnnnnnnnnnnnnnnnnnnnnnnnnnnnnnnnnnnnnnnnnnnnnnnnnnnnnnnnnnnnnnnnnnnnnnnnnnnnnnnnnnnnnnnnnnnnnnnnnnnnnnnnnnnnnnnnnnnnnnnnnnnnnnnnnnnnnnnnnnnnnnnnnnnnnnnnnnnnnnnnnnnnnnnnnnnnnnnnnnnnnnnnnnnnnnnnnnnnnnnnnnnnnnnnnnnnnnnnnnnnnnnnnnnnnnnnnnnnnnnnnnnnnnnnnnnnnnnnnnnnnnnnnnnnnnnnnnnnnnnnnnnnnnnnnnnnnnnnnnnnnnnnnnnnnnnnnnnnnnnnnnnnnnnnnnnnnnnnnnnnnnnnnnnnnnnnnnnnnnnnnnnnnnnnnnnnnnnnnnnnnnnnnnnnnnnnnnnnnnnnnnnnnnnnnnnnnnnnnnnnnnnnnnnnnnnnnnnnnnnnnnnnnnnnnnnnnnnnnnnnnnnnnnnnnnnnnnnnnnnnnnnnnnnnnnnnnnnnnnnnnnnnnnnnnnnnnnnnnnnnnnnnnngcaggtgtgtgcaggatcgattgtgtttcatttgttctggtgccaggaatgagcgcagtactatggtagttcccttaggatttgtacgtgctctgggctcctgaagatatcgcagcatgagctgcagcagttggactctttctcagtgacctaaaagggattatttctgaggaatgaaaggctcccatcattgactatggatgtggaaaatcttttctagcttagagccttcacatccacaagacattttaaagtctgagttcatgttacctgttttaatcacatgacaacatatcccagtacacaaaagggcactgcgtggcattc

SEQ ID NO: 26829 - DNA, 4510 bp, Macaca Mulatta
cccaatgtcaggtgggagtactgcaacctgacacaatgctcagacgcagaagggactgccgtcgcacctccgaatgtcaccccggttccaagcctagaggctccttccgaacaagcaccgactgagcaaaggcctggggtgcaggagtgctaccacggtaatggacagagttatcgaggcacatacttcaccactgtgacaggaagaacctgccaagcttggtcatctatgacaccgcactctcatagtcggaccccggaaaactacccaaatggtggcttgatcaggaactactgcaggaatccagatcctgtggcagccccttattgttataccatggatcccaatgtcaggtgggagtactgcaacctgacacaatgctcagacgcagaagggattgccgtcacacctctgactgttaccccggttccaagcctagaggctccttccaagcaagcaccaactgagcaaaggcctggtgtccaggagtgctaccatggtaatggacagagttatcgaggcacatacttcaccactgtgacaggaagaacctgccaagcttggtcatctatgacaccacattctcatagtcgtaccccagaaaactacccaaatggtggcttgatcaggaactactgcaggaatccagatcctgtggcagccccttattgttatacgatggatcccaatgtcaggtgggagtactgcaacctgacacaatgctcagacgcagaagggactgcagtcgcacctccgaatgtcaccccggttccaagtctagaggctccttccgaacaagcaccgactgagcaaaggtctggggtgcaggagtgctaccacggtaatggacagagttatcgaggcacatacttcaccactgtgacaggaagaacctgccaagcttggtcatctatgaaaccacactctcatagtcggaccccggaaaactacccaaatggtggcttgatcaggaactactgcaggaatccagatcctgtggcagccccttattgttatacgatggatcccaatgtcaggtgggagtactgcaacctgacacaatgctcagacgcagaagggactgccgtcgcacctccgaatgtcaccccggttccaagcctagaggctccttctgagcaagcaccaactgagcaaaggcttggggtgcaggagtgctaccacagtaatggacagagttatcgaggcacatacttcaccactgtgacaggaagaacctgccaagcttggtcatctatgacaccacactctcatagtcggaccccagaaaactacccaaatgctggcttggtcaagaactactgccgaaatccagatcctgtggcagccccttggtgttatacaacggatcccagtgtcaggtgggagtactgcaacctgacacgatgctcagatgcagaagggactgctgtcatgcctccaaatattattccggttccaagcctagaggcttttcttgaacaagaacctactgaggaaacccccggggtacaggagtgctactaccattatggacagagttatcgaggcacatactccaccactgttacaggaagaacttgccaagcttggtcatctatgacaccacaccagcatagtcggaccccaaaaaactatccaaatgctggcctgaccaggaactactgcaggaatccagatgctgagattcgcccttggtgttataccatggatcccagtgtcaggtgggagtactgcaacctgacacaatgtctggtgacagaatcaagtgtccttgaaactctcacagtggtcccagatccaagcacacaggcttcttctgaagaagcaccaacggagcaaagtcccgaggtccaggactgctaccatggtgatggacagagttatcgaggctcattctccaccactgtcacaggaaggacatgtcagtcttggtcctctatgacaccacactggcatcagaggacaacagaatattatccagatggtggcctgaccaggaactactgcaggaatccagatgctgagattcgcccttggtgttataccatggatcccagtgtcaggtgggagtactgcaacctgacacaatgtccagtgacagaatcaagtgtcctcgcaacgtccatggctgtttctgaacaagcaccaatggagcaaagccccggggtccaggactgctaccatggtgatggacagagttatcgaggttcattctccaccactgtcacaggaaggatatgtcagtcttggtcctctatgacaccacactggcatcagaggaccatagaatactacccaaatggtggcctgaccaagaactactgcaggaatccagatgctgagattcgcccttggtgttataccatggatcccagagtcagatgggagtactgcaacctgacacaatgtgtggtgatggaatcaagtgtccttgcaactcccatggtggtcccagttccaagcagagaggttccttctgaagaagcaccaactgaaaacagccctggggtccaggactgctaccaaggtgatggacagagttatcgaggcacattctccaccactatcacaggaagaacatgtcagtcttggttgtctatgacaccacatcggcatcggaggatcccattacgctatccaaatgctggcctgaccaggaactattgcagaaatcgagatgctgagattcgcccttggtgttacaccatggatcccagtgtcaggtgggagtactgcaacctgacacaatgcccagtgacagaatcaagtgtcctcacaactcccacggtggtcccggttccaagcacagaggctccttctgaacaagcaccacctgagaaaagccctgtggtccaggattgctaccatggtgatggacagagttatcgaggcacatcctccaccactgtcacaggaaggaactgtcagtcttggtcatctatgataccacactggcatcagaggaccccagaaaactacccaaatgctggcctgaccaggaactactgcaggaatccagattctgggaaacacccctggtgttacacgactgatccatgtgtgaggtgggagtactgcaacctgacacaatgctcagaaacagaatcaggtgtcctagagactcccactgttgttccggttccaagcatggaagctcattctgaagcagcaccaactgagcaaacccctgtggtccagcagtgctaccatggtaatggacagagttatcgaggcacattctccaccactgtcacaggaaggacatgtcaatcttggtcatccatgacaccacaccagcataagaggaccccggaaaaccacccaaatgatgacttgacaatgaactactgcaggaatccagatgctgacacaggcccttggtgttttaccatggaccccagcgtcaggcgggagtactgcaacctgacgcgatgctcagacacagaagggactgtggtcacacctccgactgttatcccggttccaagcctagaggctccttctgaacaagcatcctcttcatttgattgtgggaagcctcaagtggagccaaagaaatgtcctggaagcattgtaggtgggtgtgtggcccacccacattcctggccctggcaagtcagtcttagaacaaggtttggaaagcacttctgtggaggcaccttaatatccccagagtgggtgctgactgctgcttgctgcttggagacgttctcaaggccttccttctacaaggtcatcctgggtgcacaccaagaagtgaatctcgaatctcatgttcaagaaatagaagtgtctaggttgttcttggagcccataggagcagatattgccttgctaaagctaagcaggcctgccatcatcactgacaaagtaatcccagcctgtctgccgtctccaaattacgtgatcaccgcctggactgaatgttacatcactggctggggagaaacccaaggtacctttggggctggccttctcaaggaagcccagcttcatgtgattgagaatacagtgtgcaatcactacgagtttctgaatggaagagtcaaatccactgagctctgtgctgggcatttggccggaggcactgacagatgccagggtgacaatggagggcctgtggtttgcttcgacaaggacaaatacattttacgaggaataacttcttggggtcctggctgtgcatgccccaataagcctggtgtctatgttcgtgtttcaagctttgtcacttggattgagggagtgatgagaaataattaattgaacaagagacagagtgaagcattgactcacctagaggctagaatgggggtagggatttagcacgctggaaataacggacagtaatcaaacgaagacactgtccccagctaccaactatgccaaacctcagcatttttggtattattgtgtataagcttttcccgtctgactgctgggttctccaataaggtgacatagctatgccatttgttaaaaataaactctgtacttattttgatttgag

SEQ ID NO: 26830 - DNA, 770 bp, Macaca Mulatta
atgcaaacccttatactatgtgatcatcatgagccgcttgacatgcactgtcttggtaacgatatcctgggctgtgggcttggtgcacacattaagccagttatcatttactgtgaacttgcctttctgtggacctaatgtagtagacagctttttttgtgatcttcctcgggtgaccaaacttgcctgcttggactctaacatcattgaaatactaattgtggtcaatagtggagttctttctctaagcactttctctctcttggtcagctcctacatcattattcttgtcacagttttgctcaagtcttcagctgcaatggcaaaggcattttctacgctggcttcccatattgcagtagtaatattattctttggaccttgcatcttcatctatgtatggccctttaccatctatcctgtggataaattacttgacatattttacactgttttcacccccatattaaaccccattatttatacactaaggaatagggatatgaaggctgccataaggaaaattgtgaactattacctgaggccaaggataatttctgaaatgtcactagtagtgagaacttcccttcattaagacaaaattccttcaaattcctcaggtcaataccctgtttaatattttagtccttttttgtggtgtatctcaattgtggggaaagtagtggagaagatactatacagaatatttaatgaatattaacaagtctttttctaggtatcaagcgagagttaaatatcaaaaacatgga

SEQ ID NO: 26831 - DNA, 695 bp, Macaca Mulatta
ggtttggtaaaggctccagtgtggtggcctatgaaggacaatcctggcacgactactgcttccactgcaaaaaatgctccgtgaatctggccaacaagcgctttgttttccaccaggagcaagtgtattgccccgactgtgccaaaaagctgtaaactgacaggggctcctgtcctgtaaaatggcatttgaatctcgttctttgtgtccttactttctgccctataccatcaataggggaagagtggtccttcccctctttaaagttctccttccgtcttttctcccattttacagtattactcaaataagggcacacagtgatcatattagcatttagtaaaaagcaaccctgcagcaaagtgaatttctgtctgactgcaatttaaaattgaaaacttaggtagattgactcttctgcatgtttctcatagagcaaaaaagtgctaatcatttagccacttagtgatgtaagcaagaagcataggagataaagcccccactgaggtgcctcttgtgcctcagctgggacccaccgtgtagacacacgacatgcaagagttgcagcggctgctccaactcactgctcaccctcttctgtgagcaggaaaagaacttactgacatgcatggtttaacttcctcatcagaactctgcccttccttctgttcttttgtgctttcaaatgactaaca

SEQ ID NO: 26832 - DNA, 3195 bp, Macaca Mulatta
  misc_feature (1)...(3195): n = A,T,C or G
tggtgggtgaaggaccctaccttatctcagatctggaccagcgaggccggcggagatcctttgcagacagatatgaccccagcctgaagaccatgatcccagtgcgaccctgtgcaaggtnnnnnnnnnnnnnnnnnnnnnnnnnnnnnnnnnnnnnnnnnnnnnnnnnnnnnnnnnnnnnnnnnnnnnnnnnnnnnnnnnnnnnnnnnnnnnnnnnnnnnnnnnnnnnnnnnnnnnnnnnnnnnnnnnnnnnnnnnnnnnnnnnnnnnnnnnnnnnnnnnnnnnnnnnnnnnnnnnnnnnnnnnnnnnnnnnnnnnnnnnnnnnnnnnnnnnnnnnnnnnnnnnnnnnnnnnnnnnnnnnnnnnnnnnnnnnnnnnnnnnnnnnnnnnnnnnnnnnnnnnnnnnnnnnnnnnnnnnnnnnnnnnnnnnnnnnnnnnnnnnnnnnnnnnnnnnnnnnnnnnnnnnnnnnnnnnnnnnnnnnnnnnnnnnnnnnnnnnnnnnnnnnnnnnnnnnnnnnnnnnnnnnnnnnnnnnnnnnnnnnnnnnnnnnnnnnnnnnnnnnnnnnnnnnnnnnnnnnnnnnnnnnnnnnnnnnnnnnnnnnnnnnnnnnnnnnnnnnnnnnnnnnnnnnnnnnnnnnnnnnnnnnnnnnnnnnnnnnnnnnnnnnnnnnnnnnnnnnnnnnnnnnnnnnnnnnnnnnnnnnnnnnnnnnnnnnnnnnnnnnnnnnnnnnnnnnnnnnnnnnnnnnnnnnnnnnnnnnnnnnnnnnnnnnnnnnnnnnnnnnnnnnnnnnnnnnnnnnnnnnnnnnnnnnnnnnnnnnnnnnnnnnnnnnnnnnnnnnnnnnnnnnnnnnnnnnnnnnnnnnnnnnnnnnnnnnnnnnnnnnnnnnnnnnnnnnnnnnnnnnnnnnnnnnnnnnnnnnnnnnnnnnnnnnnnnnnnnnnnnnnnnnnnnnnnnnnnnnnnnnnnnnnnnnnnnnnnnnnnnnnnnnnnnnnnnnnnnnnnnnnnnnnnnnnnnnnnnnnnnnnnnnnnnnnnnnnnnnnnnnnnnnnnnnnnnnnnnnnnnnnnnnnnnnnnnnnnnnnnnnnnnnnnnnnnnnnnnnnnnnnnnnnnnnnnnnnnnnnnnnnnnnnnnnnnnnnnnnnnnnnnnnnnnnnnnnnnnnnnnnnnnnnnnnnnnnnnnnnnnnnnnnnnnnnnnnnnnnnnnnnnnnnnnnnnnnnnnnnnnnnnnnnnnnnnnnnnnnnnnnnnnnnnnnnnnnnnnnnnnnnnnnnnnnnnnnnnnnnnnnnnnnnnnnnnnnnnnnnnnnnnnnnnnnnnnnnnnnnnnnnnnnnnnnnnnnnnnnnnnnnnnnnnnnnnnnnnnnnnnnnnnnnnnnnnnnnnnnnnnnnnnnnnnnnnnnnnnnnnnnnnnnnnnnnnnnnnnnnnnnnnnnnnnnnnnnnnnnnnnnnnnnnnnnnnnnnnnnnnnnnnnnnnnnnnnnnnnnnnnnnnnnnnnnnnnnnnnnnnnnnnnnnnnnnnnnnnnnnnnnnnnnnnnnnnnnnnnnnnnnnnnnnnnnnnnnnnnnnnnnnnnnnnnnnnnnnnnnnnnnnnnnnnnnnnnnnnnnnnnnnnnnnnnnnnnnnnnnnnnnnnnnnnnnnnnnnnnnnnnnnnnnnnnnnnnnnnnnnnnnnnnnnnnnnnnnnnnnnnnnnnnnnnnnnnnnnnnnnnnnnnnnnnnnnnnnnnnnnnnnnnnnnnnnnnnnnnnnnnnnnnnnnnnnnnnnnnnnnnnnnnnnnnnnnnnnnnnnnnnnnagattggggagcggggcctcaacctctccggggggcagaggcagaggatcagcctggcccgcgccgtctactctgaccgtcaactctacctgctggacgaccccctgtcggccgtggacgcccatgtggggaagcacgtctttgaggagtgcattaagaagacgctcagggggaagacagtcgtcctggtgacccaccagctacannnnnnnnnnnnnnnnnnnnnnnnnnnnnnnnnnnnnnnnnnnnnnnnnnnnnnnnnnnnnnnnnnnnnnnnnnnnnnnnnnnnnnnnnnnnnnnnnnnnnnnnnnnnnnnnnnnnnnnnnnnnnnnnnnnnnnnnnnnnnnnnnnnnnnnnnnnnnnnnnnnnnnnnnnnnnnnnnnnnnnnnnnnnnnnnnnnnnnnnnnnnnnnnnnnnnnnnnnnnnnnnnnnnnnnnnnnnnnnnnnnnnnnnnnnnnnnnnnnnnnnnnnnnnnnnnnnnnnnnnnnnnnnnnnnnnnnnnnnnnnnnnnnnnnnnnnnnnnnnnnnnnnnnnnnnnnnnnnnnnnnnnnnnnnnnnnnnnnnnnnnnnnnnnnnnnnnnnnnngggtacctcctttctctcttcactgtgttcctcttcctcctgatgattggcagctctgccttcagcaactggtggctgggtctctggttggacaagggctcacggngatgacttgtgtcccccagggcaacacgaccacgtgtgaggacggcgcggtgctggaacacatcagacatcatgtgtaccaatgagtgtacgctgcaaccatggtgtccgtgctggtgtttggagtcaccaaaggcttcgtcttcaacaagaccacactgatggcatcctcctgtctgcatgacatggtgtttaataanagatcttaaagagcccaatgagcttctttgacacgactcccactggcaggctaatgaaccgtttttccaannnnnnnnnnnnnnnnnnnnnnnnnnnnnnnnnnnnnnnnnnnnnnnnnnnnnnnnnnnnnnnnnnnnnnnnnnnnnnnnnnnnnnnnnnnnnnnnnnnnnnnnnnnnnnnnnnnnnnnnnnnnnnnnnnnnnnnnnnnnnnnnnnnnnnnnnnnnnnnnnnnnnnnnnnnnnnnnnnnnnnnnnnnnnnnnnnnnnnnnnnnnnnnnnnnnnnnnnnnnnnnnnnnnnnnnnnnnnnnnnnnnnnnnnnnnnnnnnnnnnnnnnnnnnnnnnnnnnnnnnnnnnnnnnnnnnnnnntcacctcctctactttaactgtgctctcaggtggtttgcgctgagaatggatgtcctcatgaacatccttaccttcattgtggccttgttggtgaccctgagtttctcctccatcagcacttcatccaaaggcctgtcattgtcatacatcatcca

SEQ ID NO: 26833 - DNA, 143 bp, Macaca Mulatta
gagcattcaatcggaggaaacgaaactccatctatgtcaccgtgactttgcttattgtgtccgtgttaattctcacagtgggccttgctgcaaccaccaggactcagaatgtgactgtaggaggttattacccaggagttatt

SEQ ID NO: 26834 - DNA, 1878 bp, Macaca Mulatta
  misc_feature (1)...(1878): n = A,T,C or G
gggagagtggaggtgaaattccaagaaaggtgggggactatatgtgatgatgggtggaacnnnnnnnnnnnnnnnnnnnnnnnnnnnnnnnnnnnnnnnnnnnnnnnnnnnnnnnnnnnnnnnnnnnnnnnnnnnnnnnnnnnnnnnnnnnnnnnnnnnnnnnnnnnnnnnnnnnnnnnnnnnnnnnnnncagctctctgggatgtcacaccgggaatggggaagccatgattgtaatcatggagaagatgttggtgtgaactgttatggtnggtgaagccaatctgggtttgaggctagtggatggaaacagctcctgttcagggagagtggaggtgaaattccaagaaaggtgggggactatatgtgatgatgggtggaactcgaatactgctgccgtggtgtgcaggcaactaggatgtccatcttcttttatttcttctggagttgttgatagccctgctgtattgggcccnnnnnnnnnnnnnnnnnnnnnnnnnnnnnnnnnnnnnnnnnnnnnnnnnnnnnnnnnnnnnnnnnnnnnnnnnnnnnnnnnnnnnnnnnnnnnnnnnnnnnnnnnnnnnnnnnnnnnnnnnnnnnnnnnnnnnnnnnnnnnnnnnnnnnnnnnnnnnnnnnnnnnnnnnnnnnnnnnnnnnnnnnnnnnnnnnnnnnnnnnnnnnnnnnnnnnnnnnnnnnnnnnnnnnnnnnnnnnnnnnnnnnnnnnnnnnnnnnnnnnnnnnnnnnnnnnnnnnnnnnnnnnnnnnnnnnnnnnnnnnnnnnnnnnnnnnnnnnnnnnnnnnnnnnnnnnnnnnnnnnnnnnnnnnnnnnnnnnnnnnnnnnnnnnnnnnnnnnnnnnnnnnnnnnnnnnnnnnnnnnnnnnnnnnnnnnnnnnnnnnnnnnnnnnnnnnnnnnnnnnnnnnnnnnnnnnnnnnnnnnnnnnnnnnnnnnnnnnnnnnnnnnnnnnnnnnnnnnnnnnnnnnnnnnnnnnnnnnnnnnnnnnnnnnnnnnnnnnnnnnnnnnnnnnnnnnnnnnnnnnnnnnnnnnnnnnnnnnnnnnnnnnnnnnnnnnnnnnnnnnnnnnnnnnnnnnnnnnnnnnnnnnnnnnnnnnnnnnnnnnnnnnnnnnnnnnnnnnnnnnnnnnnnnnnnnnnnnnnnnnnnnnnnnnnnnnnnnnnnnnnnnnnnnnnnnnnnnnnnnnnnnnnnnnnnnnnnnnnnnnnnnnnnnnnnnnnnnnnnnnnnnnnnnnnnnnnnnnnnnnnnnnnnnnnnnnnnnnnnnnnnnnnnnnnnnnnnnnnnnnnnnnnnnnnnnnnnnnnnnnnnnnnnnnnnnnnnnnnnnnnnnnnnnnnnnnnnnnnnnnnnnnnnnnnnnnnnnnnnnnnnnnnnnnnnnnnnnnnnnnnnnnnnnnnnnnnnnnnnnnnnnnnnnnnnnnnnnnnnnnnnnnnnnnnnnnnnnnnnnnnnnnnnnnnnnnnnnnnnnnnnnnnnnnnnnnnnnnnnnnnnnnnnnnnnnnnnnnnnnnnnnnnnnnnnnnnnnnnnnnnnnnnnnnnnnnnnnnnnnnnnnnnnnnnnnnnnnnnnnnnnnnnnnnnnnnnnnnnnnnnnnnnnnnnnnnnnnnnnnnnnnnnnnnnnnnnnnnnnnnnnnnnnnnnnnnnnnnnnnnnnnnnnnnnnnnnnnnnnnnnnnnnnnnnnnnnnnnnnnnnnnnnnnnnnnnnnnnnnnnnnnnnnnnnnnnnnnnnnnnnnnnnnnnnnnnnnnnnnnnnnnnnnttggctcgatgacgtttcctgtgatggagatgagtcagatctctggtcatgcaggaacagtgggtggggaaataatgactgcagtcatggtgaagatgttggagtgatctgttctg

SEQ ID NO: 26835 - DNA, 616 bp, Macaca Mulatta
  misc_feature (1)...(616): n = A,T,C or G
ggaaagttcacagtacatggaaaaccaacagttgaagacctggaggaattttctgaaaaatttattgncagctgttataccaacttgagttgtaaggagaaagctgatgtaaaagacactgatgctgttgatgtatgtattgctgatggtgtctgtatagatgcctctctaaagcctcccgtggagacagaaggatctcctccaattttctacaatacctcatcctccacagtctctaccacaatgttcattgttattattttgtttcttatcatttcttctgtagtgagtttgtgattgcacgggttagctgaaatgaacaatatgtccatcttaaagggtgctttttcaactaattaaatctcggaaaagaacaggtcttgttgaaagatcatttttggaaagttctgtctgaataactatacttagaaaatgataatttcctttgaacttgacaaacactgctatattttatgaattctcaaccatgagttcagggatttgtattccaggaatcaatagcttatgtaaatactccagtttagagtgcagaaactcatattatgcgtttcacttgcaaagctgccagaattgtttcaacactatcattctgcac

SEQ ID NO: 26836 - DNA, 3298 bp, Macaca Mulatta
  misc_feature (1)...(3298): n = A,T,C or G
ccgcctgcactccaaccacctgttttgcgactgccacctggcctggctctcacagtggctgaggcagcggccaaccatcgggctgttcacccagtgctcgggcccagccagcctgcgtggtctcaatgtggcagaggtccagaagagtgagttcagctgctcagnnnnnnnnnnnnnnnnnnnnnnnnnnnnnnnnnnnnnnnnnnnnnnnnnnnnnnnnnnnnnnnnnnnnnnnnnnnnnnnnnnnnnnnnnnnnnnnnnnnnnnnnnnnnnnnnnnnnnnnnnnnnnnnnnnnnnnnnnnnnnnnnnnnnnnnnnnnnnnnnnnnnnnnnnnnnnnnnnnnnnnnnnnnnnnnnnnnnnnnnnnnnnnnnnnnnnnnnnnnnnnnnnnnnnnnnnnnnnnnnnnnnnnnnnnnnnnnnnnnnnnnnnnnnnnnnnnnnnnnnnnnnnnnnnnnnnnnnnnnnnnnnnnnnnnnnnnnnnnnnnnnnnnnnnnnnnnnnnnnnnnnnnnnnnnnnnnnnnnnnnnnnnnnnnnnnnnnnnnnnnnnnnnnnnnnnnnnnnnnnnnnnnnnnnnnnnnnnnnnnnnnnnnnnnnnnnnnnnnnnnnnnnnnnnnnnnnnnnnnnnnnnnnnnnnnnnnnnnnnnnnnnnnnnnnnnnnnnnnnnnnnnnnnnnnnnnnnnnnnnnnnnnnnnnnnnnnnnnnnnnnnnnnnnnnnnnnnnnnnnnnnnnnnnnnnnnnnnnnnnnnnnnnnnnnnnnnnnnnnnnnnnnnnnnnnnnnnnnnnnnnnnnnnnnnnnnnnnnnnnnnnnnnnnnnnnnnnnnnnnnnnnnnnnnnnnnnnnnnnnnnnnnnnnnnnnnnnnnnnnnnnnnnnnnnnnnnnnnnnnnnnnnnnnnnnnnnnnnnnnnnnnnnnnnnnnnnnnnnnnnnnnnnnnnnnnnnnnnnnnnnnnnnnnnnnnnnnnnnnnnnnnnnnnnnnnnnnnnnnnnnnnnnnnnnnnnnnnnnnnnnnnnnnnnnnnnnnnnnnnnnnnnnnnnnnnnnnnnnnnnnnnnnnnnnnnnnnnnnnnnnnnnnnnnnnnnnnnnnnnnnnnnnnnnnnnnnnnnnnnnnnnnnnnnnnnnnnnnnnnnnnnnnnnnnnnnnnnnnnnnnnnnnnnnnnnnnnnnnnnnnnnnnnnnnnnnnnnnnnnnnnnnnnnnnnnnnnnnnnnnnnnnnnnnnnnnnnnnnnnnnnnnnnnnnnnnnnnnnnnnnnnnnnnnnnnnnnnnnnnnnnnnnnnnnnnnnnnnnnnnnnnnnnnnnnnnnnnnnnnnnnnnnnnnnnnnnnnnnnnnnnnnnnnnnnnnnnnnnnnnnnnnnnnnnnnnnnnnnnnnnnnnnnnnnnnnnnnnnnnnnnnnnnnnnnnnnnnnnnnnnnnnnnnnnnnnnnnnnnnnnnnnnnnnnnnnnnnnnnnnnnnnnnnnnnnnnnnnnnnnnnnnnnnnnnnnnnnnnnnnnnnnnnnnnnnnnnnnnnnnnnnnnnnnnnnnnnnnnnnnnnnnnnnnnnnnnnnnnnnnnnnnnnnnnnnnnnnnnnnnnnnnnnnnnnnnnnnnnnnnnnnnnnnnnnnnnnnnnnnnnnnnnnnnnnnnnnnnnnnnnnnnnnnnnnnnnnnnnnnnnnnnnnnnnnnnnnnnnnnnnnnnnnnnnnnnnnnnnnnnnnnnnnnnnnnnnnnnnnnnnnnnnnnnnnnnnnnnnnnnnnnnnnnnnnnnnnnnnnnngatcctcagctacaatgccctgcagtgcatcccgcctctggctttccagggactccgctccctgcgcctgctgnnnnnnnnnnnnnnnnnnnnnnnnnnnnnnnnnnnnnnnnnnnnnnnnnnnnnnnnnnnnnnnnnnnnnnnnnnnnnnnnnnnnnnnnnnnnnnnnnnnnnnnnnnnnnnnnnnnnnnnnnnnnnnnnnnnnnnnnnnnnnnnnnnnnnnnnnnnnnnnnnnnnnnnnnnnnnnnnnnnnnnnnnnnnnnnnnnnnnnnnnnnnnnnnnnnnnnnnnnnnnnnnnnnnnnnnnnnnnnnnnnnnnnnnnnnnnnnnnnnnnnnnnnnnnnnnnnnnnnnnnnnnnnnnnnnnnnnnnnnnnnnnnnnnnnnnnnnnnnnnnnnnnnnnnnnnnnnnnnnnnnnnnnnnnnnnnnnnnnnnnnnnnnnnnnnnnnnnnnnnnnnnnnnnnnnnnnnnnnnnnnnnnnnnnnnnnnnnnnnnnnnnnnnnnnnnnnnnnnnnnnnnnnnnnnnnnnnnnnnnnnnnnnnnnnnnnnnnnnnnnnnnnnnnnnnnnnnnnnnnnnnnnnnnnnnnnnnnnnnnnnnnnnnnnnnnnnnnnnnnnnnnnnnnnnnnnnnnnnnnnnnnnnnnnnnnnnnnnnnnnnnnnnnnnnnnnnnnnnnnnnnnnnnnnnnnnnnnnnnnnnnnnnnnnnnnnnnnnnnnnnnnnnnnnnnnnnnnnnnnnnnnnnnnnnnnnnnnnnnnnnnnnnnnnnnnnnnnnnnnnnnnnnnnnnnnnnnnnnnnnnnnnnnnnnnnnnnnnnnnnnnnnnnnnnnnnnnnnnnnnnnnnnnnnnnnnnnnnnnnnnnnnnnnnnnnnnnnnnnnnnnnnnnnnnnnnnnnnnnnnnnnnnnnnnnnnnnnnnnnnnnnnnnnnnnnnnnnnnnnnnnnnnnnnnnnnnnnnnnnnnnnnnnnnnnnnnnnnnnnnnnnnnnnnnnnnnnnnnnnnnnnnnnnnnnnnnnnnnnnnnnnnnnnnnnnnnnnnnnnnnnnnnnnnnnnnnnnnnnnnnnnnnnnnnnnnnnnnnnnnnnnnnnnnnnnnnnnnnnnnnnnnnnnnnnnnnnnnnnnnnnnnnnnnnnnnnnnnnnnnnnnnnnnnnnnnnnnnnnnnnnnnnnnnnnnnnnnnnnnnnnnnnnnnnnnnnnnnnnnnnnnnnnnnnnnnnnnnnnnnnnnnnnnnnnnnnnnnnnnnnnnnnnnnnnnnnnnnnnnnnnnnnnnnnnnnnnnnnnnnnnnnnnnnnnnnnnnnnnnnnnnnnnnnnnnnnnnnnnnnnnnnnnnnnnnnnnnnnnnnnnnnnnnnnnnnnnnnnnnnnnnnnnnnnnnnnnnnnnnnnnnnnnnnnnnnnnnnnnnnnnnnnngggatgcccgtggacgtcaactcagctgccttccgcctgtggcagatcctcaatggcactggcttccatggctgcatccgaaacctatacatcaacaacgagctgcaggacttcaccaagactcagatgaagccgggcgtggtgccaggctgc

SEQ ID NO: 26837 - DNA, 334 bp, Macaca Mulatta
  misc_feature (1)...(334): n = A,T,C or G
ggggggaatgggaacacgtgcccaaccgctccatcccctcctcctccttaggatgcataacctaccttnnnnnnnnnnnnnnnnnnnnnnnnnnnntttccagatagagtagctctttgtacataaggaatacttgaaaaattaattgtatgatgtatgagaagacagagtctcctagttttgtatcttgttgtatgactgccatgagttccaccagaaagccactctattttggtctctgtgacattttaaatgcgtgacagaagtgagcaaataaagtgaggaagaatatatatnnnnnnnnnnnnnnnnnnnnnnnnnnnnnnnnnnnnnc

SEQ ID NO: 26838 - DNA, 5224 bp, Macaca Mulatta
  misc_feature (1)...(5224): n = A,T,C or G
gacatttgcctttgtgggcaacgtgactcactatgcccaggtctggctcaacatctcggccgagattcgcagcttcctggagcagggcaggctgcagcaacacctacactggctacagcagnagtacgtagcggagctgcggctgcaccccgaggcactgaacctgtcgctggatgagctgccgccggccctgagacaggacaacttctcgctgcccagtggcatggccctcctgcagcagctggataccattgacaacgcggcctgcggctggatccagttcatgtccaaggtgagnnnnnnnnnnnnnnnnnnnnnnnnnnnnnnnnnnnnnnnnnnnnnnnnnnnnnnnnnnnnnnnnnnnnnnnnnnnnnnnnnnnnnnnnnnnnnnnnnnnnnnnnnnnnnnnnnnnnnnnnnnnnnnnnnnnnnnnnnnnnnnnnnnnnnnnnnnnnnnnnnnnnnnnnnnnnnnnnnnnnnnnnnnnnnnnnnnnnnnnnnnnnnnnnnnnnnnnnnnnnnnnnnnnnnnnnnnnnnnnnnnnnnnnnnnnnnnnnnnnnnnnnnnnnnnnnnnnnnnnnnnnnnnnnnnnnnnnnnnnnnnnnnnnnnnnnnnnnnnnnnnnnnnnnnnnnnnnnnnnnnnnnnnnnnnnnnnnnnnnnnnnnnnnnnnnnnnnnnnnnnnnnnnnnnnnnnnnnnnnnnnnnnnnnnnnnnnnnnnnnnnnnnnnnnnnnnnnnnnnnnnnnnnnnnnnnnnnnnnnnnnnnnnnnnnnnnnnnnnnnnnaggtgatgaagactatgggcctgaacaacgcggtgcactgggtggcctggttcatcaccggctttgtgcagctgtccatctccgtgacagcgctcaccgccatcctgaagtatggccaggtgctcatgcacagccacgtggtcatcatctggctcttcctggccgtctatgccgtggccaccatcatgttctnnnnnnnnnnnnnnnnnnnnnnnnnnnnnnnnnnnnnnnnnnnnnnnnnnnnnnnnnnnnnnnnnnnnnnnnnnnnnnnnnnnnnnnnnnnnnnnnnnnnnnnnnnnnnnnnnnnnnnnnnnnnnnnnnnnnnnnnnnnnnnnnnnnnnntccctcatgtccacgacggcctttggcctgggctccaagtacttcgcgctgtacgaggtggctggcgtgggcatccagtggcacaccttcagccagtccccagtggagggggatgacttcaacctgctcctggccgtgaccatgctgatggtggacgccgtggtctacggcatcctcacatggtacatcgaggctgtgcacccaggnaggcatgtacgggctgccccggccctggtacttcccactgcagaagtcctactggctgggcagtgggcggacagaagcctgggagtggagctggccgtgggcacgcaccccccgcctcagtgtcatggaggaggaccaggcctgtgccatggagagccggcgctttgngaggagacacgtggcatggaggaggagcccacnnnnnnnnnnnnnnnnnnnnnnnnnnnnnnnnnnnnnnnnnnnnnnnnnnnnnnnnnnnnnnnnnnnnnnnnnnnnnnnnnnnnnnnnnnnnnnnnnnnnnnnnnnnnnnnnnnnnnnnnnnnnnnnnnnnnnnnnnnnnnnnnnnnnnnnnnnnnnnnnnnnnnnnnnnnnnnnnnnnnnnnnnnnnnnnnnnnnnnnnnnnnnnnnnnnnnnnnnnnnnnnnnnnnnnnnnnnnnnnnnnnnnnnnnnnnnnnnnnnnnnnnnnnnnnnnnnnnnnnnnnnnnnnnnnnnnnnnnnnnnnnnnnnnnnnnnnnnnnnnnnnnnnnnnnnnnnnnnnnnnnnnnnnnnnnnnnnnnnnnnnnnnnnnnnnnnnnnnnnnnnnnnnnnnnnnnnnnnnnnnnnnnnnnnnnnnnnnnnnnnnnnnnnnnnnnnnnnnnnnnnnnnnnnnnnnnnnnnnnnnnnnnnnnnnnnnnnnnnnnnnnnnnnnnnnnnnnnnnnnnnnnnnnnnnnnnnnnnnnnnnnnnnnnnnnnnnnnnnnnnnnnnnnnnnnnnnnnnnnnnnnnnnnnnnnnnnnnnnnnnnnnnnnnnnnnnnnnnnnnnnnnnnnnnnnnnnnnnnnnnnnnnnnnnnnnnnnnnnnnnnnnnnnnnnnnnnnnnnnnnnnnnnnnnnnnnnnnnnnnnnnnnnnnnnnnnnnnnnnnnnnnnnnnnnnnnnnnnnnnnnnnnnnnnnnnnnnnnnnnnnnnnnnnnnnnnnnnnnnnnnnnnnnnnnnnnnnnnnnnnnnnnnnnnnnnnnnnnnnnnnnnnnnnnnnnnnnnnnnnnnnnnnnnnnnnnnnnnnnnnnnnnnnnnnnnnnnnnnnnnnnnnnnnnnnnnnnnnnnnnnnnnnnnnnnnnnnnnnnnnnnnnnnnnnnnnnnnnnnnnnnnnnnnnnnnnnnnnnnnnnnnnnnnnnnnnnnnnnnnnnnnnnnnnnnnnnnnnnnnnnnnnnnnnnnnnnnnnnnnnnnnnnnnnnnnnnnnnnnnnnnnnnnnnnnnnnnnnnnnnnnnnnnngatgtgaaggagtccaggaaggacgtgctccccggggcggagggcacggtgtctggggagggtcacacagacaacctggcccggtgctcggagctggcccagtcacaggcatcgctgcagtcggcgtcgtctgtgggctctgcccgtggtgacgagggagctggctacaccgacgtctatggcgactaccgccccctgtttgataacccacaggacccagacaacgtcagcctgcaannnnnnnnnnnnnnnnnnnnnnnnnnnnnnnnnnnnnnnnnnnnnnnnnnnnnnnnnnnnnnnnnnnnnnnnnnnnnnnnnnnnnnnnnnnnnnnnnnnnnnnnnnnnnnnnnnnnnnnnnnnnnnnnnnnnnnnnnnnnnnnnnnnnnnnnnnnnnnnnnnnnnnnnnnnnnnnnnnnnnnnnnnnnnnnnnnnnnnnnnnnnnnnnnnnnnnnnnnnnnnnnnnnnnnnnnnnnnnnnnnnnnnnnnnnnnnnnnnnnnnnnnnnnnnnnnnnnnnnnnnnnnnnnnnnnnnnnnnnnnnnnnnnnnnnnnnnnnnnnnnnnnnnnnnnnnnnnnnnnnnnnnnnnnnnnnnnnnnnnnnnnnnnnnnnnnnnnnnnnnnnnnnnnnnnnnnnnnnnnnnnnnnnnnnnnnnnnnnnnnnnnnnnnnnnnnnnnnnnnnnnnnnnnnnnnnnnnnnnnnnnnnnnnnnnnnnnnnnnnnnnnnnnnnnnnnnnnnnnnnnnnnnnnnnnnnnnnnnnnnnnnnnnnnnnnnnnnnnnnnnnnnnnnnnnnnnnnnnnnnnnnnnnnnnnnnnnnnnnnnnnnnnnnnnnnnnnnnnnnnnnnnnnnnnnnnnnnnnnnnnnnnnnnnnnnnnnnnnnnnnnnnnnnnnnnnnnnnnnnnnnnnnnnnnnnnnnnnnnnnnnnnnnnnnnnnnnnnnnnnnnnnnnnnnnnnnnnnnnnnnnnnnnnnnnnnnnnnnnnnnnnnnnnnnnnnnnnnnnnnnnnnnnnnnnnnnnnnnnnnnnnnnnnnnnnnnnnnnnnnnnnnnnnnnnnnnnnnnnnnnnnnnnnnnnnnnnnnnnnnnnnnnnnnnnnnnnnnnnnnnnnnnnnnnnnnnnnnnnnnnnnnnnnnnnnnnnnnnnnnnnnnnnnnnnnnnnnnnnnnnnnnnnnnnnnnnnnnnnnnnnnnnnnnnnnnnnnnnnnnnnnnnnnnnnnnnnnnnnnnnnnnnnnnnnnnnnnnnnnnnnnnnnnnnnnnnnnnnnnnnnnnnnnnnnnnnnnnnnnnnnnnnnnnnnnnnnnnnnnnnnnnnnnnnnnnnnnnnnnnnnnnnnnnnnnnnnnnnnnnnnnnnnnnnnnnnnnnnnnnnnnnnnnnnnnnnnnnnnnnnnnnnnnnnnnnnnnnnnnnnnnnnnnnnnnnnnnnnnnnnnnnnnnnnnnnnnnnnnnnnnnnnnnnnnnnnnnnnnnnnnnnnnnnnnnnnnnnnnnnnnnnnnnnnnnnnnnnnnnnnnnnnnnnnnnnnnnnnnnnnnnnnnnnnnnnnnnnnnnnnnnnnnnnnnnnnnnnnnnnnnnnnnnnnnnnnnnnnnnnnnnnnnnnnnnnnnnnnnnnnnnnnnnnnnnnnnnnnnnnnnnnnnnnnnnnnnnnnnnnnnnnnnnnngtggtccatcacgcccatcatgtacccggcctccttctggttcgaggtccccagctcggcctacgtattcctcattgtcatcaatctcttcatcggcatcactgccacggtggccaccttcctgctacagctcttcgagcacgacaaggnaggacctgaaggttgtcaacagttacctgaaaagctgcttcctcattttccccaactacaatctgggccacgggctcatggagatggcctacaacgagtacatcaacgagtactacgccaagattggnggccagtttgacaagatgaagtccccattcgaatgggacattgtcacccgcgggctggtggccatggcggtcgagggtgtcgtgggcttcctcctgaccatcatgtgccagtacaacttcctgcggcggccacagnnnnnnnnnnnnnnnnnnnnnnnnnnnnnnnnnnnnnnnnnnnnnnnnnnnnnnnnnnnnnnnnnnnnnnnnnnnnnnnnnnnnnnnnnnnnnnnnnnnnnnnnnnnnnnnnnnnnnnnnnnnnnnnnnnnnnnnnnnnnnnnnnnnnnnnnnnnnnnnnnnnnnnnnnnnnnnnnnnnnnnnnnnnnnnnnnnnnnnnnnnnnnnnnnnnnnnnnnnnnnnnnnnnnnnnnnnnnnnnnnnnnnnnnnnnnnnnnnnnnnnnnnnnnnnnnnnnnnnnnnnnnnnnnnnnnacagccgccgtgtccccagcgtgctgaaggagctgctccaggtgcaacagagcctcggctactgccctcagtgcgacgcgctgttcgacgagctcacggcccgggagcacctgcagctgtacacgcggctgcgtgggatctcctggaaggatgaggcccgggtnnngaagtgggctctggagaagctggagctgaccaagtaagcagacaagccggccggcacctacagcggcggcaacaagcggaagctctccacggccattgccctcattgggtacccagccttcatcttcctg

SEQ ID NO: 26839 - DNA, 265 bp, Macaca Mulatta
  misc_feature (1)...(265): n = A,T,C or G
gtgtgtgaccatgagctccagtgtcaatgtgaggaaggatggagccctcctgactgcgatgactcctcagtggtcttnnnnnnnnnnnnnnnnnnnnnnnnnnnnnnnnnnnnnnnnnnnnnnnnnnnnnnnnnnnnnnnnnnnnnnnnnnnnnnnnnnnnnnnnnnnnnnnnnnnnnnnnnnnnggccactatctaccactggtaccaggccacacaagcagaagaggaaaccccagatggtaaaggctgttcaaccacaagag

SEQ ID NO: 26840 - DNA, 851 bp, Macaca Mulatta
  misc_feature (1)...(851): n = A,T,C or G
agcttaagcgagagctttttcatggtgaaaggcgcagccctcttcttacaacagggaagcagccctcaaggccagcggagtcttcagcacccccacaagcatgcaggtgannnnnnnnnnnnnnnnnnnnnnnnnnnnnnnnnnnnnnnnnnnnnnnnnnnnnnnnnnnnnnnnnnnnnnnnnnnnnnnnnnnnnnnnnnnnnnnnnnnnnnnnnnnnnnnnnnnnnnnnnnnnnnnnnnnnnnnnnnnnnnnnnnnnnnnnnnnnnnnnnnnnnnnnnnnnnnnnnnnnnnnnnnnnnnnnnnnnnnnnnnnnnnnnnnnnnnnnnnnnnnnnnnnnnnnnnnnnnnnnnnnnnnnnnnnnnnnnnnnnnnnnnnnnnnnnnnnnnnnnnnnnnnnnnnnnnnnnnnnnnnnnnnnnnnnnnnnnnnnnnnnnnnnnnnnnnnnnnnnnnnnnnnnnnnnnnnnnnnnnnnnnnnnnnnnnnnnnnnnnnnnnnnnnnnnnnnnnnnnnnnnnnnnnnnnnnnnnnnnnnnnnnnnnnnnnnnnnnnnnnnnnnnnnnnnnnnnnnnnnnnnnnnnnnnnnnnnnnnnnnnnnnnnnnnnnnnnnnnnnnnnnnnnnnnnnnnnnnnnnnnnnnnnnnnnnnnnnnnnnnnnnnnnnnnnnnnnnnnnnnnnnnnnnnnnnnnnnnnnnnnnnnnnnnnnnnnnnnnnnnnnnnagatccgtaatgaattagagaaacagatgaattgtaacttgaaggaattcaaggaattcatagacaaggagatgctacttatcttgggacaaatggacaagccctaccgtatcttcgatcatctttatctcgnctc

SEQ ID NO: 26841 - DNA, 125 bp, Macaca Mulatta
attagcaagctgggctcatccattcattcactgaacttttcaccaatcatggatcacgtttttcctacatgtaataaaagcgacatgattcacattttattgggtgtcacagcaattcttatgca

SEQ ID NO: 26842 - DNA, 745 bp, Macaca Mulatta
gtttcagggttcagtagtatactccctttttcatacagataagtcacattcaaaattacattttccctttaaactagatggtattccttattcacttacattacaaatctaagaccatgtgataagcatgactggagaggtttaatttttataaacaaaaatagctataaaatacaaagctgctgctgcatgcaaccttatcgcaatcagtatatatcattcctgtggcaatttctgtcacattatattgtgaataaaatttttctatagaaattaaatgatttaaaaactcacctatatgaaacatttaatgcttttcagcctgctttctggctgattttgttatttgatatgctaatttgggcaacgtaatttacattctggcagtcagtgtagataactaaaagcccagttaagtattttataatttcaggctactgaggccatgcttgggatgttgtttgaaagaaaaaaaatacacttgacatatttcacatttctgtaccttcatctgtacttccagtaaacatgtggatgatttgatgagggataaatgaacctatttcttttacacacataccaaggacatgcttgtggctaaagtgagttgataatgttgtgcaaaggatagttgtcaccaactcatttctttatggtccataatgaaataaacattttgtatactgttaattctgtaaacagatgcatgttcaaaagatctatgatggtcttgtaatcttaatct

SEQ ID NO: 26843 - DNA, 1079 bp, Macaca Mulatta
  misc_feature (1)...(1079): n = A,T,C or G
tggcggcgatggcggtggcgcttcggggattaggagggcgcttccggtggcggacgcaggccgtggcgggcggggtacggggcgctgcgcggggcgcggcagnnnnnnnnnnnnnnnnnnnnnnnnnnnnnnnnnnnnnnnnnnnnnnnnnnnnnnnnnnnnnnnnnnnnnnnnnnnnnnnnnnnnnnnnnnnnnnnnnnnnnnnnnnnnnnnnnnnnnnnnnnnnnnnnnnnnnnnnnnnnnnnnnnnnnnnnnnnnnnnnnnnnnnnnnnnnnnnnnnnnnnnnnnnnnnnnnnnnnnnnnnnnnnnnnnnnnnnnnnnnnnnnnnnnnnnnnnnnnnnnnnnnnnnnnnnnnnnnnnnnnnnnnnnnnnnnnnnnnnnnnnnnnnnnnnnnnnnnnnnnnnnnnnnnnnnnnnnnnnnnnnnnnnnnnnnnnnnnnnnnnnnnnnnnnnnnnnnnnnnnnnnnnnnnnnnnnnnnnnnnnnnnnnnnnnnnnnnnnnnnnnnnnnnnnnnnnnnnnnnnnnnnnnnnnnnnnnnnnnnnnnnnnnnnnnnnnnnnnnnnnnnnnnnnnnnnnnnnnnnnnnnnnnnnnnnnnnnnnnnnnnnnnnnnnnnnnnnnnnnnnnnnnnnnnnnnnnnnnnnnnnnnnnnnnnnnnnnnnnnnnnnnnnnnnnnnnnnnnnnnnnnnnnnnnnnnnnnnnnnnnnnnnnnnnnnnnnnnnnnnnnnnnnnnnnnnnnnnnnnnnnnnnnnnnnnnnnnnnnnnnnnnnnnnnnnnnnnnnnnnnnnnnnnnnnnnnnnnnnnnnnnnnnnnnnnnnnnnnnnnnnnnnnnnnnnnnnnnnnnnnnnnnnnnnnnnnnnnnnnnnnnnnnnnnnnnnnnnnnnnnnnnnnnnnnnnnnnnnnnnnnnnnnnnnnnnnnnnnnnnnnnnnnnnnnnnnnnnnnaggtcgagtaccagacaccagaagtctgaatttggagaaggctggggtagatactagccccgacactcagaagatcctggtggactcccgggaaggcacctctgtgccccacatctacgccattggtgacgtggtggag

SEQ ID NO: 26844 - DNA, 1051 bp, Macaca Mulatta
cgggaggaacggggtgtctgctggctccaggagtcgggatggacttggagggctggggggagggtccttagaggaagaggaggcctggaggtgggggtcatcacaggtcaaagggtggtccttgggacccccacagtcagaggtgctgcggcggcagagtgcacaacgacagctgagagccacgggaacggagaccacggggtccacgccaggcgggcagccagggagccggatggactcgaagcgcacctcgcggtagttgcacaccacctggggcactggcggcaggaccgcctgcagcacccgcatctggaggatgtgtggataggggagtgagcatgtgcctggggccagcgcctccgctgacctcccaagctgcccccaaaggtcccagactcaggagtccaggaagccctctgttcccgccctcccacaccccattccccagcccccgaccagacaggcagaccgcccttcctcccccgctgcctctgtgacccggccctgaggtggcagcacctgcccctggacccgggcagctcaccatggtggggcagtagccggcacagatggtggtgttgacggtgatgcacacggggcaggcctccttctcggcagccagggtggcattgatggggcggcacagtggccgcagcggctccctggatgcccgtgccccgcccatgctcagcagcagccacagcagcagcccctgggacaaggacactgcttcagcccagtctgagaccgcagccccgtgccctggccctcccattccccgggtacaccacgagcaacgacccagagacccttcccggcatctcctagtcaggacccaccgcccagacacctgcctttcagcgcccaccccacagcccagaggacctgagataccccaacatttcagaaacccaccctcagggattgccccacctgaagcttactgggggtcacgtccctccagaaagaggcctccttccacagctcacacgcgtctgccccttctcatgccagtgatggcctggaaggaggtggaaggtgcccaggggcc

SEQ ID NO: 26845 - DNA, 228 bp, Macaca Mulatta
  misc_feature (1)...(228): n = A,T,C or G
gagtcccgtgttacagtacttgtttttcttagcccagattcccatcgccatgtcaccactaagtaacaatagcctatttctagagtatgccaaaaatccttttttgaatttccttcagaaagggctaatgatctcactgtccacagatgacccaatgcaattccactttaccaaggnaggagcccctaatggaagaatatgctattgctgcacaagtcttcaagctga

SEQ ID NO: 26846 - DNA, 407 bp, Macaca Mulatta
cccctggctccggggagaaggggcttggggccgaccagaagggaaaccatcttgttgccccccatcctatcctttcgggacagtcaccgaaaacacaggttcccaaagtctacctggtgcctgagagcccagggcccctcctccgttctaagtgcgaagcaacatttggaggggatggatgggctggtcagctgctcttcttttcctactcatactcaaccttcttgtacctgggtggatggagtgggaggatggaggagatgggacatctttcaccccaggcccctggtagagacgacgggtttctgctctgtgcctcctgcctatgtctggctaagagattcgccttaaatgctccctgtcccatggagaggagcccagcataggaaagccacatacgcaacctg

SEQ ID NO: 26847 - DNA, 389 bp, Macaca Mulatta
  misc_feature (1)...(389): n = A,T,C or G
gaattgtacctacttctgtgcttgtgactggggtccaagtgagttcaagaatctttatggtgtggctcattactcacagtataaaaccannnnnnnnnnnnnnnnnnnnnnnnnnnnnnnnnnnnnnnnnnnnnnnnnnnnnnnnnnnnnnnnnnnnnnnnnnnnnnnnnnnnnnnnnnnnnnnnnnnnnnnnnnnnnnnnnnnnnnnnnnnnnnnnnnnnnnnnnnnnnnnnnnnnnnnnnnnnnnnnnnnnnnnnnnnnnnnnnnnnnnnnnnnnnnnnnnnnatgtgaagaaaacaggaatgttttcaataagacttcctaacaaatacaatgtctcttttgactactattattttcttcttataaccatggcctcatatatacct

SEQ ID NO: 26848 - DNA, 789 bp, Macaca Mulatta
cagctgcctcttttcctcctcttcctgggaatctatgtggtcacagtggtgggcaacctgagcatgatcactctaatagggttcagttctcacctgcacacccccatgtacaatttcctcagcagtctgtccttcattgatctctgccagtcctctgtcattaccccaaaaatgctggtgaattttgtatcagagaggaatattatctcctccccagcatgcatgactcagctctacttcttccttgttcttgtcatatctgaatgtcacatgttggctgcaatggcttatgaccgctacattgccatatgtaacccactgctttaccatgtcgccatgtcttatcaggtctgctcctggatggtagttgaggtgtgttttgtgggctttattggtgctacatgctcacacagtctgcatgctaagagtgcttttctgtaaggttgatgtaatcaaccattacttctgtgatcttttcccactactggagctctcccgctccagtatttctatcaatgaaatagtagtttgtgcttcagtgcatttaatatccttttccccagcctcaccatccttagctcttacatcttcatcgttgccagcatcctctgcatttgctacactgagggcaggtccaaaaccttcagcacttgcagctcccacatctcggctgtttctgttttctttgggtctgcagcattcatatacctgcagccatcatctgtcagctccatggaccaggggagtgtcttctgtgttttatgctactgttgcgcccatgctgaaccc

SEQ ID NO: 26849 - DNA, 4400 bp, Macaca Mulatta
  misc_feature (1)...(4400): n = A,T,C or G
ggcacgcctatctcaggaagtggctgctgctctcagaccctgatgacttctctgctggggccagaggttacctgaaaacaagtctttgtgtgctggggcctggggatgtagcgccnnnnnnnnnnnnnnnnnnnnnnnnnnnnnnnnnnnnnnnnnnnnnnnnnnnnnnnnnnnnnnnnnnnnnnnnnnnnnnnnnnnnnnnnnnnnnnnnnnnnnnnnnnnnnnnnnnnnnnnnnnnnnnnnnnnnnnnnnnnnnnnnnnnnnnnnnnnnnnnnnnnnnnnnnnnnnnnnnnnnnnnnnnnnnnnnnnnnnnnnnnnnnnnnnnnnnnnnnnnnnnnnnnnnnnnnnnnnnnnnnnnnnnnnnnnnnnnnnnnnnnnnnnnnnnnnnnnnnnnnnnnnnnnnnnnnnnnnnnnnnnnnnnnnnnnnnnnnnnnnnnnnnnnnnnnnnnnnnnnnnnnnnnnnnnnnnnnnnnnnnnnnnnnnnnnnnnnnnnnnnnnnnnnnnnnnnnnnnnnnnnnnnnnnnnnnnnnnnnnnnnnnnnnnnnnnnnnnnnnnnnnnnnnnnnnnnnnnnnnnnnnnnnnnnnnnnnnnnnnnnnnnnnnnnnnnnnnnnnnnnnnnnnnnnnnnnnnnnnnnnnnnnnnnnnnnnnnnnnnnnnnnnnnnnnnnnnnnnnnnnnnnnnnnnnnnnnnnnnnnnnnnnnnnnnnnnnnnnnnnnnnnnnnnnnnnnnnnnnnnnnnnnnnnnnnnnnnnnnnnnnnnnnnnnnnnnnnnnnnnnnnnnnnnnnnnnnnnnnnnnnnnnnnnnnnnnnnnnnnnnnnnnnnnnnnnnnnnnnnnnnnnnnnnnnnnnnnnnnnnnnnnnnnnnnnnnnnnnnnnnnnnnnnnnnnnnnnnnnnnnnnnnnnnnnnnnnnnnnnnnnnnnnnnnnnnnnnnnnnnnnnnnnnnnnnnnnnnnnnnnnnnnnnnnnnnnnnnnnnnnnnnnnnnnnnnnnnnnnnnnnnnnnnnnnnnnnnnnnnnnnnnnnnnnnnnnnnnnnnnnnnnnnnnnnnnnnnnnnnnnnnnnnnnnnnnnnnnnnnnnnnnnnnnnnnnnnnnnnnnnnnnnnnnnnnnnnnnnnnnnnnnnnnnnnnnnnnnnnnnnnnnnnnnnnnnnnnnnnnnnnnnnnnnnnnnnnnnnnnnnnnnnnnnnnnnnnnnnnnnnnnnnnnnnnnnnnnnnnnnnnnnnnnnnnnnnnnnnnnnnnnnnnnnnnnnnnnnnnnnnnnnnnnnnnnnnnnnnnnnnnnnnnnnnnnnnnnnnnnnnnnnnnnnnnnnnnnnnnnnnnnnnnnnnnnnnnnnnnnnnnnnnnnnnnnnnnnnnnnnnnnnnnnnnnnnnnnnnnnnnnnnnnnnnnnnnnnnnnnnnnnnnnnnnnnnnnnnnnnnnnnnnnnnnnnnnnnnnnnnnnnnnnnnnnnnnnnnnnnnnnnnnnnnnnnnnnnnnnnnnnnnnnnnnnnnnnnnnnnnnnnnnnnnnnnnnnnnnnnnnnnnnnnnnnnnnnnnnnnnnnnnnnnnnnnnnnnnnnnnnnnnnnnnnnnnnnnnnnnnnnnnnnnnnnnnnnnnnnnnnnnnnnnnnnnnnnnnnnnnnnnnnnnnnnnnnnnnnnnnnnnnnnnnnnnnnnnnnnnnnnnnnnnnnnnnnnnnnnnnnnnnnnnnnnnnnnnnnnnnnnnnnnnnnnnnnnnnnnnnnnnnnnnnnnnnnnnnnnnnnnnnnnnnnnnnnnnnnnnnnnnnnnnnnnnnnnnnnnnnnnnnnnnnnnnnnnnnnnnnnnnnnnnnnnnnnnnnnnnnnnnnnnnnnnnnnnnnnnnnnnnnnnnnnnnnnnnnnnnnnnnnnnnnnnnnnnnnnnnnnnnnnnnnnnnnnnnnnnnnnnnnnnnnnnnnnnnnnnnnnnnnnnnnnnnnnnnnnnnnnnnnnnnnnnnnnnnnnnnnnnnnnnnnnnnnnnnnnnnnnnnnnnnnnnnnnnnnnnnnnnnnnnnnnnnnnnnnnnnnnnnnnnnnnnnnnnnnnnnnnnnnnnnnnnnnnnnnnnnnnnnnnnnnnnnnnnnnnnnnnnnnnnnnnnnnnnnnnnnnnnnnnnnnnnnnnnnnnnnnnnnnnnnnnnnnnnnnnnnnnnnnnnnnnnnnnnnnnnnnnnnnnnnnnnnnnnnnnnnnnnnnnnnnnnnnnnnnnnnnnnnnnnnnnnnnnnnnnnnnnnnnnnnnnnnnnnnnnnnnnnnnnnnnnnnnnnnnnnnnnnnnnnnnnnnnnnnnnnnnnnnnnnnnnnnnnnnnnnnnnnnnnnnnnnnnnnnnnnnnnnnnnnnnnnnnnnnnnnnnnnnnnnnnnnnnnnnnnnnnnnnnnnnnnnnnnnnnnnnnnnnnnnnnnnnnnnnnnnnnnnnnnnnnnnnnnnggcggcgtggtggacgacaagagtgaagattccatgtccgtctccaccttgagctttggtgtgaacagacccacaatttcctgcatatttgactnnnnnnnnnnnnnnnnnnnnnnnnnnnnnnnnnnnnnnnnnnnnnnnnnnnnnnnnnnnnnnnnnnnnnnnnnnnnngatccctatgccatcgtctccttcctgcaccagagccagaagacggtggtggtgaagaacacccttaaccccacctgggaccagacgctcatcttctacgagatcgagatcttcggcgagccggccacagttgctgagcagccgcccagcattgtggtggagctgtacgaccatgacacttnnnnnnnnnnnnnnnnnnnnnnnnnnnnnnnnnnnnnnnnnnnnnnnnnnnnnnnnnnnnnnnnnnnnnnnnnnnnnnnnnnnnnnnnnnnnnnnnnnnnnnnnnnnnnnnnnnnnnnnnnnnnnnnnnnnnnnnnnnnnagccggccatccaccatattcctggttttgaggnnnnnnnnnnnnnnnnnnnnnnnnnnnnnnnnnnnnnnnnnnnnnnnnnnnnnnnnnnnnnnnnnnnnnnnnnnnnnnnnnnnnnnnnnnnnnnnnnnnnnnnnnnnnnnnnnnnnnnnnnnnnnnnnnnnnnnnnnnnnnnnnnnnnnnnnnnnnnnnnnnnnnnnnnnnnnnnnnnnnnnnnnnnnnnnnnnnnnnnnnnnnnnnnnnnnnnnnnnnnnnnnnnnnnnnnnnnnnnnnnnnnnnnnnnnnnnnnnnnnnnnnnnnnnnnnnnnnnnnnnnnnnnnnnnnnnnnnnnnnnnnnnnnnnnnnnnnnnnnnnnnnnnnnnnnnnnnnnnnnnnnnnnnnnnnnnnnnnnnnnnnnnnnnnnnnnnnnnnnnnnnnnnnnnnnnnnnnnnnnnnnnnnnnnnnnnnnnnnnnnnnnnnnnnnnnnnnnnnnnnnnnnnnnnnnnnnnnnnnnnnnnnnnnnnnnnnnnnnnnnnnnnnnnnnnnnnnnnnnnnnnnnnnnnnnnnnnnnnnnnnnnnnnnnnnnnnnnnnnnnnnnnnnnnnnnnnnnnnnnnnnnnnnnnnnnnnnnnnnnnnnnnnnnnnnnnnnnnnnnnnnnnnnnnnnnnnnnnnnnnnnnnnnnnnnnnnnnnnnnnnnnnnnnnnnnnnnnnnnnnnnnnnnnnnnnnnnnnnnnnnnnnnnnnnnnnnnnnnnnnnnnnnnnnnnnnnnnnnnnnnnnnnnnnnnnnnnnnnnnnnnnnnnnnnnnnnnnnnnnnnnnnnnnnnnnnnnnnnnnnnnnnnnnnnnnnnnnnnnnnnnnnnnnnnnnnnnnnnnnnnnnnnnnnnnnnnnnnnnnnnnnnnnnnnnnnnnnnnnnnnnnnnnnnnnnnnnnnnnnnnnnnnnnnnnnnnnnnnnnnnnnnnnnnnnnnnnnnnnnnnnnnnnnnnnnnnnnnnnnnnnnnnnnnnnnnnnnnnnnnnnnnnnnnnnnnnnnnnnnnnnnnnnnnnnnnnnnnnnnnnnnnnnnnnnnnnnnnnnnnnnnnnnnnnnnnnnnnnnnnnnnnnnnnnnnnnnnnnnnnnnnnnnnnnnnnnnnnnnnnnnnnnnnnnnnnnnnnnnnnnnnnnnnnnnnnnnnnnnnnnnnnnnnnnnnnnnnnnnnnnnnnnnnnnnnnnnnnnnnnnnnnnnnnnnnnnnnnnnnnnnnnnnnnnnnnnnnnnnnnnnnnnnnnnnnnnnnnnnnnnnnnnnnnnnnnnnnnnnnnnnnnnnnnnnnnnnnnnnnnnnnnnnnnnnnnnnnnnnnnnnnnnnnnnnnnnnnnnnnnnnnnnnnnnnnnnnnnnnnnnnnagaggctggcaggatcccaaacccacacctgggccccgtggaggagcgtctggctctgcacgtgcttcagcagcagggcctggtcccagagcatgtggagtcacggcccctctacagccccctgcagccagacattgagcag

SEQ ID NO: 26850 - DNA, 111 bp, Macaca Mulatta
cagggttcgccaaaaagacattcatttcttactcggtgactttcaaggacaacttccggcaggggctggtggtggggatagacctgaagaaccagacggtgctgctgcagg

SEQ ID NO: 26851 - DNA, 1088 bp, Macaca Mulatta
  misc_feature (1)...(1088): n = A,T,C or G
atggcggacggaaagggagacgccgccgctgtcgccggggctggggctgaggctccggcggtagcgggagccggagatggagccgagactgagtccatggttcggggtcatcgccccgtatctccagcgccgggagccttgggactgcggccgtgtctgtggcagctggagacagagctgagggagcaagaggtgtcggaggtctcatctttgaactactgccggagcttctgccannnnnnnnnnnnnnnnnnnnnnnnnnnnnnnnnnnnnnnnnnnnnnnnnnnnnnnnnnnnnnnnnnnnnnnnnnnnnnnnnnnnnnnnnnnnnnnnnnnnnnnnnnnnnnnnnnnnnnnnnnnnnnnnnnnnnnnnnnnnnnnnnnnnnnnnnnnnnnnnnnnnnnnnnnnnnnnnnnnnnnnnnnnnnnnnnnnnnnnnnnnnnnnnnnnnnnnnnnnnnnnnnnnnnnnnnnnnnnnnnnnnnnnnnnnnnnnnnnnnnnnnnnnnnnnnnnnnnnnnnnnnnnnnnnnnnnnnnnnnnnnnnnnnnnnnnnnnnnnnnnnnnnnnnnnnnnnnnnnnnnnnnnnnnnnnnnnnnnnnnnnnnnnnnnnnnnnnnnnnnnnnnnnnnnnnnnnnnnnnnnnnnnnnnnnnnnnnnnnnnnnnnnnnnnnnnnnnnnnnnnnnnnnnnnnnnnnnnnnnnnnnnnnnnnnnnnnnnnnnnnnnnnnnnnnnnnnnnnnnnnnnnnnnnnnnnnnnnnnnnnnnnnnnnnnnnnnnnnnnnnnnnnnnnnnnnnnnnnnnnnnnnnnnnnnnnnnnnnnnnnnnnnnnnnnnnnnnnnnnnnnnnnnnnnnnnnnnnnnnnnnnnnnnnnnnnnnnnnnnnnnnnnnnnnnnnnnnnnnnnnnnnnnnnnnnnnnnnnnnnnnnnnnnnnnnnnnnnnnnnnnnnnnnnnnnnnnnnnnnnnnnnnnnnnnnnnnnnnnnnngaagaattgacccttctttagatacttttttggagcgctgtcgtcagtttggtgtcatagctaaaacgcagcagcatttattttgcctcattagagttatacaaactgaa

SEQ ID NO: 26852 - DNA, 201 bp, Macaca Mulatta
accattttaacattgccatctgacccaaggaaaatacagctgggggttgggtttttacctgattaagcgtttgtatttctgcagctactttttgacacattatgaatgagcaccttaaaaggagagtttgagagtagtgttaatgaccagccttgggtttgatagctgtgtataattaacagtggctatagagcatcttga

SEQ ID NO: 26853 - DNA, 3582 bp, Macaca Mulatta
  misc_feature (1)...(3582): n = A,T,C or G
agccagccccacccttagaaaagatgttttccatgaggatcgtctgcctggtcctaagtgtggtgggcacaggatgggactgcagatactggtgaaggtgactttctagctgaaggaggaggcgtgcgtggcccaagggttgtggaaaggcatcaatctgcctgcaaagattcagactggcccttctgctctgatgaagactgnnnnnnnnnnnnnnnnnnnnnnnnnnnnnnnnnnnnnnnnnnnnnnnnnnnnnnnnnnnnnnnnnnnnnnnnnnnnnnnnnnnnnnnnnnnnnnnnnnnnnnnnnnnnnnnnnnnnnnnnnnnnnnnnnnnnnnnnnnnnnnnnnnnnnnnnnnnnnnnnnnnnnnnnnnnnnnnnnnnnnnnnnnnnnnnnnnnnnnnnnnnnnnnnnnnnnnnnnnnnnnnnnnnnnnnnnnnnnnnnnnnnnnnnnnnnnnnnnnnnnnnnnnnnnnnnnnnnnnnnnnnnnnnnnnnnnnnnnnnnnnnnnnnnnnnnnnnnnnnnnnnnnnnnnnnnnnnnnnnnnnnnnnnnnnnnnnnnnnnnnnnnnnnnnnnnnnnnnnnnnnnnnnnnnnnnnnnnnnnnnnnnnnnnnnnnnnnnnnnnnnnnnnnnnnnnnnnnnnnnnnnnnnnnnnnnnnnnnnnnnnnnnnnnnnnnnnnnnnnnnnnnnnnnnnnnnnnnnnnnnnnnnnnnnnnnnnnnnnnnnnnnnnnnnnnnnnnnnnnnnnnnnnnnnnnnnnnnnnnnnnnnnnnnnnnnnnnnnnnnnnnnnnnnnnnnnnnnnnnnnnnnnnnnnnnnnnnnnnnnnnnnnnnnnnnnnnnnnnnnnnnnnnnnnnnnnnnnnnnnnnnnnnnnnnnnnnnnnnnnnnnnnnnnnnnnnnnnnnnnnnnnnnnnnnnnnnnnnnnnnnnnnnnnnnnnnnnnnnnnnnnnnnnnnnnnnnnnnnnnnnnnnnnnnnnnnnnnnnnnnnnnnnnnnnnnnnnnnnnnnnnnnnnnnnnnnnnnnnnnnnnnnnnnnnnnnnnnnnnnnnnnnnnnnnnnnnnnnnnnnnnnnnnnnnnnnnnnnnnnnnnnnnnnnnnnnnnnnnnnnnnnnnnnnnnnnnnnnnnnnnnnnnnnnnnnnnnnnnnnnnnnnnnnnnnnnnnnnnnnnnnnnnnnnnnnnnnnnnnnnnnnnnnnnnnnnnnnnnnnnnnnnnnnnnnnnnnnnnnnnnnnnnnnnnnnnnnnnnnnnnnnnnnnnnnnnnnnnnnnnnnnnnnnnnnnnnnnnnnnnnnnnnnnnnnnnnnnnnnnnnnnnnnnnnnnnnnnnnnnnnnnnnnnnnnnnnnnnnnnnnnnnnnnnnnnnnnnnnnnnnnnnnnnnnnnnnnnnnnnnnnnnnnnnnnnnnnnnnnnnnnnnnnnnnnnnnnnnnnnnnnnnnnnnnnnnnnnnnnnnnnnnnnnnnnnnnnnnnnnnnnnnnnnnnnnnnnnnnnnnnnnnnnnnnnnnnnnnnnnnnnnnnnnnnnnnnnnnnnnnnnnnnnnnnnnnnnnnnnnnnnnnnnnnnnnnnnnnnnnnnnnnnnnnnnnnnnnnnnnnnnnnnnnnnnnnnnnnnnnnnnnnnnnnnnnnnnnnnnnnnnnnnnnnnnnnnnnnnnnnnnnnnnnnnnnnnnnnnnnnnnnnnnnnnnnnnnnnnnnnnnnnnnnnnnnnnnnnnnnnnnnnnnnnnnnnnnnnnnnnnnnnnnnnnnnnnnnnnnnnnnnnnnnnnnnnnnnnnnnnnnnnnnnnnnnnnnnnnnnnnnnnnnnnnnnnnnnnnnnnnnnnnnnnnnnnnnnnnnnnnnnnnnnnnnnnnnnnnnnnnnnnnnnnnnnnnnnnnnnnnnnnnnnnnnnnnnnnnnnnnnnnnnnnnnnnnnnnnnnnnnnnnnnnnnnnnnnnnnnnnnnnnnnnnnnnnnnnnnnnnnnnnnnnnnnnnnnnnnnnnnnnnnnnnnnnnnnnnnnnnnnnnnnnnnnnnnnnnnnnnnnnnnnnnnnnnnnnnnnnnnnnnnnnnnnnnnnnnnnnnnnnnnnnnnnnnnnnnnnnnnnnnnnnnnnnnnnnnnnnnnnnnnnnnnnnnnnnnnnnnnnnnnnnnnnnnnnnnnnnnnnnnnnnnnnnnnnnnnnnnnnnnnnnnnnnnnnnnnnnnnnnnnnnnnnnnnnnnnnnnnnnnnnnnnnnnnnnnnnnnnnnnnnnnnnnnnnnnnnnnnnnnnnnnnnnnnnnnnnnnnnnnnnnnnnnnnnnnnnnnnnnnnnnnnnnnnnnnnnnnnnnnnnnnnnnnnnnnnnnnnnnnnnnnnnnnnnnnnnnnnnnnnnnnnnnnnnnnnnnnnnnnnnnnnnnnnnnnnnnnnnnnnnnnnnnnnnnnnnnnnnnnnnnnnnnnnnnnnnnnnnnnnnnnnnnnnnnnnnnnnnnnnnnnnnnnnnnnnnnnnnnnnnnnnnnnnnnnnnnnnnnnnnnnnnnnnnnnnnnnnnnnnnnnnnnnnnnnnnnnnnnnnnnnnnnnnnnnnnnnnnnnnnnnnnnnnnnnnnnnnnnnnnnnnnnnnnnnnnnnnnnnnnnnnnnnnnnnnnnnnnnnnnnnnnnnnnnnnnnnnnnnnnnnnnnnnnnnnnnnnnnnnnnnnnnnnnnnnnnnnnnnnnnnnnnnnnnnnnnnnnnnnnnnnnnnnnnnnnnnnnnnnnnnnnnnnnnnnnnnnnnnnnnnnnnnnnnnnnnnnnnnnnnnnnnnnnnnnnnnnnnnnnnnnnnnnnnnnnnngtacctgagacatattagtctttgaaaaataaagttatataagtttttttatctttaaatacctctgtgggtttgaaaatttttataaggatataccaagggccattcagtacaacaggaaagcgtcagacagaagcttccctctctaaccttgaggagtattggtttgagaacttctcttcccataccacccaaagtcataaggccattgcaaactaaaaaagttattttatccatttgatatgaatggttttaagccaatattttaaggtaaaactcactgaatctaaccatagctgacctttgaagtagaatttacaacttataattacaatgcacagtttataattacaatatgtattcatgtcttttgatatggagcaaatccaggaagacaggagaaacattctttcctaaatagaaatgaaaatctgtcctttaagcccttccactagatattgtaaggcatacttatttttttttcccagggtgtaaccaatttctttcaaaaacacatttaaaattttaaaactatttatgattattcaaaaagcagacaattcacacattaataaataatctcccaagtattgatttaacttcatttttctaacaatcataaactatattctgtgacatgttcactattattaaatgtaaatcgttaatggaaagcatctcactaagtatgatctatgctatattcaaaattcaacacatttgcattggtcaatatttggtccaagctgcatctttaatcctggtggccttgccctctgattttcaatttgcattcttctctattaagatatatttg

SEQ ID NO: 26854 - DNA, 632 bp, Macaca Mulatta
  misc_feature (1)...(632): n = A,T,C or G
aaacagaaatgctctgcccttggagaactgctaacctagggctactgttgattttggctgtcttcttagtggcngcttcaaacagtttatgtatggatgaaaaacagattacacagaaccactcaaaagtactcgcagaagnagttaacatttcatggcctgtacagatggctagaaatgctgtgctttgttgccctcctattgagttcagaaatttgatcgtaataacatgggaaataatcctaagaggccagccttcctgcacaaaatcctacaggaaagaaacaaatgagaccaaggaaaccaactgtactgatgagagaataacctgggtctccacacctgatcagaattcggaccttcagatttacccagtggccatcactcatgatgggtattacagatgcataatggcaactcctgatgggaatttccatcgtggatatcacctccaagtgnnagttacacctgaagtgaccctgtttgaaagcaggaatagaactgcagtatgcaaggcagttgcagggaagccagctgctcagatctcctggatcccagcgggggattgtgcccctaatgagcatgagtactggggcaatggcacagtgactgttaagagtacatgccactgg

SEQ ID NO: 26855 - DNA, 503 bp, Macaca Mulatta
agcgtcctctggaggtctcagaccccttgcgcagactctgcgcgtgcccagagggagggatggcaggcttcagccacttctcccagccgccctaccgggacctctgggaacccccgcggcccggcggagagcgagagtccacgcagcggctgggcgggcagaggtccggagccaactcccccgcgtgctcccgggccgagactccgggtgcggagagcgaagctggggcgtgctggctgcacccgcactgttcattcacgccgcggcctcgcaggcgcgggtgctcagactcaccgcggggcagccgaagcctgagcgatgtggtccgcaggcccctggaccgctccaggaagcacgggctccgcagcaggcgcctagaagatgcctggggagagacaggaaccaagccccgcccagcttggcagccgcagacccagctgccaccccagcggccgcagccctgccagcattacccactggcccagggagactcgcccccgcct

SEQ ID NO: 26856 - DNA, 90 bp, Macaca Mulatta
aggtggatttccaccctgcggtgaatgaggactcatatcattgctttccatttccaagtgtactttggccattgtgtgatcatgaacagc

SEQ ID NO: 26857 - DNA, 543 bp, Macaca Mulatta
aatgccaatactttttccctggaccttaaaacaatactggtgtctacagctatgggctgcttcacattcctgggagtggttttattttgttttcttctcctgtttgtgtggagccgagggaaaggcaagcacaaaaacagcattgaccttgagtatgtgcccaggaaaaacaatggtgctgctgtggaaggggaggtagctggacccaggaggttcaacatgaaaatgatttgaaggcccgcccctcacactactgtctctatcaatgttggtcatcagtaagacagtatggcacagtaaattactagattaagaggcagccgtgtgcagctgcccctgtatcaaaagcagggtctatggaagcaggaggacttccaatggagactctccatcgaaaggcaggcaggcatgtgtcagagcccttcacacagtgggatactaagtgtttgcattgcaaatattggcattctggggatctcagtaatgaacctgaatctttggctcacactcatggacaattattcagcattttctaccactgca

SEQ ID NO: 26858 - DNA, 1173 bp, Macaca Mulatta
  misc_feature (1)...(1173): n = A,T,C or G
cccccagtcccaccggaagttttccgcccctcggcatggacacctgggcttcctgccccacaagaggagccgccggcaccggggcaaggtgaagacgtggccgcgggatgaccccagccagcctgtgcacctcacggccttcctgggctacaaggcgggcatgacccacaccctgcgtgaggtgcaccggccggggctcnnnnnnnnnnnnnnnnnnnnnnnnnnnnnnnnnnnnnnnnnnnnnnnnnnnnnnnnnnnnnnnnnnnnnnnnnnnnnnnnnnnnnnnnnnnnnnnnnnnnnnnnnnnnnnnnnnnnnnnnnnnnnnnnnnnnnnnnnnnnnnnnnnnnnnnnnnnnnnnnnnnnnnnnnnnnnnnnnnnnnnnnnnnnnnnnnnnnnnnnnnnnnnnnnnnnnnnnnnnnnnnnnnnnnnnnnnnnnnnnnnnnnnnnnnnnnnnnnnnnnnnnnnnnnnnnnnnnnnnnnnnnnnnnnnnnnnnnnnnnnnnnnnnnnnnnnnnnnnnnnnnnnnnnnnnnnnnnnnnnnnnnnnnnnnnnnnnnnnnnnnnnnnnnnnnnnnnnnnnnnnnnnnnnnnnnnnnnnnnnnnnnnnnnnnnnnnnnnnnnnnnnnnnnnnnnnnnnnnnnnnnnnnnnnnnnnnnnnnnnnnnnnnnnnnnnnnnnnnnnnnnnnnnnnnnnnnnnnnnnnnnnnnnnnnnnnnnnnnnnnnnnnnnnnnnnnnnnnnnnnnnnnnnnnnnnnnnnnnnnnnnnnnnnnnnnnnnnnnnnnnnnnnnnnnnnnnnnnnnnnnnnnnnnnnnnnnnnnnnnnnnnnnnnnnnnnnnnnnnnnnnnnnnnnnnnnnnnnnnnnnnnnnnnnnnnnnnnnnnnnnnnnnnnnnnnnnnnnnnnnnnnnnnnnnnnnnnnnnnnnnnnnnnnnnnnnnnnnnnnnnnnnnnnncgcagggtggtttcccgcactacggggaagtgaacaacgacttcgtcatgctgaaggggtgtattgctggtacgaagaagcgggtcattacgctgagaaagnagtccctcctggtgcaccacagccgccaggccgtggagaatattgagctcaagttcatcgacaccacctccaagtttggccatggccgcttccagacagccgaagagaagagggccttcatgg

SEQ ID NO: 26859 - DNA, 794 bp, Macaca Mulatta
  misc_feature (1)...(794): n = A,T,C or G
cagtgagccaatgttcattcagaagagagattaaagtgctttttgctgactagtcacagtcagagttagaatcacaggtggattaacagcgagtgttataaaagccttgaagtgaaagcccacagttttcttactaagaagagaagccttcaatggatccagctgtggctctggtgctctgtctctcctgtttgtttctcctttcactctggagacagagctctggaagagggaggcttccgtctggccccactcctctcccaattattggaaatatcctgcagttagatgttaaggacatgagcaaatccttaaccaannnnnnnnnnnnnnnnnnnnnnnnnnnnnnnnnnnnnnnnnnnnnnnnnnnnnnnnnnnnnnnnnnnnnnnnnnnnnnnnnnnnnnnnnnnnnnnnnnnnnnnnnnnnnnnnnnnnnnnnnnnnnnnnnnnnnnnnnnnnnnnnnnnnnnnnnnnnnnnnnnnnnnnnnnnnnnnnnnnnnnnnnnnnnnnnnnnnnnnnnnnnnnnnnnnnnnnnnnnnnnnnnnnnnnnnnnnnnnnnnnnnnnnnnnnnnnnnnnnnnnnnnnnnnnnnnnnnnnnnnnnnnnnnnnnnnnnnnnnnnnnnnnnnnnnncctcaccctgtgatcccactttcatcctgggctgtgctccctgcaatgtgatctgctctgttattttccataatcgatttgattataaagatcagagatttcttaacttgatggaaaaattcaatgaaaacctcaggattctgagctccccatggatccaggt

SEQ ID NO: 26860 - DNA, 9332 bp, Macaca Mulatta
  misc_feature (1)...(9332): n = A,T,C or G
aggtcacagtgtgagaaacatccaggcctttgcagttcttcagaatgcatttttaaaagcaaagaccagcttccttgcccaaatcatccttgatgctatcacaaatatctacatggctgacaatgccaattacttcatcctagagtcacagcacacgttgtcacaatttgcagagaagatttctaaactcccagaagtacaaaacaaatactttgagatgctggagtttgttgtttttagcttaaattatattccttgtaaagaacttattagtgtcagtatcctcttaaaatctagctcttcttatcactgtagcattattgcaatgaaaacacttcttaagtttacaagacatgactacatatttaaagatgtgttcagggaggttggccttttggaggtcatggtaaaccttttgcataaatatgctgccctgttgaaggatccaactcaggcacaaaatgagcaagnnnnnnnnnnnnnnnnnnnnnnnnnnnnnnnnnnnnnnnnnnnnnnnnnnnnnnnnnnnnnnnnnnnnnnnnnnnnnnnnnnnnnnnnnnnnnnnnnnnnnnnnnnnnnnnnnnnnnnnnnnnnnnnnnnnnnnnnnnnnnnnnnnnnnnnnnnnnnnnnnnnnnnnnnnnnnnnnnnnnnnnnnnnnnnnnnnnnnnnnnnnnnnnnnnnnnnnnnnnnnnnnnnnnnnnnnnnnnnnnnnnnnnnnnnnnnnnnnnnnnnnnnnnnnnnnnnnnnnnnnnnnnnnnnnnnnnnnnnnnnnnnnnnnnnnnnnnnnnnnnnnnnnnnnnnnnnnnnnnnnnnnnnnnnnnnnnnnnnnnnnnnnnnnnnnnnnnnnnnnnnnnnnnnnnnnnnnnnnnnnnnnnnnnnnnnnnnnnnnnnnnnnnnnnnnnnnnnnnnnnnnnnnnnnnnnnnnnnnnnnnnnnnnnnnnnnnnnnnnnnnnnnnnnnnnnnnnnnnnnnnnnnnnnnnnnnnnnnnnnnnnnnnnnnnnnnnnnnnnnnnnnnnnnnnnnnnnnnnnnnnnnnnnnnnnnnnnnnnnnnnnnnnnnnnnnnnnnnnnnnnnnnnnnnnnnnnnnnnnnnnnnnnnnnnnnnnnnnnnnnnnnnnnnnnnnnnnnnnnnnnnnnnnnnnnnnnnnnnnnnnnnnnnnnnnnnnnnnnnnnnnnnnnnnnnnnnnnnnnnnnnnnnnnnnnnnnnnnnnnnnnnnnnnnnnnnnnnnnnnnnnnnnnnnnnnnnnnnnnnnnnnnnnnnnnnnnnnnnnnnnnnnnnnnnnnnnnnnnnnnnnnnnnnnnnnnnnnnnnnnnnnnnnnnnnnnnnnnnnnnnnnnnnnnnnnnnnnnnnnnnnnnnnnnnnnnnnnnnnnnnnnnnnnnnnnnnnnnnnnnnnnnnnnnnnnnnnnnnnnnnnnnnnnnnnnnnnnnnnnnnnnnnnnnnnnnnnnnnnnnnnnnnnnnnnnnnnnnnnnnnnnnnnnnnnnnnnnnnnnnnnnnnnnnnnnnnnnnnnnnnnnnnnnnnnnnnnnnnnnnnnnnnnnnnnnnnnnnnnnnnnnnnnnnnnnnnnnnnnnnnnnnnnnnnnnnnnnnnnnnnnnnnnnnnnnnnnnnnnnnnnnnnnnnnnnnnnnnnnnnnnnnnnnnnnnnnnnnnnnnnnnnnnnnnnnnnnnnnnnnnnnnnnnnnnnnnnnnnnnnnnnnnnnnnnnnnnnnnnnnnnnnnnnnnnnnnnnnnnnnnnnnnnnnnnnnnnnnnnnnnnnnnnnnnnnnnnnnnnnnnnnnnnnnnnnnnnnnnnnnnnnnnnnnnnnnnnnnnnnnnnnnnnnnnnnnnnnnnnnnnnnnnnnnnnnnnnnnnnnnnnnnnnnnnnnnnnnnnnnnnnnnnnnnnnnnnnnnnnnnnnnnnnnnnnnnnnnnnnnnnnnnnnnnnnnnnnnnnnnnnnnnnnnnnnnnnnnnnnnnnnnnnnnnnnnnnnnnnnnnnnnnnnnnnnnnnnnnnnnnnnnnnnnnnnnnnnnnnnnnnnnnnnnnnnnnnnnnnnnnnnnnnnnnnnnnnnnnnnnnnnnnnnnnnnnnnnnnnnnnnnnnnnnnnnnnnnnnnnnnnnnnnnnnnnnnnnnnnnnnnnnnnnnnnnnnnnnnnnnnnnnnnnnnnnnnnnnnnnnnnnnnnnnnnnnnnnnnnnnnnnnnnnnnnnnnnnnnnnnnnnnnnnnnnnnnnnnnnnnnnnnnnnnnnnnnnnnnnnnnnnnnnnnnnnnnnnnnnnnnnnnnnnnnnnnnnnnnnnnnnnnnnnnnnnnnnnnnnnnnnnnnnnnnnnnnnnnnnnnnnnnnnnnnnnnnnnnnnnnnnnnnnnnnnnnnnnnnnnnnnnnnnnnnnnnnnnnnnnnnnnnnnnnnnnnnnnnnnnnnnnnnnnnnnnnnnnnnnnnnnnnnnnnnnnnnnnnnnnnnnnnnnnnnnnnnnnnnnnnnnnnnnnnnnnnnnnnnnnnnnnnnnnnnnnnnnnnnnnnnnnnnnnnnnnnnnnnnnnnnnnnnnnnnnnnnnnnnnnnnnnnnnnnnnnnnnnnnnnnnnnnnnnnnnnnnnnnnnnnnnnnnnnnnnnnnnnnnnnnnnnnnnnnnnnnnnnnnnnnnnnnnnnnnnnnnnnnnnnnnnnnnnnnnnnnnnnnnnnnnnnnnnnnnnnnnnnnnnnnnnnnnnnnnnnnnnnnnnnnnnnnnnnnnnnnnnnnnnnnnnnnnnnnnnnnnnnnnnnnnnnnnnnnnnnnnnnnnnnnnnnnnnnnnnnnnnnnnnnnnnnnnnnnnnnnnnnnnnnnnnnnnnnnnnnnnnnnnnnnnnnnnnnnnnnnnnnnnnnnnnnnnnnnnnnnnnnnnnnnnnnnnnnnnnnnnnnnnnnnnnnnnnnnnnnnnnnnnnnnnnnnnnnnnnnnnnnnnnnnnnnnnnnnnnnnnnnnnnnnnnnnnnnnnnnnnnnnnnnnnnnnnnnnnnnnnnnnnnnnnnnnnnnnnnnnnnnnnnnnnnnnnnnnnnnnnnnnnnnnnnnnnnnnnnnnnnnnnnnnnnnnnnnnnnnnnnnnnnnnnnnnnnnnnnnnnnnnnnnnnnnnnnnnnnnnnnnnnnnnnnnnnnnnnnnnnnnnnnnnnnnnnnnnnnnnnnnnnnnnnnnnnnnnnnnnnnnnnnnnnnnnnnnnnnnnnnnnnnnnnnnnnnnnnnnnnnnnnnnnnnnnnnnnnnnnnnnnnnnnnnnnnnnnnnnnnnnnnnnnnnnnnnnnnnnnnnnnnnnnnnnnnnnnnnnnnnnnnnnnnnnnnnnnnnnnnnnnnnnnnnnnnnnnnnnnnnnnnnnnnnnnnnnnnnnnnnnnnnnnnnnnnnnnnnnnnnnnnnnnnnnnnnnnnnnnnnnnnnnnnnnnnnnnnnnnnnnnnnnnnnnnnnnnnnnnnnnnnnnnnnnnnnnnnnnnnnnnnnnnnnnnnnnnnnnnnnnnnnnnnnnnnnnnnnnnnnnnnnnnnnnnnnnnnnnnnnnnnnnnnnnnnnnnnnnnnnnnnnnnnnnnnnnnnnnnnnnnnnnnnnnnnnnnnnnnnnnnnnnnnnnnnnnnnnnnnnnnnnnnnnnnnnnnnnnnnnnnnnnnnnnnnnnnnnnnnnnnnnnnnnnnnnnnnnnnnnnnnnnnnnnnnnnnnnnnnnnnnnnnnnnnnnnnnnnnnnnnnnnnnnnnnnnnnnnnnnnnnnnnnnnnnnnnnnnnnnnnnnnnnnnnnnnnnnnnnnnnnnnnnnnnnnnnnnnnnnnnnnnnnnnnnnnnnnnnnnnnnnnnnnnnnnnnnnnnnnnnnnnnnnnnnnnnnnnnnnnnnnnnnnnnnnnnnnnnnnnnnnnnnnnnnnnnnnnnnnnnnnnnnnnnnnnnnnnnnnnnnnnnnnnnnnnnnnnnnnnnnnnnnnnnnnnnnnnnnnnnnnnnnnnnnnnnnnnnnnnnnnnnnnnnnnnnnnnnnnnnnnnnnnnnnnnnnnnnnnnnnnnnnnnnnnnnnnnnnnnnnnnnnnnnnnnnnnnnnnnnnnnnnnnnnnnnnnnnnnnnnnnnnnnnnnnnnnnnnnnnnnnnnnnnnnnnnnnnnnnnnnnnnnnnnnnnnnnnnnnnnnnnnnnnnnnnnnnnnnnnnnnnnnnnnnnnnnnnnnnnnnnnnnnnnnnnnnnnnnnnnnnnnnnnnnnnnnnnnnnnnnnnnnnnnnnnnnnnnnnnnnnnnnnnnnnnnnnnnnnnnnnnnnnnnnnnnnnnnnnnnnnnnnnnnnnnnnnnnnnnnnnnnnnnnnnnnnnnnnnnnnnnnnnnnnnnnnnnnnnnnnnnnnnnnnnnnnnnnnnnnnnnnnnnnnnnnnnnnnnnnnnnnnnnnnnnnnnnnnnnnnnnnnnnnnnnnnnnnnnnnnnnnnnnnnnnnnnnnnnnnnnnnnnnnnnnnnnnnnnnnnnnnnnnnnnnnnnnnnnnnnnnnnnnnnnnnnnnnnnnnnnnnnnnnnnnnnnnnnnnnnnnnnnnnnnnnnnnnnnnnnnnnnnnnnnnnnnnnnnnnnnnnnnnnnnnnnnnnnnnnnnnnnnnnnnnnnnnnnnnnnnnnnnnnnnnnnnnnnnnnnnnnnnnnnnnnnnnnnnnnnnnnnnnnnnnnnnnnnnnnnnnnnnnnnnnnnnnnnnnnnnnnnnnnnnnnnnnnnnnnnnnnnnnnnnnnnnnnnnnnnnnnnnnnnnnnnnnnnnnnnnnnnnnnnnnnnnnnnnnnnnnnnnnnnnnnnnnnnnnnnnnnnnnnnnnnnnnnnnnnnnnnnnnnnnnnnnnnnnnnnnnnnnnnnnnnnnnnnnnnnnnnnnnnnnnnnnnnnnnnnnnnnnnnnnnnnnnnnnnnnnnnnnnnnnnnnnnnnnnnnnnnnnnnnnnnnnnnnnnnnnnnnnnnnnnnnnnnnnnnnnnnnnnnnnnnnnnnnnnnnnnnnnnnnnnnnnnnnnnnnnnnnnnnnnnnnnnnnnnnnnnnnnnnnnnnnnnnnnnnnnnnnnnnnnnnnnnnnnnnnnnnnnnnnnnnnnnnnnnnnnnnnnnnnnnnnnnnnnnnnnnnnnnnnnnnnnnnnnnnnnnnnnnnnnnnnnnnnnnnnnnnnnnnnnnnnnnnnnnnnnnnnnnnnnnnnnnnnnnnnnngtcaaagagaagatcacagggattgtcactggatgcagtgtatcactgcctcaataggaccatcttgtaccagttctcacgggcacacaaaactgttcctcagcaagtagctctgcttgattcactcagggtcctcactgtaaacagaaacttgatcctaggacctgggaaccatgaccaagaatttattagctgtctggcccactgcttgatcaatctacatgttggaagnnnnnnnnnnnnnnnnnnnnnnnnnnnnnnnnnnnnnnnnnnnnnnnnnnnnnnnnnnnnnnnnnnnnnnnnnnnnnnnnnnnnnnnnnnnnnnnnnnnnnnnnnnnnngggcgtcagcttctcataaaagctgtcaacagagtttggactgaactgatacatagtaagaaacaagtcttagaggagctgttcaaagtaactctgcctgtgaatgaaaggggccacgtggacatagctacagcaaggccactcattgaagaagctgccctgaagtgctggcagaatcatttggcccatgaaaagaaatgcataagtcgaggagaagctttagtgcccaccacacagtccaaattatcccgtgtcagcagtggctttggtctttccaagttaacaggatcaagaaggaatcgaaaagaaagtggtcttaataaacacagtctttccacccaggnnnnnnnnnnnnnnnnnnnnnnnnnnnnnnnnnnnnnnnnnnnnnnnnnnnnnnnnnnnnnnnnnnnnnnnnnnnnnnnnnnnnnnnnnnnnnnnnnnnnnnnnnnnnnnnnnnnnnnnnnnnnnnnnnnnnnnnnnnnnnnnnnnnnnnnnnnnnnnnnnnnnnnnnnnnnnnnnnnnnnnnnnnnnnnnnnnnnnnnnnnnnnnnnnnnnnnnnnnnnnnnnnnnnnnnnnnnnnnnnnnnnnnnnnnnnnnnnnnnnnnnnnnnnnnnnnnnnnnnnnnnnnnnnnnnnnnnnnnnnnnnnnnnnnnnnnnnnnnnnnnnnnnnnnnnnnnnnnnnnnnnnnnnnnnnnnnnnnnnnnnnnnnnnnnnnnnnnnnnnnnnnnnnnnnnnnnnnnnnnnnnnnnnnnnnnnnnnnnnnnnnnnnnnnnnnnnnnnnnnnnnnnnnnnnnnnnnnnnnnnnnnnnnnnnnnnnnnnnnnnnnnnnnnnnnnnnnnnnnnnnnnnnnnnnnnnnnnnnnnnnnaggtttggtcaagcctcctctaaaacgctcccgatctgcacctgatggaggagatgaggagaaccaggagcagctacaagaccagattgccgagggcagctccatagaagaggaggagaaaacagataatgctaccttactgcgtctgttagaggaaggagaaaannnnnnnnnnnnnnnnnnnnnnnnnnnnnnnnnnnnnnnnnnnnnnnnnnnnnnnnnnnnnnnnnnnnnnnnnnnnnnnnnnnnnnnnnnnnnnnnnnnnnnnnnnnnnnnnnnnnnnnnnnnnnnnnnnnnnnnnnnnnnnnnnnnnnnnnnnnnnnnnnnnnnnnnnnnnnnnnnnnnnnnnnnnnnnnnnnnnnnnnnnnnnnnnnnnnnnnnnnnnnnnnnnnnnnnnnnnnnnnnnnnnnnnnnnnnnnnnnnnnnnnnnnnnnnnnnnnnnnnnnnnnnnnnnnnnnnnnnnnnnnnnnnnnnnnnnnnnnnnnnnnnnnnnnnnnnnnnnnnnnnnnnnnnnnnnnnnnnnnnnnnnnnnnnnnnnnnnnnnnnnnnnnnnnnnnnnnnnnnnnnnnnnnnnnnnnnnnnnnnnnnnnnnnnnnnnnnnnnnnnnnnnnnnnnnnnnnnnnnnnnnnnnnnnnnnnnnnnnnnnnnnnnnnnnnnnnnnnnnnnnnnnnnnnnnnnnnnnnnnnnnnnnnnnnnnnnnnnnnnnnnnnnnnnnnnnnnnnnnnnnnnnnnnnnnnnnnnnnnnnnnnnnnnnnnnnnnnnnnnnnnnnnnnnnnnnnnnnnnnnnnnnnnnnnnnnnnnnnnnnnnnnnnnnnnnnnnnnnnnnnnnnnnnnnnnnnnnnnnnnnnnnnnnnnnnnnnnnnnnnnnnnnnnnnnnnnnnnnnnnnnnnnnnnnnnnnnnnnnnnnnnnnnnnnnnnnnnnnnnnnnnnnnnnnnnnnnnnnnnnnnnnnnnnnnnnnnnnnnnnnnnnnnnnnnnnnnnnnnnnnnnnnnnnnnnnnnnnnnnnnnnnnnnnnnnnnnnnnnnnnnnnnnnnnnnnnnnnnnnnnnnnnnnnnnnnnnnnnnnnnnnnnnnnnnnnnnnnnnnnnnnnnnnnnnnnnnnnnnnnnnnnnnnnnnnnnnnnnnnnnnnnnnnnnnnnnnnnnnnnnnnnnnnaggctgtaaacaaaatggcaccaagcttggagatgttatccttccaccctgggcaaaaggggacccacgagaattcatcagagtccatcgtgaggnnnnnnnnnnnnnnnnnnnnnnnnnnnnnnnnnnnnnnnnnnnnnnnnnnnnnnnnnnnnnnnnnnnnnnnnnnnnnnnnnnnnnnnnnnnnnnnnnnnnnnnnnnnnnnnnnnnnnnnnnnnnnnnnnnnnnnnnnnnnnnnnnnnnnnnnnnnnnnnnnnnnnnnnnnnnnnnnnnnnnnnnnnnnnnnnnnnnnnnnnnnnnnnnncagttatttaaaaaacctcatccaccaaagcgagtgagaagtcgactcaatggagacaatgcaggaatctctgtcctaccaggatctacaagtgacaagatcttttttcatcatctagacaacttgaggccttctctaacacctgtaaaannnnnnnnnnnnnnnnnnnnnnnnnnnnnnnnnnnnnnnnnnnnnnnnnnnnnnnnnnnnnnnnnnnnnnnnnnnnnnnnnnnnnnnnnnnnnnnnnnnnnnnnnnnnnnnnnnnnnnnnnnnnnnnnnnnnnnnnnnnnnnnnnnnnnnnnnnnnnnnnnnnnnnnnnnnnnnnnnnnnnnnnnnnnnnnnnnnnnnnnnnnnnnnnnnnnnnnnnnnnnnnnnnnnnnnnnnnnnnnnnnnnnnnnnnnnnnnnnnnnnnnnnnnnnnnnnnnnnnnnnnnnnnnnnnnnnnnnnnnnnnnnnnnnnnnnnnnnnnnnnnnnnnnnnnnnnnnnnnnnnnnnnnnnnnnnnnnnnnnnnnnnnnnnnnnnnnnnnnnnnnnnnnnnnnnnnnnnnnnnnnnnnnnnnnnnnnnnnnnnnnnnnnnnnnnnnnnnnnnnnnnnnnnnnnnnnnnnnnnnnnnnnnnnnnnnnnnnnnnnnnnnnnnnnnnnnnnnnnnnnnnnnnnnnnnnnnnnnnnnnnnnnnnnnnnnnnnnnnnnnnnnnnnnnnnnnnnnnnnnnnnnnnnnnnnnnnnnnnnnnnnnnnnnnnnnnnnnnnnnnnnnnnnnnnnnnnnnnnnnnnnnnnnnnnnnnnnnnnnnnnnnnnnnnnnnnnnnnnnnnnnnnnnnnnnnnnnnnnnnnnnnnnnnnnnnnnnnnnnnnnnnnnnnnnnnnnnnnnnnnnnnnnnnnnnnnnnnnnnnnnnnnnnnnnnnnnnnnnnnnnnnnnnnnnnnnnnnnnnnnnnnnnnnnnnnnnnnnnnnnnnnnnnnnnnnnnnnnnnnnnnnnnnnnnnnnnnnnnnnnnnnnnnnnnnnnnnnnnnnnnnnnnnnnnnnnnnnnnnnnnnnnnnnnnnnnnnnnnnnnnnnnnnnnnnnnnnnnnnnnnnnnnnnnnnnnnnnnnnnnnnnnnnnnnnnnnnnnnnnnnnnnnnnnnnnnnnnnnnnnnnnnnnnnnnnnnnnnnnnnnnnnnnnnnnnnnnnnnnnnnnnnnnnnnnnnnnnnnnnnnnnnnnnnnnnnnnnnnnnnnnnnnnnnnnnnnnnnnnnnnnnnnnnnnnnnnnnnnnnnnnnnnnnnnnnnnnnnnnnnnnnnnnnnnnnnnnnnnnnnnnnnnnnnnnnnnnnnnnnnnnnnnnnnnnnnnnnnnnnnnnnnnnnnnnnnnnnnnnnnnnnnnnnnngatcacagtaggatcctcgttggtgacagtcgaggccgagttttcagctggtctgtgagtgaccagccaggccgttctgctgctgatcactgggtgaaggatgaaggcggtgacagctgctcaggctgctcggtgaggttttcactcacagaaagacgacaccattgcaggaactgtggtcagctcttctgccagaagt

SEQ ID NO: 26861 - DNA, 948 bp, Macaca Mulatta
  misc_feature (1)...(948): n = A,T,C or G
gggggatgacctcaaggcaacattcacagcaaggaatcgagaagcaaagcaattaactcagttagaaagaacacgtcagcgaaacccatctgatcgacatgttatttcacaggcagaaacggaattacagagagctgcaatggatgctagccgaacaagtcgtcatctggaggaaactattaacaactttgaaaggcagaaaatgaaggatataaagactatattttctgaatttatcacaatcgaaatgttatttcacggcaaagctttagaggtctacactgctgcctaccagaatatacaaaacattgatgaagatgaagatttagaggttttccgaaattctctgtatgcaccagattattcatctcgtttagatattgtacgagcaaattcaaagtccctctaaatcgcatggtgcagtctcagcctgnnnnnnnnnnnnnnnnnnnnnnnnnnnnnnnnnnnnnnnnnnnnnnnnnnnnnnnnnnnnnnnnnnnnnnnnnnnnnnnnnnnnnnnnnnnnnnnnnnnnnnnnnnnnnnnnnnnnnnnnnnnnnnnnnnnnnnnnnnnnnnnnnnnnnnnnnnnnnnnnnnnnnnnnnnnnnnnnnnnnnnnnnnnnnnnnnnnnnnnnnnnnnnnnnnnnnnnnnnnnnnnnnnnnnnnnnnnnnnnnnnnnnnnnnnnnnnnnnnnnnnnnnnnnnnnnnnnnnnnnnnnnnnnnnnnnnnnnnnnnnnnnnnnnnnnnnnnnnnnnnnnnnnnnnnnnnnnnnnnnnnnnnnnnnnnnnnnnnnnnnnnnnnnnnnnnnnnnnnnnnnnnnnnnnnnnnnnnnnnnnnnnnnnnnnnnnnnnnnnnnnnnnnnnnnnnnnnnnnnnnnnnnnnnnnnnnnnnnnnnnnnnnnnnnnnnnnnnnnnnnnnnnnnnnnnnnnnnnnnnnnnnnnnnnnnnnnn

SEQ ID NO: 26862 - DNA, 2536 bp, Macaca Mulatta
  misc_feature (1)...(2536): n = A,T,C or G
ggtcgttcaagccctcagttagaccctttgagaaaaagcccaaccatggaacaagcagtgcagaccgcctcggcccacttacctgctccagcacctgttgggagaaggagtcctgtatcaaccaggcctttgccatctaccagccaaaaagcaatagagaatcaggagcacaggcgagnnnnnnnnnnnnnnnnnnnnnnnnnnnnnnnnnnnnnnnnnnnnnnnnnnnnnnnnnnnnnnnnnnnnnnnnnnnnnnnnnnnnnnnnnnnnnnnnnnnnnnnnnnnnnnnnnnnnnnnnnnnnnnnnnnnnnnnnnnnnnnnnnnnnnnnnnnnnnnnnnnnnnnnnnnnnnnnnnnnnnnnnnnnnnnnnnnnnnnnnnnnnnnnnnnnnnnnnnnnnnnnnnnnnnnnnnnnnnnnnnnnnnnnagaagataaacttgagaaacaggagaagcctgtaaatggtgaagataaaggagactcaggagttgatacccaaaacagtgaaggaaatgctgatgaagaagatccacttggacctaattgctattatgacaaaactaaatccttctttgataatatttcttgtgatgacaatannnnnnnnnnnnnnnnnnnnnnnnnnnnnnnnnnnnnnnnnnnnnnnnnnnnnnnnnnnnnnnnnnnnnnnnnnnnnncgtgggggatactgatccagaggaggtcttggtttccgtggtggcagagggcgtggtggtggcagaggtggtaccttcactgcccctcgaggatttcgaggtggattcagaggaggtcgtgggggccgggagtttgcagattttgaatataggaaagacaacaaagttgctgcatagtctacaaacaagtctctgaaaataggtgaatttctagctcttcatggtcctgaaaattgatttcagtctttgcgaagaatgaagaagtgaattcgctgtacatttgtcaccagcactggnnnnnnnnnnnnnnnnnnnnnnncgcttaatttcaaagataaaatgcagttacttttgggggtggaaggctcatcttaaaacatgagcattaaatctatttggaatagcagaaggttaagtaatttcttatgtatagttaaactaaagcagtacttcagtgggacttacaagtattttttcatcactgaaaggnnnnnnnnnnnntcactaaattgtatttggcaattgcaagttgcctgcagatagggccgtgatactgtgttttgagccacagaaggtnnnnnnnnnnnnnnnnnnnnnnnnnnnnnnnnnnnnnnnnnnntgtatctctttcctcctttcttttggggaatcctgtaatatgaggtagcttatttcgtcaattaattnnnnnnnnnnnnnnnnnnnnnnnnnnnnnnnnnnnnnnnnnnnnnnnnnnnnnnnnnnnnnnnnnnnnnnnnnnnnnnnnnnnnnnnnnnnnnnnnnnnnnnnnnnnnnnnnnnnnnnnnnnnnnnnnnnnnnnnnnnnnnnnnnnnnnnnnnnnnnnnnnnnnnnnnnnnnnnnnnnnnnnnnnnnnnnnnnnnnnnnnnnnnnnnnnnnnnnnnnnnnnnnnnnnnnnnnnnnnnnnnnnnnnnnnnnnnnnnnnnnnnnnnnnnnnnnnnnnnnnnnnnnnnnnnnnnnnnnnnnnnnnnnnnnnnnnnnnnnnnnnnnnnnnnnnnnnnnnnnnnnnnnnnnnnnnnnnnnnnnnnnnnnnnnnnnnnnnnnnnnnnnnnnnnnnnnnnnnnnnnnnnnnnnnnnnnnnnnnnnnnnnnnnnnnnnnnnnnnnnnnnnnnnnnnnnnnnnnnnnnnnnnnnnnnnnnnnnnnnnnnnnnnnnnnnnnnnnnnnnnnnnnnnnnnnnnnnnnnnnnnnnnnnnnnnnnnnnnnnnnnnnnnnnnnnnnnnnnnnnnnnnnnnnnnnnnnnnnnnnnnnnnnnnnnnnnnnnnnnnnnnnnnnnnnnnnnnnnnnnnnnnnnnnnnnnnnnnnnnnnnnnnnnnnnnnnnnnnnnnnnnnnnnnnnnnnnnnnnnnnnnntgactcagtatagagttcgttgctaattataaattactagtgaatctttttgatattttaagctctagtgggaaaaatctggccactttcgtgtttttatgaaggccatggaataaaaggatccaaagatttaaatatttttatctaatattttgattgttttattaactttctccttaaaacattcagtagtgataaagatacagaaactgcactgtaggagaattggaatatttaaggctggttgnnnnnnnnnnnnnnnnnnnnnnnnnnnngtatagctctacaaggcagtgttttgtaatttggtttcattattaagatccagtacttggcagccatagtttagataatattgtttagtgctgtttgtttgcatgttaacaacaaaaccttttagaggacccacaaatcatgatattgaacacatttctgaggcattcagagcatcaaagcaagtaccatggcaatacatgtgtagactgtttgaga

SEQ ID NO: 26863 - DNA, 168 bp, Macaca Mulatta
ggcaaacaaaaagcagataagaaccgtgcccgagtagaagagaacttcttgaaactgacacatgtgcaaagacaggaagcagcacagtctcggcgggaggagaaaaaaagagcagagaaggagcgaatcatgaatgaggaagatcctgagaaacagcgcaggctggag

SEQ ID NO: 26864 - DNA, 410 bp, Macaca Mulatta
  misc_feature (1)...(410): n = A,T,C or G
aatcgtatgcatgagtctttgcatctgttcaacagcatatgtaaccacaagttctttgcggctacttccatcgtcctctttctcaacaagaaggatctctttgaggaaaaaatcaagaaagtccatctcagcatttgttttccagagtatgatggtaannnngtaacaactcctatgatgatgcggggaattacatcaagagccagttccttgacctcaatatgcgaaaagatgtcaaagaaatctacagtcacatgacctgtgctacagatacacagaatgtcaaatttgtgtttgatgcagttacagatattatcatcatattttatctcaaggactgtggcctcttctaatcctcaccattcctcaggtataaattctataaacaggcttggaatctgggtaattaa

SEQ ID NO: 26865 - DNA, 591 bp, Macaca Mulatta
  misc_feature (1)...(591): n = A,T,C or G
gccggttgaggccggaaaggcaagagatgaaggggccaggcccaggctggactcagccaaggcgcaagagccctgagggtgagggcatgttggtggggcgtaaaccaggcataaaccccttgagactgcacaaggaggagggtcaggagagggctagggtgagggggtgagaagagggccccttgggctgttaggaacgccctgtgttggtggcctacagggaagtatgcggccctggaggcacaagccatcagcccgctcctggagctgctgcactcccccatgaccgtagcgcgcctgaacgccaccaaggcccttaccatgctggcagaggcccccgagggccgcaaggtcctgcaggtgcacgtgcccactttccgtgccatggaggtggagtctcacgaaaagcctcaagtggctgaagccttacagcgggcagcccggattgccgtcagtgtcatcgagttcaaaccctgagcccctcatccacctctgtgtgtgaataaatgcactcaatctctttatcttgngtccgaatggcactttctgttcctggagcacagtcacatcttctctcggtctcttgccagg

SEQ ID NO: 26866 - DNA, 503 bp, Macaca Mulatta
ccctttaaagggtgactcgtcccacttgggttctgtctcctggtgcagggttgcaggcaagttgattagagcatcgccatgaagttcatcccctgcctcctgctggtgaccttgtcctgcctggggactttgggtcagaccccgaggcaaaagcaaggaagcgctggggaggaattccatttccagactggagggagagattcctgcactatgcgccccagcagcttggggccagatgctggagaagtctggcttcacgtcgactgccacaacacagaccagacatactggtgtgagtacagggggcagcccagtatgtgccaggctttcgtggctgaccccaaaccttactggaaccaagccctgcaggagctgaggcgccttcaccatgcatgccagggggccccggtgctgaggccatccgtgtgcaggaaggctgggccccaggcccacatgcagcaggtgacttccagcctcaagggcagcccagtgcccaaccagca

SEQ ID NO: 26867 - DNA, 442 bp, Macaca Mulatta
tcaccgtcttcatgctagccgcctccggcatctgcatcatcctcaatgtggccgaggtggtgtacctcatcatccgggcctgtgcccgccgagcccagcgccgctccaatccaccctcccgcaagggctcgggcttcggccaccgcctctcacctgaatacaagcagaatgagatcaacaagctgctgagcgagcaggatggttccctgaaagacatactgcgccgcagccctggcaccggggctgggctggctgagaagagcgaccgctgctcggcctgctgatgccacgtaccaggcaacctcccatcccgcccccgaccctgccctgggcgagcccctccttctcccctgccggtgcacaggcctctgcctgctggggattactcgatcaaaaccttccttccctggctacttcccttcctcccaggaccttccatttg

SEQ ID NO: 26868 - DNA, 435 bp, Macaca Mulatta
  misc_feature (1)...(435): n = A,T,C or G
tcatgaaaacaaatgactgctcctttttatntaatttgggaggcagggggaatcagaaggccctttacaatgaactatattgcaggagtcaatgaactgatttaggtgaattnttagttataggctacattgcataaaagctttgtcagctcccaacatcaggggagtcatttaatatagccttttccttatttgctagtatggttaaatgagagaatagtaaaatagatacaaagtcatctatgtaatgtgagaatgtggatgactttggcaaaatttataatttaaaaagctccaaataactggtttttttcaagagatttattctcatgctcttggctatactgtgaattactgaaatgttgaacaaacctgtgaaagacatacattcgctctttaagatggccaggagctaaacttgagtctccttaactg

SEQ ID NO: 26869 - DNA, 105 bp, Macaca Mulatta
aggtgaggtcccagcttgaagagaaggaaaacaagaagttccctgtatttaaggccgtgtcgttcaagagccaggtggtcgcggggacaaactacttcatcaagg

SEQ ID NO: 26870 - DNA, 336 bp, Macaca Mulatta
attcagtcacttttatgaagaattgatactcattgccttttcacatgtaaactcacaggaaaaaattattttacaagattattgaaaatcaagcatattgctgggttttcccttccggtttctttttattgtttgacagaaacaaaaaacaaccaccaccaacccacccaattctaatctgcaaaggcaagaacgccctaaactcaaagacgtgctcagttgggaaaaaaaattggtttcagttttgagataaatgagcatgttagcacaattaggattttaatcaggagactgagaggggcatgtctgtggcaccatcttcaaagaaagaaaggg

SEQ ID NO: 26871 - DNA, 765 bp, Macaca Mulatta
  misc_feature (1)...(765): n = A,T,C or G
ggggttaagagaggttgagtaactgaaggtcagacagatggtaaatagaataacaaaactagaatatagattttctcactcccagtcatttagtttttctgatatatcagcttggttctttgcaaatttgggacactaattctaactcagtctttgggaagaggagaaaccaatgtgatatgatcccaaatataagggaattccccacttttctgatgagactattaagaagaaaagctttttgccaattatataaactttgaagaatgtaacaaaaatagtccgnnnnnnnnnnnnnnnnnnnnnnnnnnnnnnactttcagaggctgagctgggtggatcccctgaggtcgggcattcgagaccagcttggccaaccaatatggtgaaaccccatgtctactagaaatacaaaaaaaattagctgggcgtggtggtggtgcctgtaatgnnnnnnnnnnnnnnnnnnnnnnnnnnnnnnnnnnnnnnnnctaggaggcggaannnnnnnnnnnnnnnnnnnttgccattgtactccagcctgggcaataagagcaaaactctgtctnnnnnnnnnnnnnnnnnnngaaaaataaaaccaaaaaactcctgtcttcggtccgtgcctccaagatgacnaagaaaagaaggaacaacgggtcatgccaaaacggggccgcggccacatgccgacctattcgctgcactaactngtgctcgatgtgtgcccaaaggaccaagccatttaagaaattcgtcattcca

SEQ ID NO: 26872 - DNA, 286 bp, Macaca Mulatta
  misc_feature (1)...(286): n = A,T,C or G
gaaaaacaacctaagacagagtcctcaacaactgcttcctctggctgcggcagcgacagcggcgatggcaacagctctgaaagtctggaagagaaagatattcaaatggagcttcaaggatctgaactgtggaagagattccatgacatcnnnnnnnnnnnnnnnnnnnnnnnnnnnnaggcggatgttcccctctgttcgggtcaaagtgaaagggttggatccagggaagcagtactatgtggccatcgatgtggtgccagtggattccaaacgctataggtan

SEQ ID NO: 26873 - DNA, 1460 bp, Macaca Mulatta
  misc_feature (1)...(1460): n = A,T,C or G
gaccagagtaatgtggagaagcacgcagatggaatgatnnnnnnnnnnnnnnnnnnnnnnnnnnnnnnnnnnnnnnnnnnnnnnnnnnnnnnnnnnnnnnnnnnnnnnnnnnnnnnnnnnnnnnnnnnnnnnnnnnnnnnnnnnnnnnnnnnnnnnnnnnnnnnnnnnnnnnnnnnnnnnnnnnnnnnnnnnnnnnnnnnnnnnnnnnnnnnnnnnnnnnnnnnnnnnnnnnaggcagtggccattcaccaccaagtagcagtctcacttctccaagccatgtgaacttgtctccaaatacagtcccagagttctcttactccagcagtgaagatgaattttatgatgccgatgaattccatcaaagtggctcatccccaaagcgcttaatagnnnnnnnnnnnnnnnnnnnnnnnnnnnnnnnnnnnnnnnnnnnnnnnnnnnnnnnnnnnnnnnnnnnnnnnnnnnnnnnnnnnnnnnnnnnnnnnnnnnnnnnnnnnnnnnnnnnnnnnnnnnnnnnnnnnnnnnnnnnnnnnnnnnnnnnnnnnnnnnnnnnnnnnnnnnnnnnnnnnnnnnnnnnnnnnnnnnnnnnnnnnnnnnnnnnnnnnnnnnnnnnnnnnnnnnnnnnnnnnnnnnnnnnnnnnnnnnnnnnnnnnnnnnnnnnnnnnnnnnnnnnnnnnnnnnnnnnnnnnnnnnnnnnnnnnnnnnnnnnnnnnnnnnnnnnnnnnnnnnnnnnnnnnnnnnnnnnnnnnnnnnnnnnnnnnnnnnnnnnnnnnnnnnnnnnnnnnnnnnnnnnnnnnnnnnnnnnnnnnnnnnnnnnnnnnnnnnnnnnnnnnnnnnnnnnnnnnnnnnnnnnnnnnnnnnnnnnnnnnnnnnnnnnnnnnnnnnnnnnnnnnnnnnnnnnnnnnnnnnnnnnnnnnnnnnnnnnnnnnnnnnnnnnnnnnnnnnnnnnnnnnnnnnnnnnnnnnnnnnnnnnnnnnnnnnnnnnnnnnnnnnnnnnnnnnnnnnnnnnnnnnnnnnnnnnnnnnnnnnnnnnnnnnnnnnnnnnnnnnnnnnnnnnnnnnnnnnnnnnnnnnnnnnnnnnnnnnnnnnnnnnnnnnnnnnnnnnnnnnnnnnnnnnnnnnnnnnnnnnnnnnnnnnnnnnnnnnnnnnnnnnnnnnnnnnnnnnnnnnnnnnnnnnnnnnnnnnnnnnnnnnnnnnnnnnnnnnnnnnnnnnnnnnnnnnnnnnnnnnnnnnnnnnnnnnnnnnnnnnnnnnnnnnnnnnnnnnnnnnnnnnnnnnnnnnnnnnnnnnnnnnnnnnnnnnnnnnnnnnnnnnnnnnnnnnnnnnnnnnnnnnnnnnnnnnnnnnnnnnnnnnnnnnnnnnnnnnggaaaatacagtctttgtagataccaagaagttgcctataatcaagaagaaagtgaggaagttggaagatcagaatgagtatgaatcccgca

SEQ ID NO: 26874 - DNA, 460 bp, Macaca Mulatta
gcccccagaggagggcgtggaagtatcatttctatagtattgctcaccatggacagcccacccggaatggaatagctagaaagtcattgccctggaccccagccgcttccatgctcaaataactcaggcctgctctaatgcaaacattacagaagaggaaaactataagtattgacccagggacatctgtctagattctagaccctcaggttcccaagagcaaaagccctggaagaaccagctttgagcagtttttggtgaaaaccagcagcttgccatgactacagctaaagggccctttgagcaggtagatgctataagtgaaaggggccttggaggtctcagggggcagctccatagcagtctctgaggggtagaccagccaagccccacacctcttcccagcatttcagatcccctttaaataagggccctttcttacttgtcacctatcagtatt

SEQ ID NO: 26875 - DNA, 182 bp, Macaca Mulatta
  misc_feature (1)...(182): n = A,T,C or G
agatagatcttacaggtcccagcctgtagacatcttttactccaatntcctgaatagatagttttattccttcaaggtaatatagcgtggtggcttctggctgagatgtttgctgttgttttcttcatcttgtctttgatgacttgtcagcctggggtaactgcacaggagaaggtgaacca

SEQ ID NO: 26876 - DNA, 654 bp, Macaca Mulatta
  misc_feature (1)...(654): n = A,T,C or G
ctttgccctttcctctcactgccttttatagccaatataaatgtctctttgcacaccttttgttgtggttttatattgtaacaccatttttctttgaaactattgtatttaaagtaaggtttcatattatgtcagcaagtaattaacttatgtttaaaaggtgaccatatcatgtaccaaaagttgctgaagtttctcttctagctggtaaagtaggagtttgcatgacttcacactttttgttgcgtagtttgttctgttgtatgatggcgtgtgtgtgtgtcttgggtactactgtgtactactgtgtgcctagattccatgcactctcattgtgtttgaagtaaatattggagacgggacggtaactcataacaggttggcctgttgattacagctagtaattgctgtttcttgttcctccccctctctggcaccccagcttcccaagatgtggaaagcctggatctcagctccttgccccatattccttctgtaatttgtacctaacgagtgtgattatcctaattcaagagtcactaaaaatcatcacattatcattgcatatcagcaaagggtaaagtcccagcaccagtttgcttcacataccagcatgttccatttccaatttagaaatagncacataataaaatc

SEQ ID NO: 26877 - DNA, 2185 bp, Macaca Mulatta
  misc_feature (1)...(2185): n = A,T,C or G
tgccaggcttcccgtatccagcagccaccgccgcggccgcctaccgaggggcgcacctgcgaggccgcggccgcaccgtgtacaacaccttcagggccgcagcgcccccgcccccgatcccggcctatggcggnnnnnnnnnnnnnnnnnnnnnnnnnnnnnnnnnnnnnnnnnnnnnnnnnnnnnnnnnnnnnnnnnnnnnnnnnnnnnnnnnnnnnnnnnnnnnnnnnnnnnnnnnnnnnnnnnnnnnnnnnnnnnnnnnnnnnnnnnnnnnnnnnnnnnnnnnnnnnnnnnnnnnnnnnnnnnnnnnnnnnnnnnnnnnnnnnnnnnnnnnnnnnnnnnnnnnnnnnnnnnnnnnnnnnnnnnnnnnnnnnnnnnnnnnnnnnnnnnnnnnnnnnnnnnnnnnnnnnnnnnnnnnnnnnnnnnnnnnnnnnnnnnnnnnnnnnnnnnnnnnnnnnnnnnnnnnnnnnnnnnnnnnnnnnnnnnnnnnnnnnnnnnnnnnnnnnnnnnnnnnnnnnnnnnnnnnnnnnnnnnnnnnnnnnnnnnnnnnnnnnnnnnnnnnnnnnnnnnnnnnnnnnnnnnnnnnnnnnnnnnnnnnnnnnnnnnnnnnnnnnnnnnnnnnnnnnnnnnnnnnnnnnnnnnnnnnnnnnnnnnnnnnnnnnnnnnnnnnnnnnnnnnnnnnnnnnnnnnnnnnnnnnnnnnnnnnnnnnnnnnnnnnnnnnnnnnnnnnnnnnnnnnnnnnnnnnnnnnnnnnnnnnnnnnnnnnnnnnnnnnnnnnnnnnnnnnnnnnnnnnnnnnnnnnnnnnnnnnnnnnnnnnnnnnnnnnnnnnnnnnnnnnnnnnnnnnnnnnnnnnnnnnnnnnnnnnnnnnnnnnnnnnnnnnnnnnnnnnnnnnnnnnnnnnnnnnnnnnnnnnnnnnnnnnnnnnnnnnnnnnnnnnnnnnnnnnnnnnnnnnnnnnnnnnnnnnnnnnnnnnnnnnnnnnnnnnnnnnnnnnnnnnnnnnnnnnnnnnnnnnnnnnnnnnnnnnnnnnnnnnnnnnnnnnnnnnnnnnnnnnnnnnnnnnnnnnnnnnnnnnnnnnnnnnnnnnnnnnnnnnnnnnnnnnnnnnnnnnnnnnnnnnnnnnnnnnnnnnnnnnnnnnnnnnnnnnnnnnnnnnnnnnnnnnnnnnnnnnnnnnnnnnnnnnnnnnnnnnnnnnnnnnnnnnnnnnnnnnnnnnnnnnnnnnnnnnnnnnnnnnnnnnnnnnnnnnnnnnnnnnnnnnnnnnnnnnnnnnnnnnnnnnnnnnnnnnnnnnnnnnnnnnnnnnnnnnnnnnnnnnnnnnnnnnnnnnnnnnnnnnnnnnnnnnnnnnnnnnnnnnnnnnnnnnnnnnnnnnnnnnnnnnnnnnnnnnnnnnnnnnnnnnnnnnnnnnnnnnnnnnnnnnnnnnnnnnnnnnnnnnnnnnnnnnnnnnnnnnnnnnnnnnnnnnnnnnnnnnnnnnnnnnnnnnnnnnnnnnnnnnnnnnnnnnnnnnnnnnnnnnnnnnnnnnnnnnnnnnnnnnnnnnnnnnnnnnnnnnnnnnnnnnnnnnnnnnnnnnnnnnnnnnnnnnnnnnnnnnnnnnnnnnnnnnnnnnnnnnnnnnnnnnnnnnnnnnnnnnnnnnnnnnnnnnnnnnnnnnnnnnnnnnnnnnnnnnnnnnnnnnnnnnnnnnnnnnnnnnnnnnnnnnnnnnnnnnnnnnnnnnnnnnnnnnnnnnnnnnnnnnnnnnnnnnnnnnnnnnnnnnnnnnnnnnnnnnnnnnnnnnnnnnnnnnnnnnnnnnnnnnnnnnnnnnnnnnnnnnnnnnnnnnnnnnnnnnnnnnnnnnnnnnnnnnnnnnnnnnnnnnnnnnnnnnnnnnnnnnnnnnnnnnnnnnnnnnnnnnngtcacgggtcttcctgttttgtatttaaagaaaacagcagcaggctgtccctgagtagtttgctgcgataggttaagtcctcatgtgtacagtgcaggccctgtggcacgcacttcagtaagttatcaactccccgctgtgaacctgccaatccgctgtaacaactctgctttaaaacaaaaccaaacaaaacttnnnnnnnnnnngtgtgatccagctttctcttgccatcctatgtgcatgccgtaagatcagttggatattaaaccatcaataaagtttcacaagatttga

SEQ ID NO: 26878 - DNA, 354 bp, Macaca Mulatta
tcaaggcccctgtcctccaccagtaacccctttaagagttcaaagtgttctcccactgggagttccccaaacaacgtaagtgaattgtccctggcttccctcacagagaagatacaaaagatggaagaaaaccaccatagcactgcagaagaactacaggccactctacaggaactatcagaccagcaacaaatggtgcaggaattgacagctgaaaatgagaagctggtggatgaaaagacgattttagagacatcctttcatcagcatcgagagagggcagagcagctaagtcaagaaaatgagaagctgatgaatcttttacaagagcgagtaaagaatgaagagcccacc

SEQ ID NO: 26879 - DNA, 1997 bp, Macaca Mulatta
  misc_feature (1)...(1997): n = A,T,C or G
cagaactttacagactagcatggcaaagcttctctctgatcttagtgtggacagtgctcgctgcaagcctgggaataatcttaccagatcactcttgaacattcacgataaacaacttcaacatgacccagctcctgctcacacttccataatgagttatctaaataagttagaaacaaattacagttttacacattcagagccacagtctacaattaaaaatgaggaaaccatagagccagacgaaacctatgaaaatgttctgtcctccannnnnnnnnnnnnnnnnnnnnnnnnnnnnnnnnnnnnnnnnnnnnnnnnnnnnnnnnnnnnnnnnnnnnnnnnnnnnnnnnnnnnnnnnnnnnnnnnnnnnnnnnnnnnnnnnnnnnnnnnntaatttggataatacaatttacattccttttgctagaagcacttttgaaaagaaatcaccactttctaagagactgtcccctccttcacagataagagcagctacaacacagctagttagcaacagtggacttgctgtctctggaaaagaaaataaactgtgtacacctgtagtctgttcctcttcaacaaaggaagcagaagatgcacctgaaaaactttccagagcatctgatatgaaggacacacagctcctcaataaaataaaggaagtaattggtaagatccctgctgccaccaaggagccagaggaacaaactgcatgtcatggcccatcaggttgtcttagcaacagccttcaagtgaaaggcaatactgtctgtgacggtagtgttttcacttctgacttgatgtctgactggagcatctcttcattttcaacgttcacttctcgtgatgaacaagacttcagaaatggccttgcggcattagatgccaacatagctagactccagaagtctttaaggactggtcttctggagaaatgaattcagaagaaaactcatcgagtgcttctttttaaaactagaacttgactatattgaatgtgtatttttctttagtgaaatgatgttttatattattaattatgtgtgaagtaatacattgtacaagtactaattgtattgttgggatatattgacactgaggagcttataaaaagtcatcttaagaagttgacaattgctacaagaagaaagttgtagataactaggaaattactgtgagtaatgttttatttcagtacttagcaattagagttcttttattaagatgtatctgctggattaagggtacaggttgaaannnnnnnnnnnnnnnnnnnnnnnnnnnnnnnnnnnnnnnnnnnnnnnnnnnnnnnnnnnnnnnnnnnnnnnnnnnnnnnnnnnnnnnnnnnnnnnnnnnnnnnnnnnnnnnnnnnnnnnnnnnnnnnnnnnnnnnnnnnnnnnnnnnnnnnnnnnnnnnnnnnnnnnnnnnnnnnnnnnnnnnnnnnnnnnnnnnnnnnnnnnnnnnnnnnnnnnnnnnnnnnnnnnnnnnnnnnnnnnnnnnnnnnnnnnnnnnnnnnnnnnnnnnnnnnnnnnnnnnnnnnnnnnnnnnnnnnnnnnnnnnnnnnnnnnnnnnnnnnnnnnnnnnnnnnnnnnnnnnnnnnnnnnnnnnnnnnnnnnnnnnnnnnnnnnnnnnnnnnnnnnnnnnnnnnnnnnnnnnnnnnnnnnnnnnnnnnnnnnnnnnnnnnnnnnnnnnnnnnnnnnnnnnnnnnnnnnnnnnnnnnnnnnnnnnnnnnnnnnnnnnnnnnnnnnnnnnnnnnnnccagcatgttagctgataatattctctattctataaataatatgaagtagattgatctctctgcttctctataccacgacttcttagctcagtatcatctcccttcatgtaagcagcacattttaactcttaggaagctgaatgttgtgttatcactaatactttgtacaggtcacctgcctactctaattgtctttagtacttggacaggctttatcattaaagagtgttctcct

SEQ ID NO: 26880 - DNA, 150 bp, Macaca Mulatta
  misc_feature (1)...(150): n = A,T,C or G
nagtcggaattgagatgggagattggcaggaagtctgggatgagaacacaggatgttattactattggaatacacaaacaaatgaagtgacttgggagttaccccagtatcttgccacccaggtacagggattacagcattaccagccca

SEQ ID NO: 26881 - DNA, 334 bp, Macaca Mulatta
tctcaccagtgccccctgcaggtggagcagatgttcgccctgacacccatggacctggcggggaacatcgactacaagtcactgtgctacatcatcacccatggagacgagaaagaggaatgaggggcagggccaggcccacaagagggtacctcaataaactctgttgccaaattggaattgctgtggtgtcttttctgtgacagatgggctggggaccagccaagggggatcccaaggtcccagtgcacacatcaccatgatcatggccaccatctacctcctgggagctggccccttgccagctcaccttgattcactcccatgctgccaa

SEQ ID NO: 26882 - DNA, 1767 bp, Macaca Mulatta
caaccggcccagcttcgacgccatcctctactactatcagtctgggggccgcatccgccggccggtcaacgtgcccatcgacatcttctccgaggagatccgcttctaccagctgggcgaggaggccatggagaagttccgcgaggacgagggcttcctgcgggaggaggagcggcccttgccccgccgcgacttccagcgccaggtgtggctgctcttcgagtaccccgagagctccgggccagcccggggcatcgccatcgtgtccgtgctggtcatcctcatctccattgtcatcttctgcctggagacgctgccggaattccgcgacgagaaggactaccccgcctcgccgtcgcaggactcattcgatgcagccggcaacagcacgtcgggggccgccgcgggagcctccagcttctcggatcccttcttcgtggtggagacgctgtgcatcatctggttctccttcgagctgctggtgcggttcttcgcttgtcctagcaaagccaccttctcgcgaaacatcatgaacctgatcgacattgtggccatcatcccttattttatcactctgggtaccgagctggccgaacgacagggcaacggacagcaggccatgtctctggccatcctgagggtcatccgcctggtgagggtcttccgcatcttcaagctctcgcgccactccaaggggctgcagatcctcgggcaaacgctgaaggcgtccatgcgggagttggggttgctcatcttcttcctctttattggggtcatccttttctccagcgcggtctactttgccgaggcagacgaccccacttcaggtttcagcagcatcccggatgccttctggtgggcagtggtaaccatgacaacagtgggttacggcgatatgcacccagtgaccatagggggcaagattgtgggatctctctgtgccatcgccggtgtcttgaccatcgcattgcctgttcccgtgattgtttccaacttcaagttacttctaccaccggtgagacagaaggggaagagcaagcccagtacatgcacgtgggaagttgccagcacctctcctcttcagccgaggagctccgagaagcaaggagtaactcgactctgagtaagtcggagtatatggtgatcgaagaggggggtatgaaccatagcgctttcccccagacccctttcaaaacgggcaattccactgccacctgcaccacgaacaataatcccaactcttgtgtcaacatcaaaaagatattcaccgatgtttaatatatgatacaagtgacatgctgtgctccgtattgtgtggaacatgcccccttggtctgcctatgcccttgttttatacatttccagaccattcatcaaggaaaggacctgaagaagtggaaagcacacttcattctctctctccctactgcttcattactgaaacaggtgcctgttttgcaagtgggctgcattctctcagctctcctattcccccttaccctctctctcttaagattgtaatcaaaaacttacattaactgcatgcgtagtcagccctatcttgaagagcgcacatccgcgagaaagcacccacgggtgatactcgtgaccggaattaaggcgggtgcttccagaatactggcgaagaggacgtgagacgccaactttagaagaagggccccgcattgtggagtacaacattcccgtgtgtgactcactgtctgctccttctgttcatctcctacccattacttagcgcgcgtggtg

SEQ ID NO: 26883 - DNA, 531 bp, Macaca Mulatta
  misc_feature (1)...(531): n = A,T,C or G
ggcagatcgggagcggtgccgagaaaaatttccttactagatgacatttcatcgcaatgtccgatcgtttggggcaaattaccaagggcaaggatgggaaaagcaagtactcgnactctcagcctgtttgataagtataaaggaaaatcagtagacgcgattagatcctcagncagttattcctagacatggcttacagagtcttgggaaagttgccgcagcccggcgcatgccaccgcctgcaaacctgccgagcttgaagtctgaaaacaaaggaaacgaccccaacatcgtgatagtacccaaggacgggacgggatgggcaaacaagcaggatcagcaagacccaaagagnnnnnnnnnnnnnnnnnnnnnnnnnnnnnnnnnnnnnnnnnnnnnnnnnnnnnnnnnnnnnnnnnnnnnnnnnnnnnnnnnnnnnnnnnnnnnnnnnnnnnagaatacaaattcagtgccaggtggaccaaagtcatgggcacagctgaatggaaagccagtaggacacgaaggtgg

SEQ ID NO: 26884 - DNA, 654 bp, Macaca Mulatta
gggcagctagttttcttgtccctgtgggggtcttacagatgtgtctctgagtagtaaaggcttagccctgttccgttttgttgtttttttggaggggaaggttagtcaggcctgagtattcatgtaacattctaaaattgtgcaagcgagcaccgtgagctgctacaatgcaagtgggtcttgctggctaaagtgccaggtaaagggttggttggacacagcgcttagtgcacgctgtcatcatggacatcataatcagttgtgaaaaacacacgaacctctgacacttcctattccacactgaatgtgaaattgcatgtgcagatgtttactacggggcctggctcacaggaagtgttcagtaaaagtatgaactattagattactgatagcgcagatagatttttctttaccataaatagttccagatttatattgatggaaggaaatgtgcatttattagctattactcaactttacaatgcaaacatcatatttctcatctttaacatgtcgatcagtttaattgaaagtattctgagactgcaaaatgggtggttaaaaaatatgcaatttacgaactgtgtaaaccaattccctgctaagaaaatatgcaattgcatggaaggttaattgccggtacgaattccttcc

SEQ ID NO: 26885 - DNA, 884 bp, Macaca Mulatta
  misc_feature (1)...(884): n = A,T,C or G
ggggggctcggcttccncccgttccatnnnggnncaaattatgccgccatcctaagggacaggcgctccatcgggccattatttcttgggcccccgggattccaggagggggtaccatgctctcaggaagccccaaaataccacccgaccgaaaccaccagggatgcaagaaatccaccccaagggatgcattccaaatgtgaggtagctcgaattgcttcgattcctagctgtaacataggctaaaaacggaggggtcagtgaaaatcggaccttggtttgtgacaaagcctgagaatgtcatgctgatccatccaccaataagaatcatagggaggacatttgtcacattccctttcaccatgtctgtcagcatagtaggatcagtcataggagaaggtggcactaccttccgtttagtttttttgaaaaatccatcctctgggttgttcaagtaatattttcgtgtcaagaaagactgtttgggaatgtattttccattttccctgaggactctgcttcgaattaggacttgactgtcagatacttgttcctgggtgagcttcttgtcgctctgcagcaggatggacacgtagtggcggatcatgcctacgaagaaagtgatgataacgatgggtagaaccacccagaggcggatgttagagtcgagcaacagctctggccctgccatcctcactgaaagctcgctcccagtcgggaatgggcgagcttctcttctccagggcgcagttgcttctcttcggcttctcttcgacttcgcctccaggccttctcacgcccctttgccccgatatcccagaactaccctgcaacggagaggccagcttactgccttcagctgggctgcccggccttacactccc

SEQ ID NO: 26886 - DNA, 408 bp, Macaca Mulatta
caaatcaggtgaaaggctacaagctctaacacttcttatgatccactacagagcaggcattgaagatatagaaactttataaagtctgtctttagaccagcactccaaaaaaataagcaagtacacagatgatacagaagaagaccttgataatgaaataagccaactaatagactctcagccattcagcagcatatcagatgacttatttggcccatccgagtctgtgtagcagacaggtctatttaaactttcaaatgaacggggtaacgttgcatctaaagtaccacagatacaaccatgtataaatcctcttatgcactctggcctgcttctccagtgatctgcttgtgtaagaacaaaaatgaaaaaggttgtatgccagtaaaaacatgaccagcttactaa

SEQ ID NO: 26887 - DNA, 527 bp, Macaca Mulatta
  misc_feature (1)...(527): n = A,T,C or G
atgagaacgggattcccaatagtccccagaaggtagctctgaccctggatcttgacctggagaaggagccggaatcagagccagatgagccccagaagtcaggaaaaccttcagtcttcgttgtcttccagaagnnnnnnnnnnnnnnnnnnnnnnnnnnnnnnnnnnnnnnnnnnnnnnnnnnnnnnnnnnnnnnnnnnnnnnnnnnnnnnnnnnnnnnnnnnnnnnnnnnnnnnnnnnnnnnnnnnnnnnnnnnnnnnnnnnnnnnnnnnnnnnnnnnnnnnnnnnnnnnnnnnnnnnnnnnnnnnnnnnnnnnnnnnnnnnnngccagatgaggacagccggctgctgcccctgctggtctgcctgcggttcctgttcgtgcccctcttcatgctgtgccacgtgccccagaggtcccggctgcccaccctcttcccacaggatgcctacttcatcaccttcatgctgctgtttgccatttctaatggctacctggtgtccctcaccatgtgcttggcgcccag

SEQ ID NO: 26888 - DNA, 436 bp, Macaca Mulatta
caggcaggaaagacccccacggacctggtgcagctgtggcagaccgatacccggcacgccctggagcatcctgagccgggggctgagcataacggactggaggggcctgatgagagtgggcgggagacccctcagcccgtgccagcccagtgaatttgtgccccagcacagccagctacccagcccctgtctgtgtgcagccagagggtcctaagaatgactctcagagctaactgagggcccagccttttttctgcgtgatacaggagcacccacaaactaccacaataaaaaagctgtttttgctaattgcgatgttcatttccatttgtgtctgaaatctctgggaatgaaggaaggctgggggcaaatgttggcttggggaggaggaaaactgggagctggttggccctctgagccagccccgcagctgctt

SEQ ID NO: 26889 - DNA, 612 bp, Macaca Mulatta
gtctcggtcctttcgtggtcaacatggcagagagaaacatgaagttgttctcggggagagtagtgccagcccaggggaaagaaacctttgaaaactggctgatccaagtcaatggggtcctgccagattggagtatgtctgaggaggaaaaactcaagcgcttgatgaaaacacttaggggccctgcccgggaggtcatgcgtttgcttcaggcggccaaccccaacctaagtgtagcagatttcttgcgggccatgaaattggtgtttggggagtttgaaagcagtgtgactgcccatggtaaatttgttaacaccctgcaggcactaggggagaaagcctccctttatgtgatccgtttagagttgcagctccagaatgctattcaggctggcatcctagctgagaaagatgcaaaccagactggcttgcaacagcttcttttaggcaccgagctgaatagggacctgtgcttcaggcttaaattgaagcatcttctcaggatgtatgcaaatgcgcaggagcggcttcccaatttcctggagttaatcaagattataagggaggaagaggattgggatgatgcttttattaaacggaagcggccgaaaa

SEQ ID NO: 26890 - DNA, 141 bp, Macaca Mulatta
gattagaggatttcctacaatcaagatatttcagaaaggcgagtctcctgtggattacgacggtgggcggacaagatccgacatagtgtcccgggcccttgatttgttttctgataacgccccacctcatgagctgcttga

SEQ ID NO: 26891 - DNA, 197 bp, Macaca Mulatta
tgattttaagaaagttgcatgatcctgtaggagcaacatttttacctaaaaaatgctaactttgtagtatttctaattgttcaaggattttaaaattctatttcagggagtatatcttctgtgtgttttgaaggaggtgagttctgtatgtgccttgcagtactgtaattcaaaaataggaatctttggctgcgaaa

SEQ ID NO: 26892 - DNA, 499 bp, Macaca Mulatta
  misc_feature (1)...(499): n = A,T,C or G
naggccttcgatgatattgccaagtacttctctaagaaagagtgggaaaagatgaaatactcggagaaaatcagctatgtgtacatgaagagaaactatgaggccatgactaaactaggnnnnnnnnnnnnnnnnnnnnnnnnnnnnnnnnnnnnnnnnnnnnnnnnnnnnnnnnnnnnnnnnnnnnnnnnnnnnnnnnnnnnnnnnnnnnnnnnnnnnnnnnnnnnnnnnnnnnnnnnnnnnnnnnnnnnnnnnnnnnnnnnnnnnnnnnnnnnnnnnnnnnnnnnnnnnnnnnnnnnnnnnnnnnnnnnnnnnnnnnnnnnnnnnnnnnnnnnnnnnnnnnnnnnnnnnnnnnnnnnnnnnnnnnnnnnnnnnnnnnnnnnnnnnnnnnnnnnnnnggacccaaaagggagaaacatacctggacccacagactgcgtgagagaaagcagccggtgatttatgaagagatcagcgaccctgaggaagacgacgagta

SEQ ID NO: 26893 - DNA, 1243 bp, Macaca Mulatta
  misc_feature (1)...(1243): n = A,T,C or G
ncttccgtcggcccggccagaatcagctgccctctcaggctgtgtgggtggtttccccggcggcagctacgtgtgggcgtagattgctgggcctcagtgcacaccagcctccgctacgcgagttctgagctggagctggcggctcttttgactctgcttcactgttgctgctggcaacatccacttccgggagcgagtgccgtttccctagctcactgcgggctcgggagcgtggggttcgggcccccgagcggctgttgttagtacgtcgccgctgctggcgatccggcgaccctcggccggccggatccgcgggccacacagcccgggccttctcaccgcctcagtgcctcggcgggaccgccatggttctgctgcacgtgaagcggggcgacgagagccagttcctgctgcaggcgcctgggagcaccgagctggaggagctcacggtgcaggtggcccgggtctataatgggcgcctcaaggtgcagcgcctctgctcanagaaatggaagaattagctgaacatggcatatttctccctcctaatatgcaaggactgactgatgatcagattgaagaattgaaattgaaagatgaatggggtgaaaaatgtgtacccagtggaggtgcagtatttaaaaaggatgatattggacgaaggaatgggcaanagaaacaagtggaagccggtgtatgtgttacgatggagatggtgaaagatgccttggnnnnnnnnnnnnnnnnnnnnnnnnnnnnnnnnnnnnnnnnnnnnnnnnnnnnnnnnnnnnnnnnnnnnnnnnnnnnnnnnnnnnnnnnnnnnnnnnnnnnnnnnnnnnnnnnnnnnnnnnnnnnnnnnnnnnnnnnnnnnnnnnnnnnnnnnnnnnnnnnnnnnnnnnnnnnnnnnnnnnnnnnnnnnnnnnnnnnnnnnnnnnnnnnnnnnnnnnnnnnnnnnnnnnnnnnnnnnnnnnnnnnnnnnnnnnnnnnnnnnnnnnnnnnnnnnnnnnnnnnnnnnnnnnnnnnnnnnnnnnnnnnnnnnnnnnnnnnnnnnnnnnnnnnnagagataggaagaaaatgatgacgacgcctgtttaaactcaccatgggcggataacactgctttgaaaagacattttcatggagtaaaagacataaagtggagaccaagatgaagttcaccagctgatgacgcttccaaagagattagctcacctttctcctaggcgattataattttaaaaa

SEQ ID NO: 26894 - DNA, 568 bp, Macaca Mulatta
tccaaatcgtctctgtggcatgtgtccacctaggagagcgggctgagagcagaagtgggggtgaccatcctgttccttttctggtttctctgcaggtttcgctccctccattgtctcctctacccagatacaccctggtgtcctcagctgggtgcccgatgaatcctgaactgctgggcaaaggttgggcagaggcttctgggtgtgccttggctcgcaaggtggcactgagggtccctggccggcaaatgtcttgtgataggcagtccctggcagggccttcgggtggttggcaagcccaggatctgggtgacaattggcactgaaggcaccccaggcccctgggaggtgagttagacagcccaggggaccaggtggaccaggtgatggccagagaagctccaggggccagactccctcaggaggctgaactgaaaaagggcagggggcacttagctggcctggggctcaggggtcctaaccctttaggcagtgacatggcctctgggtggggtctggcccttggccctggctcatgtctctcagtcattcccctggggctcaagca

SEQ ID NO: 26895 - DNA, 97 bp, Macaca Mulatta
gtgggcgctctacctgttcctggttaaatgcatgatcagcatttccaccttcttactcctctgcctcatcgtggcctttcacgccaaagaggtccag

SEQ ID NO: 26896 - DNA, 2181 bp, Macaca Mulatta
  misc_feature (1)...(2181): n = A,T,C or G
ggttccatactgctgggagtcggtgcaagaatcggacaggcgctgagcacctgtggctgactcggcatctcagggacccgtttgtgaaggctgcgaaggtggcgagctaccggtgtcgaagcgccttcaagctcctggaggtgaacgagaggcaccagattctgcgacctggccttcgggtattagactgcggagcagctcctggggcctggagtcaggtggcggtgcagaaggtcaatgccgcaggcacannnnnnnnnnnnnnnnnnnnnnnnnnnnnnnnnnnnnnnnnnnnnnnnnnnnnnnnnnnnnnnnnnnnnnnnnnnnnnnnnnnnnnnnnnnnnnnnnnnnnnnnnnnnnnnnnnnnnnnnnnnnnnnnnnnnnnnnnnnnnnnnnnnnnnnnnnnnnnnnnnnnnnnnnnnnnnnnnnnnnnnnnnnnnnnnnnnnnnnnnnnnnnnnnnnnnnnnnnnnnnnnnnnnnnnnnnnnnggcctcccaaagtgctgggattacagatgtgagccacggcacccggctactcttgatgtattgacatctcttcccaacagcccagctaaatttccaagtcccgtaagccctggagcttcctggtggccccactggggctgctccctccagaacctagaagaggcttcatggccagggctatggattcgccactctgggtgaagctgagacgcagttttcaatctgttttatatcttagggttttgagtaaaattttctgtatagaaaggttcccctgaataatgagatcagccagctgcccatacgacggaagacactgtcgtcattgcgaaagtttcatcctgttccatgtagtgcttgcaccataggctctttagccagctccctcactgtgggcgtcaagcttacttttggctttttgctgggatgcgtgtgctgtggagaatatccttgctgtttatgtttcctgctgtaaagccagggtagctgcatgcactggcatttgaacagggtgagacagtccacccagagctctcccaaatctctcccaaataccttagagtagggatactggtccccatttattggtgagaaaactgaggctcagggtttcatgacttgttgaaagtgcagacctggaatgctgnnnnnnnnnnnnnnnnnnnnnnnnnnnnnnnnnnnnnnnnnnnnnnnnnnnnnnnnnnnnnnnnnnnnnnnnnnnnnnnnnnnnnnnnnnnnnnnnnnnnnnnnnnnnnnnnnnnnnnnnnnnnnnnnnnnnnnnnnnnnnnnnnnnnnnnnnnnnnnnnnnnnnnnnnnnnnnnnnnnnnnnnnnnnnnnnnnnnnnnnnnnnnnnnnnnnnnnnnnnnnnnnnnnnnnnnnnnnnnnnnnnnnnnnnnnnnnnnnnnnnnnnnnnnnnnnnnnnnnnnnnnnnnnnnnnnnnnnnnnnnnnnnnnnnnnnnnnnnnnnnnnnnnnnnnnnnnnnnnnnnnnnnnnnnnnnnnnnnnnnnnnnnnnnnnnnnnnnnnnnnnnnnnnnnnnnnnnnnnnnnnnnnnnnnnnnnnnnnnnnnnnnnnnnnnnnnnnnnnnnnnnnnnnnnnnnnnnnnnnnnnnnnnnnnnnnnnnnnnnnnnnnnnnnnnnnnnnnnnnnnnnnnnnnnnnnnnnnnnnnnnnnnnnnnnnnnnnnnnnnnnnnnnnnnnnnnnnnnnnnnnnnnnnnnnnnnnnnnnnnnnnnnnnnnnnnnnnnnnnnnnnnnnnnnnnnnnnnnnnnnnnnnnnnnnnnnnnnnnaaccaaaaagagatgacaaaactaagttcaggggccatggaaaatgaaaaagtcctctatattgatttgtgaagagaaagttatcaagagaaagaggtgaggatggaaggatgaagagagacagactgtgggaagaatcagaaggaatccgctgaggcagggatgggtgtgcccatgtgtgccttgacgggacttcatcttacagactgttaaactgtcacacagaaacaggctttccactgctcctcccagagcaccatgcacaggtttccagttcttagtgtggctatttaaagtagaaaatctgggggctgggtgaggccactcacacctataatcccagaaggctgaggctgggggattcttgaagtcagaagttcaagaccaacctgggcaacatagcaacacc

SEQ ID NO: 26897 - DNA, 84 bp, Macaca Mulatta
atggacgcaccttggaggcagcacctatagagcaggatttcgattggccggagttctcattccttctcccgggagagtcgctgc

SEQ ID NO: 26898 - DNA, 1353 bp, Macaca Mulatta
  misc_feature (1)...(1353): n = A,T,C or G
ctgcggcaaggcgttttccagaccctggttgcttcaaggacacattagaactcacacggnnnnnnnnnnnnnnnnnnnnnnnnnnnnnnnnnnnnnnnnnnnnnnnnnnnnnnnnnnnnnnnnnnnnnnnnnnnnnnnnnnnnnnnnnnnnnnnnnnnnnnnnnnnnnnnnnnnnnnnnnnnnnnnnnnnnnnnnnnnnnnnnnnnnnnnnnnnnnnnnnnnnnnnnnnnnnnnnnnnnnnnnnnnnnnnnnnnnnnnnnnnnnnnnnnnnnnnnnnnnnnnnnnnnnnnnnnnnnnnnnnnnnnnnnnnnnnnnnnnnnnnnnnnnnnnnnnnnnnnnnnnnnnnnnnnnnnnnnnnnnnnnnnnnnnnnnnnnnnnnnnnnnnnnnnnnnnnnnnnnnnnnnnnnnnnnnnnnnnnnnnnnnnnnnnnnnnnnnnnnnnnnnnnnnnnnnnnnnnnnnnnnnnnnnnnnnnnnnnnnnnnnnnnnnnnnnnnnnnnnnnnnnnnnnnnnnnnnnnnnnnnnnnnnnnnnnnnnnnnnnnnnnnnnnnnnnnnnnnnnnnnnnnnnnnnnnnnnnnnnnnnnnnnnnnnnnnnnnnnnnnnnnnnnnnnnnnnnnnnnnnnnnnnnnnnnnnnnnnnnnnnnnnnnnnnnnnnnnnnnnnnnnnnnnnnnnnnnnnnnnnnnnnnnnnnnnnnnnnnnnnnnnnnnnnnnnnnnnnnnnnnnnnnnnnnnnnnnnnnnnnnnnnnnnnnnnnnnnnnnnnnnnnnnnnnnnnnnnnnnnnnnnnnnnnnnnnnnnnnnnnnnnnnnnnnnnnnnnnnnnnnnnnnnnnnnnnnnnnnnnnnnnnnnnnnnnnnnnnnnnnnnnnnnnnnnnnnnnnnnnnnnnnnnnnnnnnnnnnnnnnnnnnnnnnnnnnnnnnnnnnnnnnnnnnnnnnnnnnnnnnnnnnnnnnnnnnnnnnnnnnnnnnnnnnnnnnnnnnnnnnnnnnnnnnnnnnnnnnnnnnnnnnnnnnnnnnnnnnnnnnnnnnnnnnnnnnnnnnnnnnnnnnnnnnnnnnnnnnnnnnnnnnnnnnnnnnnnnnnnnnnnnnnnnnnnnnnnnnnnnnnnnnnnnnnnnnnnnnnnnnnnnnnnnnnnnnnnnnnnnnnnnnnnnnnnnnnnnnnnnnnnnnnnnnnnnnnnnnnnnnnnnnnnnnnnnnnnnnnnnnnnnnnnnnnnnnnnnnnnnnnnnnnnnnnnnnnnnnnnnnnnnnnnnnnnnnnnnnnnnnnnnnnnnnnnnnnnnnnatcttgtttgtatactattttcagagactttacttcttcgtgattagtaccaaaccactgtacaaagaattgttt

SEQ ID NO: 26899 - DNA, 622 bp, Macaca Mulatta
  misc_feature (1)...(622): n = A,T,C or G
gtaaaaggaaatacagaggcagtgaaatagaagatctagtactccttgatgaagaatcgaggcctgtaaacttacctccagcattaaaacatcctcaagaattactataatgtgtccaaaatatcactgcatacaatatctggtatttgaagagaaaaactgacttttgtacagcataaaacacaggctttcacaaattttgtattgctttttttccagttttgcagaaaatttacattctagttctcttcacacagtagaagttgtaaataatttatgaatgacagtacacattaaaaggtatgcattaacagcatattagtatgctgttttatttgctgaagaaaatactgtcttctatttttaatgatacgttaggtacgacgtgtagttcggtagagttctaaaatttttgtactactttcaatttggtgaaaacgtattaagttgtctaccatgttttcttttctagctgaataaaccacatcaaagaaaagggaccacagtatttgaatgtttgaaagtctgtaaagcttaaggttttaaaaatgttgcccataatgttgaacatgtctgnnnnnnnnnnnnnnnnnnnnnngttgcttcaaactatttttatgag

SEQ ID NO: 26900 - DNA, 337 bp, Macaca Mulatta
agctgcagcatttggagatgggactgaccctagagtgttgcaatggcaaggtgaccagcctgcccacagactgtcagcttaggaaagggctggacacggagccggagtagttgatgaggcttcagagtgaagccccacctagctggcatggagatctcccggttgacatcagtgttccttgccaggatgctaattccatgtacgtgtaccccagaaccctgcaagggagttggaacaagcccagtgattgtgccaagttgtgtgagcccctctgttgtttcaccgccctgtggctcacacttccattctccaggctgagggccagcaccactcttga

SEQ ID NO: 26901 - DNA, 396 bp, Macaca Mulatta
ctcaggctgcctcctgggtcagcttttccttctgggtgctgttacagtggattctgaaatgcagtagagggcttttgttggcagaacaataaagtgcatttgctaaggcccctgatgcctaacttgcaccattctggtggtgttggcttttgtctctgctgtgttcagggggtgactgttgggcagactcatgggagaggtgtgaccaagtatgaccctttggatgacagggtcactgtgcacctgtttgtggtgggtagaggcctacagtgagagcttttgcttggcttccccaatgaagacctttctccacaattccagtgtggtgccaggtgtttccagacctctctgtaatccctcttagtatacgtggacacctggggatcccagagtgga

SEQ ID NO: 26902 - DNA, 2166 bp, Macaca Mulatta
  misc_feature (1)...(2166): n = A,T,C or G
gggatttgttcctgggctgtttggaacatcacacggtgcccttcagtttatggcgtatgaattgctgaagttgaagtacaaccagcatatcaatagattaccagaagcccagttgnnnnnnnnnnnnnnnnnnnnnnnnnnnnnnnnnnnnnnnnnnnnnnnnnnnnnnnnnnnnnnnnnnnnnnnnnnnnnnnnnnnnnnnnnnnnnnnnnnnnnnnnnnnnnnnnnnnnnnnnnnnnnnnnnnnnnnnnnnnnnnnnggaaagaaggcatcggtggattttacaagggaattgctcctaatttgattagagtgactccagcctgctgtattacctttgtggtatatgaaaacgtctcacattttttacttgaccttagagaaaagagaaagtaagctaaaagaggacaattccagtatatctgcccaaggcagcaacaagctcttttgtgtttaaggcataaaagaagaattctgcatagaaatgtggctcatattcgaaattggtctatagttatcagaagccagagaactgctaagtcttccgcaatgtatttctgctttttgccttccccatatatatggaacttgggtacctctgcctgaaatggctgccatcaacacagtgctaaaactgacacgaagtatagagtttcacagatttctgcgttttattggtggaacctgattcgcaacatttgctaaatggattagatgaatgtacttctttttgtgaacttaattgcctggattgctttaaagttaaccttcgtgcaataccaagaaaatggctccttaaaagaatgtctttgtatgtctcaaggtgaattaaggatttactgaataaggtgttgaccaaatccagaccattttannnnnnnnnnnnnnnnnnnnnnnnnnnnnnnnnnnnnnnnnnnnnnnnnnnnnnnnnnnnnnnnnnnnnnnnnnnnnnnnnnnnnnnnnnnnnnnnnnnnnnnnnnnnnnnnnnnnnnnnnnnnnnnnnnnnnnnnnnnnnnnnnnnnnnnnnnnnnnnnnnnnnnnnnnnnnnnnnnnnnnnnnnnnnnnnnnnnnnnnnnnnnnnnnnnnnnnnnnnnnnnnnnnnnnnnnnnnnnnnnnnnnnnnnnnnnnnnnnnnnnnnnnnnnnnnnnnnnnnnnnnnnnnnnnnnnnnnnnnnnnnnnnnnncagaccattttagaattgggaaattttagtgagaaaaaatccactgtaaatatgctttagttttaattcaattgggatgcactacctagcgaanatggagaaactatatacttctcagagaaatatctgacatctattgtcattccattgctannnnnnnnnnnnnnnnnnnnnnnnnnnnnnnnnnnnnnnnnnnnnnnnnnnnnnnnnnnnnnnnnnnnnnnnnnnnnnnnnnnnnnnnnnnnnnnnnnnnnnnnnnnnnnnnnnnnnnnnnnnnnnnnnnnnnnnnnnnnnnnnnnnnnnnnnnnnnnnnnnnnnnnnnnnnnnnnnnnnnnnnnnnnnnnnnnnnnnnnnnnnnnnnnnnnnnnnnnnnnnnnnnnnnnnnnnnnnnnnnnnnnnnnnnnnnnnnnnnnnnnnnnnnnnnnnnnnnnnnnnnnnnnnnnnnnnnnnnnnnnnnnnnnnnnnnnnnnnnnnnnnnnnnnnnnnnnnnnnnnnnnnnnnnnnnnnnnnnnnnnnnnnnnnnnnnnnnnnnnnnnnnnnnnnnnnnnnnnnnnnnnnnnnnnnnnnnnnnnnnnnnnnnnnnnnnnnnnnnnnnnnnnnnnnnnnnnnnnnnnnnnnnnnnnnnnnnnnnnnnnnnnnnnnnnnnnnnnnnnnnnnnnnnnnnnnnnnnnnnnnnnnnnnnnnnnnnnnnnnnnnnnnnnnnnnnnnnnnnnnnnnnnnnnnnnnnnnnnnnnnnnnnnnnnnnnnnnnnnnnnnnnnnnnnnnnnnnnnnnnnnnnnnnnnnnnnnnnnnnnnnnnnnnnnnnnnnnnnnnnnnnnnnnnntctggattatactataattcatatgaaatcttgatattagtccccatatggaaaaaatgaactgcagttgatatttggtgtttaagacagcaccattatttaaaaacctatgtactcccaaatgaataaaacataattcttgtcctctgagagcatacaa

SEQ ID NO: 26903 - DNA, 1646 bp, Macaca Mulatta
  misc_feature (1)...(1646): n = A,T,C or G
aggagctgatcgacctcaagatgattcagtgcaagagagttgtcaatnnnnnnnnnnnnnnnnnnnnnnnnnnnnnnnnnnnnnnnnnnnnnnnnnnnnnnnnnnnnnnnnnnnnnnnnnnnnnnnnnnnnnnnnnnnnnnnnnnnnnnnnnnnnnnnnnnnnnnnnnnnnnnnnnnnnnnnnnnnnnnnnnnnnnnnnnnnnnnnnnnnnnnnnnnnnnnnnnnnnnnnnnnnnnnnnnnnnnnnnnnnnnnnnnnnnnnnnnnnnnnnnnnnnnnnnnnnnnnnnnnnnnnnnnnnnnnnnnnnnnnnnnnnnnnnnnnnnnnnnnnnnnnnnnnnnnnnnnnnnnnnnnnnnnnnnnnnnnnnnnnnnnnnnnnnnnnnnnnnnnnnnnnnnnnnnnnnnnnnnnnnnnnnnnnnnnnnnnnnnnnnnnnnnnnnnnnnnnnnnnnnnnnnnnnnnnnnnnnnnnnnnnnnnnnnnnnnnnnnnnnnnnnnnnnnnnnnnnnnnnnnnnnnnnggaggatctcatgaccacatccaacggtattcggacatagaggactttcgacaagccacggcagcctcttctgtgatggtggcccgagcagccatgtggaacccatctatattcctcaaggagggtctgcggcccctggaggaggtcatgcagaaatacatcagatannnnnnnnnnnnnnnnnnnnnnnnnnnnnnnnnnnnnnnnnnnnnnnnnnnnnnnnnnnnnnnnnnnnnnnnnnnnnnnnnnnnnnnnnnnnnnnnnnnnnnnnnnnnnnnnnnnnnnnnnnnnnnnnnnnnnnnnnnnnnnnnnnnnnnnnnnnnnnnnnnnnnnnnnnnnnnnnnnnnnnnnnnnnnnnnnnnnnnnnnnnnnnnnnnnnnnnnnnnnnnnnnnnnnnnnnnnnnnnnnnnnnnnnnnnnnnnnnnnnnnnnnnnnnnnnnnnnnnnnnnnnnnnnnnnnnnnnnnnnnnnnnnnnnnnnnnnnnnnnnnnnnnnnnnnnnnnnnnnnnnnnnnnnnnnnnnnnnnnnnnnnnnnnnnnnnnnnnnnnnnnnnnnnnnnnnnnnnnnnnnnnnnnnnnnnnnnnnnnnnnnnnnnnnnnnnnggacaagtccaagaaactggcggagcaggctgcagccatcgtctgtctgcggagccagggcctccctgagggtcggctgggtgaggagagcccttccttgcacaagcgaaagagggaggctcctgaccaagaccctgggggccccagagctcaggagctagcacaacctggggagctgtgcaagaagccctttgtggccttaggaagtggtgaagagagccctctggaaggctggtgactactcttcctgccctagtcaccccctccatgggcctggtgctaaggtggctgtggatgccacagcatgaaccagatgcnnnnnnnnnnnngctggtcttgtctggcaggagttagatgtcctggcaggggccatcagcctagagcatggaccaggggccacccaagggtggatcctggcccctttggtggatctgacagggtcaagttctctttgaaaacaggagcttttcaggtggtacctccccaacctgacattggtactgtgcaataaagacaccccctaccctca

SEQ ID NO: 26904 - DNA, 446 bp, Macaca Mulatta
atgaaccacagctatgttttcaaacatgtagtttgcctttttgtttgttgtatcctgttcactctccttcacacagaacctttcatttattgtacaacattgcactcaccctaacctactggtggacagctatccagtttgccttgacaaatatactctgcttatgtgaatttattaaacgaccatgccatagtttgtggtttacctttattttacacagttcttttgaatgaaatgggtacttatattcatacagttaatagattacagagcttagtttatcaatctatgaaagttcttgatttatttaatagaattacatgcatttgatttaaaggtgtctttacaataattcagtagcttacatagtattatgcatattttgtaataaaacttaggccttaagcaaattccttccccaagagtatatatattctgtagttgat

SEQ ID NO: 26905 - DNA, 864 bp, Macaca Mulatta
  misc_feature (1)...(864): n = A,T,C or G
tgcataaaaggatccacacaggtgagaaaccctatgaatgtgatgagtgtgggannnnnnnnnnnnnnnnnnnnnnnnnnnnnnnnnnnnnnnnnnnnnnnnnnnnnnnnnnnnnnnnnnnnnnnnnnnnnnnnnnnnnnnnnnnnnnnnnnnnnnnnnnnnnnnnnnnnnnnnnnnnnnnnnnnnnnnnngtcatccacactggagacctaccttatgaatgtgacgaatgtgggaaggctttcaggaacagctcaggcctcatagtgcataaaaggatccccacgggagagaaaccttacaagtgtgatgtctgtggcaaagcattcagctatagctcaggcctcgcagtccataaaagcattcaccctggaaagaaagcccatgagtgtaaggagtgtgggaagtccttcagttataactcacttcttcttcagcacagaactattcacaccggagagagaccttatgtatgtgatgtgtgtgggaaaacgttcagaaacaatgcaggcctcaaagtccacaggaggctgcatactggggagaaaccctataagtgtgatgtgtgtgggaaagcctatatctcacgctctagccttaaaaatcacaaaggaatccaccttggggagaagccctataaatgtagctattgtgagaaatccttcaactacagctctgcccttgagcagcataaaaggattcataccagggaaaaaccctttgggtgtgatgagtgtggaaaagctttcagaaataattccggccttaaagtacataaacgaatccacactggggaacgaccttacaaatgtgaagaatgtgggaaagcgtacatctccctctcgagccttataaatcataaaa

SEQ ID NO: 26906 - DNA, 2105 bp, Macaca Mulatta
  misc_feature (1)...(2105): n = A,T,C or G
ccactcggacgagcggcccttcaaatgccagaatctgcccctacgccagccggaactccagccagctcaccgtccacctgcgatcccacacgggnggggacgcccccttccagtgctggctctgtagcgccaagttcaaaatcagctcggacttgaaaaggcacatgcgggtgcactcaggggagaagcctttcaagtgcgagttctgcaacgtccgctgcaccatgaaagggaacctcaagtcgcacatccgcatcaagcacagcnnnnnnnnnnnnnnnnnnnnnnnnnnnnnnnnnnnnnnnnnnnnnnnnnnnnnnnnnnnnnnnnnnnnnnnnnnnnnnnnnnnnnnnnnnnnnnnnnnnnnnnnnnnnnnnnnnnnnnnnnnnnnnnnnnnnnnnnnnnnnnnnnnnnnnnnnnnnnnnnnnnnnnnnnnnnnnnnnnnnnnnnnnnnnnnnnnnnnnnnnnnnnnnnnnnnnnnnnnnnnnnnnnnnnnnnnnnnnnnnnnnnnnnnnnnnnnnnnnnnnnnnnnnnnnnnnnnnnnnnnnnnnnnnnnnnnnnnnnnnnnnnnnnnnnnnnnnnnnnnnnnnnnnnnnnnnnnnnnnnnnnnnnnnnnnnnnnnnnnnnnnnnnnnnnnnnnnnnnnnnnnnnnnnnnnnnnnnnnnnnnnnnnnnnnnnnnnnnnnnnnnnnnnnnnnnnnnnnnnnnnnnnnnnnnnnnnnnnnnnnnnnnnnnnnnnnnnnnnnnnnnnnnnnnnnnnnnnnnnnnnnnnnnnnnnnnnnnnnnnnnnnnnnnnnnnnnnnnnnnnnnnnnnnnnnnnnnnnnnnnnnnnnnnnnnnnnnnnnnnnnnnnnnnnnnnnnnnnnnnnnnnnnnnnnnnnnnnnnnnnnnnnnnnnnnnnnnnnnnnnnnnnnnnnnnnnnnnnnnnnnnnnnnnnnnnnnnnnnnnnnnnnnnnnnnnnnnnnnnnnnnnnnnnnnnnnnnnnnnnnnnnnnnnnnnnnnnnnnnnnnnnnnnnnnnnnnnnnnnnnnnnnnnnnnnnnnnnnnnnnnnnnnnnnnnnnnnnnnnnnnnnnnnnnnnnnnnnnnnnnnnnnnnnnnnnnnnnnnnnnnnnnnnnnnnnnnnnnnnnnnnnnnnnnnnnnnnnnnnnnnnnnnnnnnnnnnnnnnnnnnnnnnnnnnnnnnnnnnnnnnnnnnnnntcaggaggggacagcagaagtgacagtggtgagcgatggaggccagaacatcgcagtggccaccactgcgccgccggtgttctcctcctcttcccagcaagaactacccaagcagacctactccatcattcaaggggcagcccatccagctttgctctgtcctgctgactccataccagattagtgcttaaaaaacaaaaggagtgggggaaaggaattgagaaaaagaaatcataagtagaattctctaaaaggtttgctctnnnnnnnnnnnnnnnnnnnnnnnnnnnnnnnnnnnnnnnnnagacggagtctcgctctgtttcccaggctggagtgcagtggcgcaatcttggctcactgcaagtcagcctcccaggttcaagcgattctggtgcctcagcctcccaagtagctgggaccacaggtgtacgacaccatgactggctaatttttgtatatttgatagagacggggtttcatcatgttgaactcctgacctcaagtgatctgcccacctcagcctcccaaaagtgctgggattacaggtgtgagccaccatgcctggccgtggtttgctcttaatatttttaaggatggctgtgaatccccctggccccataataaattgtaattttatactgcttactataatttttttaacactgtaacaactttgagaccacctctgaatcgtcacatcatactgttgtagaatcttaaatgttaccaaggtgattccaatgaggggttggaagaaaaatgcattaagtagtgaatatatgtgtttgtttccaacttgattttccaactctggtaaaggtttttgtccatcttattaaatttgtgtagtaaatggtacttcccagcatgtcttttgccccattctggaatactccccagagtttgg

SEQ ID NO: 26907 - DNA, 1253 bp, Macaca Mulatta
  misc_feature (1)...(1253): n = A,T,C or G
gggcttcatccaggccaagggctacccgccctaagacaacgtggaggtggtgaacgacggcgccgagtcggccgcgttcaagcagctcttccggacttggtctgtgaaggggagcaggaaccagaagcnnnnnnnnnnnnnnnnnnnnnnnnnnnnnnnnnnnnnnnnnnnnnnnnnnnnnnnnnnnnnnnnnnnnnnnnnnnnnnnnnnnnnnnnnnnnnnnnnnnnnnnnnnnnnnnnnnnnnnnnnnnnnnnnnnnnnnnnnnnnnnnnnnnnnnnnnnnnnnnnnnnnnnnnnnnnnnnnnnnnnnnnnnnnnnnnnnnnnnnnnnnnnnnnnnnnnnnnnnnnnnnnnnnnnnnnnnnnnnnnnnnnnnnnnnnnnnnnnnnnnnnnnnnnnnnnnnnnnnnnnnnnnnnnnnnnnnnnnnnnnnnnnnnnnnnnnnnnnnnnnnnnnnnnnnnnnnnnnnnnnnnnnnnnnnnnnnnnnnnnnnnnnnnnnnnnnnnnnnnnnnnnnnnnnnnnnnnnnnnnnnnnnnnnnnnnnnnnnnnnnnnnnnnnnnnnnnnnnnnnnnnnnnnnnnnnnnnnnnnnnnnnnnnnnnnnnnnnnnnnnnnnnnnnnnnnnnnnnnnnnnnnnnnnnnnnnnnnnnnnnnnnnnnnnnnnnnnnnnnnnnnnnnnnnnnnnnnnnnnnnnnnnnnnnnnnnnnnnnnnnnnnnnnnnnnnnnnnnnnnnnnnnnnnnnnnnnnnnnnnnnnnnnnnnnnnnnnnnnnnnnnnnnnnnnnnnnnnnnnnnnnnnnnnnnnnnnnnnnnnnnnnnnnnnnnnnnnnnnnnnnnnnnnnnnnnnnnnnnnnnnnnnnnnnnnnnnnnnnnnnnnnnnnnnnnnnnnnnnnnnnnnnnnnnnnnnnnnnnnnnnnnnnnnnnnnnnnnnnnnnnnnnnnnnnnnnnnnnnnnnnnnnnnnnnnnnnnnnnnnnnnnnnnnnnnnnnnnnnnnnnnnnnnnnnnnnnnnnnagatcttcctgtggcttggggaagctgcaagtgagtggaaggaggcagtggcctggggccaggagtacctgaagacccacccagcagggaggagcccggccacacccatcgtgctggtcaagcagggccatgagcctcccaccttcactggatggttcttcacttgggacccctacaagtggacnagccacctgtccgacacgaaagtggtggagggcagcccggcagcagcatcaaccatctctga

SEQ ID NO: 26908 - DNA, 683 bp, Macaca Mulatta
  misc_feature (1)...(683): n = A,T,C or G
atgcctgagaagaatagatttgaggtgcaagccggaggcggcagatcaggagtagggagaggaaggacaggggatgcctgacctgacaggtggcttcaggtctcgggaatcacaagacatcctgaacacattgcctccccgtcttcttcctnnnnnnnnnnnnnnnnnnnnnnnnnnnnnnnnnnnnnnnnnnnnnngctttcagtatgcaagtctagtacttgtttaaatttattcctaaatattttattcttgtttataagtggagttattttcttaatttcattttagattattcattgctattttatagaaatacaatggatttttaaatattgatgttgtattccacagtcttgctgaagttgtttaccggctctagtacttttgcagatttcttaaaattttctgtagacagatcatgccatcttcaaatagagatggttttacttcttcctttctgatccgaatgccttttatttatttttcccaattgccctgaccagtacaatgatgaatacacgtttcaagagcagacatcttgtcttgttcctgacactgagaggagagcatacgtctctaaccatttagtgtgattttaactgtgggtttttcatagacatcctttatcaggttgagaaagttctcttttatttataggttattgagtgttttatgatgaa

SEQ ID NO: 26909 - DNA, 141 bp, Macaca Mulatta
aggtatatcccgtgccttacctgactgggggctctgagtccagttgtgttgtcttcaacttagacaccatggaggcacctccagtcaccatgatgcctgtcactgggggcaccattaacatgatggagtacctattgcagg

SEQ ID NO: 26910 - DNA, 515 bp, Macaca Mulatta
  misc_feature (1)...(515): n = A,T,C or G
agacctctgtatggcttttcaattttagttgaaattctctctccatggccttttggagtcgcttgctgtatctccagagtaaatnnnnnnnnnnnnnnnnnnnnnnnnnnnnnnnnnnnnnnnnnnnnnnnnnnnnnnnnnnnnnnnnnnnnnnnnnnnnnnnnnnnnnnnnnnnnnnnnnnnnnnnnnnnnnnnnnnnnnnnnnngaaaaaacccagagccttggacttctgaaagatttcaggaatacctgactcagcagacccatcatgtgaacatgatttctggatcagttagtggggacaaagaagcagaggcttttcaggganagctggaacagatggtgatcaaaatggacttgatcacccatctgttgaagtttccctggatgaaaactcaggaatgttagtagacgggtttgaaaggacctttgatgggaagctcaagtgtcggtactgcaactatgccagcaaaggaacagcccggcttattgaacacatcagaatccacacagg

SEQ ID NO: 26911 - DNA, 1199 bp, Macaca Mulatta
  misc_feature (1)...(1199): n = A,T,C or G
cccaacatcatggtggtggaacacccctagttcctcaaggcagggaaggagcctggcctgcatatctggcgtgtatagaagtttgatctggtgcccgtgcccaccaacctttatggagacttcttcacgggcgatgcttacgtcatcctgaagacagtgcagctgattttttttaatctgcagtacgacctccactactggctgggnnnnnnnnnnnnnnnnnnnnnnnnnnnnnnnnnnnnnnnnnnnnnnnnnnnnnnnnnnnnnnnnnnnnnnnnnnnnnnnnnnnnnnnnnnnnnnnnnnnnnnnnnnnnnnnnnnnnnnnnnnnnnnnnnnnnnnnnnnnnnnnnnnnnnnnnnnnnnnnnnnnnnnnnnnnnnnnnnnnnnnnnnnnnnnnnnnnnnnnnnnnnnnnnnnnnnnnnnnnnnnnnnnnnnnnnnnnnnnnnnnnnnnnnnnnnnnnnnnnnnnnnnnnnnnnnnnnnnnnnnnnnnnnnnnnnnnnnnnnnnnnnnnnnnnnnnnnnnnnnnnnnnnnnnnnnnnnnnnnnnnnnnnnnnnnnnnnnnnnnnnnnnnnnnnnnnnnnnnnnnnnnnnnnnnnnnnnnnnnnnnnnnnnnnnnnnnnnnnnnnnnnnnnnnnnnnnnnnnnnnnnnnnnnnnnnnnnnnnnnnnnnnnnnnnnnnnnnnnnnnnnnnnnnnnnnnnnnnnnnnnnnnnnnnnnnnnnnnnnnnnnnnnnnnnnnnnnnnnnnnnnnnnnnnnnnnnnnnnnnnnnnnnnnnnnnnnnnnnnnnnnnnnnnnnnnnnnnnnnnnnnnnnnnnnnnnnnnnnnnnnnnnnnnnnnnnnnnnnnnnnnnnnnnnnnnnnnnnnnnnnnnnnnnnnnnnnnnnnnnnnnnnnnnnnnnnnnnnnnnnnnnnnnnnnnnnnnnnnnnnnnnnnnnnnnnnnnnnnnnnnnnnnnnnnnnnnnnnnnnnnnnnnnnnnnnnnnnnnnnnnnnnnncttcccgagggcggtgagaccccactgttcaagcagttcttcaagaactggcgggacccagaccagacagatggcctgggcttgtcctacctttccagccatatcgccaacgtggagcgggtgcccttcgacgccgccaccctgcacacctccactgccatggccgcccaacacggcatggatgatgatggcacaggccagaaaca

SEQ ID NO: 26912 - DNA, 132 bp, Macaca Mulatta
  misc_feature (1)...(132): n = A,T,C or G
gctctgtaagaagcatcattttggtattaacaaaccagagaagattataccatctcctgatgactcanagtttctactgaagacctttacgcatattaaatccaatgtgtctgctcctaataaaaagaaagt

SEQ ID NO: 26913 - DNA, 378 bp, Macaca Mulatta
ggcagccagccacactgccaacccaaaggtgcccgagggggactccatcgcggacgtgagcatcatgtacagtgaggagctgggcacacagatcctgatccaccaggagtcactcaccgactactgctccatgtcctcctactcctcatccccaccccgccaggctgccaggtccccctccagcctccccagctccccggcaagttcttccagcgtgcctttctcccccgactgcgaggactcagacaggctacacgagcccggtgctgcctctgacaggtctgagcatgacctgacccccatggacggggagaccttcagccagcacctgcaggccgtgaagatcctcgccgtcagagacctcatttgggtccccag

SEQ ID NO: 26914 - DNA, 589 bp, Macaca Mulatta
cggccatgaagacccaaagggatgggcactccctggggcggtggtcactggtgctgctgctgctgggcctggtgatgcctctggccatcgttgcccaggtcctcagctacaaggaagctgtgcttcgtgctatagatggcatcaaccagcggtcctcggatgctaacctctaccgcctcctggacctggacccgaggcccacgatggatggggacccagacacgccaaagcctgtgagcttcacagtgaaggagacagtgtgccccaggacgacacagaagtcaccggaggattgtgacttcaaggaggacgggctggtgaagcggtgtgtggggacagtgatcctaaaccaggccaggggctcctttgacatcagttgtgataaggataataggagatttgccctgctgggtgatttcttccggaaatttaaagagaagattggcggagggtttaaaagagttgtccagagaatcaaggattttttggggaatcttgtacccaggacagcgtcctagtgtgtgccctactctagctcaggcttctgggctctgagaaataaactatgaaagcaatttcctcaggctgc

SEQ ID NO: 26915 - DNA, 267 bp, Macaca Mulatta
gatacatatggaaaactctttctcctcaattctgtgggtcaagagatgtcccgttgcaagacgtccattcggcgtggtcagcccaatcctgtctataaggagacctttgtcttccaggtggccctctttcagctgtctgatgtcacgttgatgatttccgtttataacaggcgtactatgaagcgtaaagagatgattggctggattgccctgggccagaacagcagtggagaggaggaacaagatcattgggaggagatgcaggaa

SEQ ID NO: 26916 - DNA, 2034 bp, Macaca Mulatta
  misc_feature (1)...(2034): n = A,T,C or G
gaggctcaggccagggccagtcagccaaagcaaatttctgtattggaggcggcaactgcctcaatcctgaaacagaaatccacgtacgagaaggtgcagatgacagagaagaaagagagtgaggtcctccttgcccgtccattctggtccagcaaagctgagtacattctggctcaggtgggcttctctatgaagccatcttgtctctggcgctttgcccacctgtggcttaacagtggaggctnnnnnnnnnnnnnnnnnnnnnnnnnnnnnnnnnnnnnnnnnnnnnnnnnnnnnnnnnnnnnnnnnnnnnnnnnnnnnnnnnnnnnnnnnnnnnnnnnnnnnnnnnnnnnnnnnnnnnnnnnnnnnnnnnnnnnnnnnnnnnnnnnnnnnnnnnnnnnnnnnnnnnnnnnnnnnnnnnnnnnnnnnnnnnnnnnnnnnnnnnnnnnnnnnnnnnnnnnnnnnnnnnnnnnnnnnnnnnnnnnnnnnnnnnnnnnnnnnnnnnnnnnnnnnnnnnnnnnnnnnnnnnnnnnnnnnnnnnnnnnnnnnnnnnnnnnnnnnnnnnnnnnnnnnnnnnnnnnnnnnnnnnnnnnnnnnnnnnnnnnnnnnnnnnnnnnnnnnnnnnnnnnnnnnnnnnnnnnnnnnnnnnnnnnnnnnnnnnnnnnnnnnnnnnnnnnnnnnnnnnnnnnnnnnnnnnnnnnnnnnnnnnnnnnnnnnnnnnnnnnnnnnnnnnnnnnnnnnnnnnnnnnnnnnnnnnnnnnnnnnnnnnnnnnnnnnnnnnnnnnnnnnnnnnnnnnnnnnnnnnnnnnnnnnnnnnnnnnnnnnnnnnnnnnnnnnnnnnnnnnnnnnnnnnnnnnnnnnnnnnnnnnnnnnnnnnnnnnnnnnnnnnnnnnnnnnnnnnnnnnnnnnnnnnnnnnnnnnnnnnnnnnnnnnnnnnnnnnnnnnnnnnnnnnnnnnnnnnnnnnnnnnnnnnnnnnnnnnnnnnnnnnnnnnnnnnnnnnnnnnnnnnnnnnnnnnnnnnnnnnnnnnnnnnnnnnnnnnnnnnnnnnnnnnnnnnnnnnnnnnnnnnnnnnnnnnnnnnnnnnnnnnnnnnnnnnnnnnnnnnnnnnnnnnnnnnnnnnnnnnnnnnnnnnnnnnnnnnnnnnnnnnnnnnnnnnnnnnnnnnnnnnnnnnnnnnnnnnnnnnnnnnnnnnnnnnnnnnnnnnnnnnnnnnnnnnnnnnnnnnnnnnnnnnnnnnnnnnnnnnnnnnnnnnnnnnnnnnnnnnnnnnnnnnnnnnnnnnnnnnnnnnnnnnnnnnnnnnnnnnnnnnnnnnnnnnnnnnnnnnnnnnnnnnnnnnnnnnnnnnnnnnnnnnnnnnnnnnnnnnnnnnnnnnnnnnnnnnnnnnnnnnnnnnnnnnnnnnnnnnnnnnnnnnnnnnnnnnnnnnnnnnnnnnnnnnnnnnnnnnnnnnnnnnnnnnnnnnnnnnnnnnnnnnnnnnnnnnnnnnnnnnnnnnnnnnnnnnnnnnnnnnnnnnnnnnnnnnnnnnnnnnnnnnnnnnnnnnnnnnnnnnnnnnnnnnnnnnnnnnnnnnnnnnnnnnnnnnnnnnnnnnnnnnnnnnnnnnnnnnnnnnnnnnnnnnnnnnnnnnnnnnnnnnnnnnnnnnnnnnnnnnnnnnnnnnnnnnnnnnnnnnnnnnnnnnnnnnnnnnnnnnnnnnnnnnnnnnnnnnnnnnnnnnnnnnnnnnnnnnnnnnnnnnnnnnnnnnnnnnnnnnnnnnnnnnnnnnnnnnnnnnnnnnnnnnnnnnnnnnnnnnnnnnnnnnnnnnnnnnnnnnnnnnnnnnnnnnnnnnnnnnnnnnnnnnnnnnnnnnnnnnnnnnnnnnnnnnnnnnnnnnnnnnnnnnnnnnnnnnnnnnnnnnnnnnnnnnnnnnnnnnnnnnnnnnnnacagcctccacatccctatccataagtcgccagctaacacccagtaaagaggttcaaaaggaagaaattctacaaggtgatgaaacaaagtacccatcaacctctcatgtgactt

SEQ ID NO: 26917 - DNA, 1586 bp, Macaca Mulatta
  misc_feature (1)...(1586): n = A,T,C or G
tcccggccgcggctgctggaagcgtcaaagttcagcggggccgccgacactgacctgtgcttaaaactcatcctggcccgcaaagcctgccgcgagtccctggcgtcccctggggcgggctcttggagccactttcccgagcggaannnnnnnnnnnnnnnnnnnnnnnnnnnnnnnnnnnnnnnnnnnnnnnnnnnnnnnnnnnnnnnnnnnnnnnnnnnnnnnnnnnnnnnnnnnnnnnnnnnnnnnnnnnnnnnnnnnnnnnnnnnnnnnnnnnnnnnnnnnnnnnnnnnnnnnnnnnnnnnnnnnnnnnnnnnnnnnnnnnnnnnnnnnnnnnnnnnnnnnnnnnnnnnnnnnnnnnnnnnnnnnnnnnnnnnnnnnnnnnnnnnnnnnnnnnnnnnnnnnnnnnnnnnnnnnnnnnnnnnnnnnnnnnnnnnnnnnnnnnnnnnnnnnnnnnnnnnnnnnnnnnnnnnnnnnnnnnnnnnnnnnnnnnnnnnnnnnnnnnnnnnnnnnnnnnnnnnnnnnnnnnnnnnnnnnnnnnnnnnnnnnnnnnnnnnnnnnnnnnnnnnnnnnnnnnnnnnnnnnnnnnnnnnnnnnnnnnnnnnnnnnnnnnnnnnnnnnnnnnnnnnnnnnnnnnnnnnnnnnnnnnnnnnnnnnnnnnnnnnnnnnnnnnnnnnnnnnnnnnnnnnnnnnnnnnnnnnnnnnnnnnnnnnnnnnnnnnnnnnnnnnnnnnnnnnnnnnnnnnnnnnnnnnnnnnnnnnnnnnnnnnnnnnnnnnnnnaggatcaggtcatccagctgatgaacgcaatcttcagcaagaagaactttgagtccctctccgaagccttcagcgtggcctctgcggctgctgtactttcccataatcgctaccacgtgccggttgtggttgtgcccgagggctctgcttccgacactcaagaacaggctatnnnnnnnnnnnnnnnnnnnnnnnnnnnnnnnnnnnnnnnnnnnnnnnnnnnnnnnnnnnnnnnnnnnnnnnnnnnnnnnnnnnnnnnnnnnnnnnnnnnnnnnnnnnnnnnnnnnnnnnnnnnnnnnnnnnnnnnnnnnnnnnnnnnnnnnnnnnnnnnnnnnnnnnnnnnnnnnnnnnnnnnnnnnnnnnnnnnnnnnnnnnnnnnnnnnnnnnnnnnnnnnnnnnnnnnnnnnnnnnnnnnnnnnnnnnnnnnnnnnnnnnnnnnnnnnnnnnnnnnnnnnnnnnnnnnnnnnnnnnnnnnnnnnnnnnnnnnnnnnnnnnnnnnnnnnnnnnnnnnnnnnnnnnnnnnnnnnnnnnnnnnnnnnnnnnnnnnnnnnnnnnnnnnnnnnnnnnnnnnnnnnnnnnnnnnnnnnnnnnnnnnnnnnnnnnnnnnnagacattcgtccgactccataaccagaagactggccaggaagtggtgtttgttgccgagccagacaacaagaacgtgtacaagtttgaactggatacctctgaaagaaagatcgaatttgactctgcctctggcacctacactctctacttaatcattggagatgctactttgaagaacccaatcctctggaatgtgg

SEQ ID NO: 26918 - DNA, 771 bp, Macaca Mulatta
  misc_feature (1)...(771): n = A,T,C or G
gtgggctaaatgccaggtaatacttacaccaccacggaacaaagagactaaattttatatcagatgtgcttacattaatgggagagaactcataaatgggaagaattgtagatttagtgaagagagggggtaaaattgatagccttctagcttgttttttttctttaattcctttttttgctatttagttcaacattgaagtgtgagtttaatttttaaaagagatgagtatatacttttatttaaattgtagtgttttcattgttgactcctatggcaatataaacattaaagatgttttgtgtagttattttaaaaattgtaaacaaatacattttgcaggatttggatcaaagatacaacactattctgcagatgtatggagaaaaagcagaagaggcggaagaacttcgattagatctcgaagatgtaaaaaatatgtataaaactcaaatagatgaacttttaagacaaaggctcagttaacttgtgaaaattgaattcccgtcaaactgaatgtaaacatttaatatctaaacatttaatgtggacttccaataaattcttttatagaattagaaaatgggatttactgtagagcataaaaattttttttaaattgttttacactatatagtaatatttacaattaaattattttgtgcaatatttgaactttatttttgaaactattctttanagatttattttttaaagcattcatttttttttcccttgaatagcacagagatttattactttatcctcata

SEQ ID NO: 26919 - DNA, 1497 bp, Macaca Mulatta
  misc_feature (1)...(1497): n = A,T,C or G
tgcaggtgagagtgattttccagtgattgctttggcctgtacaaccagagaacaggattcttcccttctttttggccaccaaatgcctatgtgcaccacacattccagtgtgctgagaagggcagagcatcttggatgatgatggacgtcccaccgggcaggatgaaggcagagcgtgtggcatctccacctcaagggtnnnnnnnnnnnnnnnnnnnnnnnnnnnnnnnnnnnnnnnnnnnnnnnnnnnnnnnnnnnnnnnnnnnnnnnnnnnnnnnnnnnnnnnnnnnnnnnnnnnnnnnnnnnnnnnnnnnnnnnnnnnnnnnnnnnnnnnnnnnnnnnnnnnnnnnnnnnnnnnnnnnnnnnnnnnnnnnnnnnnnnnnnnnnnnnnnnnnnnnnnnnnnnnnnnnnnnnnnnnnnnnnnnnnnnnnnnnnnnnnnnnnnnnnnnnnnnnnnnnnnnnnnnnnnnnnnnnnnnnnnnnnnnnnnnnnnnnnnnnnnnnnnnnnnnnnnnnnnnnnnnnnnnnnnnnnnnnnnnnnnnnnnnnnnnnnnnnnnnnnnnnnnnnnnnnnnnnnnnnnnnnnnnnnnnnnnnnnnnnnnnnnnnnnnnnnnnnnnnnnnnnnnnnnnnnnnnnnnnnnnnnnnnnnnnnnnnnnnnnnnnnnnnnnnnnnnnnnnnnnnnnnnnnnnnnnnnnnnnnnnnnnnnnnnnnnnnnnnnnnnnnnnnnnnnnnnnnnnnnnnnnnnnnnnnnnnnnnnnnnnnnnnnnnnnnnnnnnnnnnnnnnnnnnnnnnnnnnnnnnnnnnnnnnnnnnnnnnnnntatctcctccttgagcgtggtgctggcctccatcgtggctatgagcgttcacagcatgtcggagttccagaatgaggatggagaagtggatgatccagtgctggaaggagtggagatcgcgtgcattgcctggttcaccggggagcttgccgtccggctggctgccgctccttgtcaaaagaaattctggaaaaaccctctgaacatcattgactttgtctccattattcccttctatgccacgttggctgtagacaccaaggaggaagagagtgaggatattgagaacatgggcaaggtggtccagatcctacggcttatgaggattttccgaattctaaaacttgcccggcactcagtaggacttcggtctctaggtgccacactgaggcacagctaccatgaagttggacttctgcttctcttcctctctgtgggcatttccattttttctgtgcttatctactctgtggagaaagatgaccacacatccagcctcaccagcatccccatctgctggtggngggccaccatcagcatgacaaccgtgggctatggagacacccacccagtcaccttggcggggaagctcatcgccagcacgtgcatcatctgtgggattttggtggtggcccttcccatcaccatccattttcatcaaggtttccatgttctaccc

SEQ ID NO: 26920 - DNA, 299 bp, Macaca Mulatta
  misc_feature (1)...(299): n = A,T,C or G
gggaccgccgagatcctggagctggcgggcaacgcagctcgggacaacaagaagacgcgcatcatccctcgtcacctccagctggccatccgcaacgacgaggaactgaacaagctgctgggcaaagtcaccatcgcccagggcggcgttttgcctaacatccaggccgttctgttaccaaagaaaactgaaagccacaaagccaaaagcaaataaatgcagacaaacaaaccaaagaccaaaggctctttttagagccacccnnnnnnnnnnnnnnnnnnnnnnnnnnnnnnnnnnnn

SEQ ID NO: 26921 - DNA, 602 bp, Macaca Mulatta
  misc_feature (1)...(602): n = A,T,C or G
tcactggaaaatgacaagatgagacttgagaaagatttatcattcaaagaaactcaaataaaagagtatgaagaactcttggcatcagtgagagcaaataatcaccagcagnnnnnnnnnnnnnnnnnnnnnnnnnnnnnnnnnnnnnnnnnnnnnnnnnnnnnnnnnnnnnnnnnnnnnnnnnnnnnnnnnnnnnnnnnnnnnnnnnnnnnnnnnnnnnnnnnnnnnnnnnnnnnnnnnnnnnnnnnnnnnnnnnnnnnnnnnnnnnnnnnnnnnnnnnnnnnnnnnnnnnnnnnnnnnnnnnnnnnnnnnnnnnnnnnnnnnnnnnnnnnnnnnnnnnnnnnnnnnnnnnnnnnnnnnnnnnnnnnnnnnnnnnnnnnnnnnnnnnnnnnnnnnnnnnnnnnnnnnnnnnnnnnnnnnnnnnnnnnnnnnnnnnnnnnnnnnnnnnnnnnnnnnnnnnnnnnnnnnnnnnnnnnnnnnnnnnnnnnnnnnnnnnnnnnnnnnnnnnnnnnnnaggaactctcaaagttgcggcaagaaatatattcctctcataaccaaccctccactggtggaaggactactattaccactaaaaagta

SEQ ID NO: 26922 - DNA, 717 bp, Macaca Mulatta
tgtcaagcttcgtcccaccatcaccaatgaccgctcagcacccctcatccgctgaggcggggtccgaggtcataccccccagcacacctgcccaggggctgttcagagctggcagtggcagtgacagcagcaacagcagcggataccagaagcagggcgctgagaccaggggtggctgcccttccccagaccaccccggcagcctgagcagctccaaagcactggcttggggtccaagaccttcgaagtaaagcaggcggaatggggggacaggacgatttctccccctccaggggccccaggactctccctggggggcctacctcttgccccccaacctcttttccccttttctgcccccgtggggaggagccccttgtacctgctccgtgtcccacacatgccctctctgtacgtcttttgtaaatgatgagaaataaaggaagtggacgcaaagtgacgtggcagcaggattggtggtgtcttatttgggggacagggcagggggtgagggatggagactcccccattggagaatggggtccagagggtactgaggtcctggccattccccgggaggctatctcactcccagcccctcgtttggagaatccttcagggctaccccaaagccctggcactgcagcccccatctccacccactctcattttgatgtgtgggtttcataggaagtagtggctgctcaggtcagggga

SEQ ID NO: 26923 - DNA, 310 bp, Macaca Mulatta
aggagaactgtcagaatgaggagatcctgaacagtctcaagtatgtccgtcctgggggtggataccagcctactttcacccttgtccaaaaatgtgaggtgaatgggcagaatgagcatcctgtcttcgcctacctgaaggacaagctcccctaccctcatgatgacccattttccctcatgaccgatcccaagctcatcatttggagccccgtgcgccgttcagatgtggcctggaactttgagaagttcctcatagggccggagggagagcccttccgacgctacagccgcaccttcccacccttcaa

SEQ ID NO: 26924 - DNA, 84 bp, Macaca Mulatta
ggccagatccacctcatcaccctggctaacaacgagctcaagtccctcaccagcaagttcatgaccacgttcagtcagctccga

SEQ ID NO: 26925 - DNA, 98 bp, Macaca Mulatta
aggacgtggatgctgcttacatgaacaaggttgagctccaggccaaggtggactccttgacagatgagattaaattcttcaagtgcctttatgaaggg

SEQ ID NO: 26926 - DNA, 102 bp, Macaca Mulatta
aattgtgaatataagggcttctttggaagcctttgttttgtccagttcacctcaggagaggacatggtttagggaagttagctcatttctaggaccaaattt

SEQ ID NO: 26927 - DNA, 559 bp, Macaca Mulatta
cactacgagaactaccgcgcgcactgcatccagcagatgaccagcaaactgacccaggacagccgcatggagagccccatcccgatcctgccgctgcccaccccggacgccgagactgagaagcttatcaggatgaaggatgaggaactgaggcgcatgcaggagatgctgcagaggatgaagcagcagatgcaggaccagtgacgctcgtcgcggacacaccgtccgtctccgggacgccctcccacccctggaccccagaccggactgttcccgacccggagacgcggggccacagcccccagctgaccctaatttattctcagcaccaccccctcccaggtcattcgtatctgcttccgaggggcctggactgtagcccccgcccagctggccctctctggccttgggggatcaggagcgaagttgggcggtacttcaaagatccgcctctcttgcccttcccccgcccccagacggtcacaccacccaaactgcaggccctgctctagcaggcaggcaaacctaggcgaaagaggattcccaggatcctgggtct

SEQ ID NO: 26928 - DNA, 1900 bp, Macaca Mulatta
  misc_feature (1)...(1900): n = A,T,C or G
tgggcatccgaggcatgctgcgagccgcagtgatcctgctgctcatcaggacctggctcgcggagggcaactaccccagtcccatcccgaaattccacttcgagttctcctccgctgtgcccgaagtcgtcctgaacctcttcaactggcaaaaattgtgcaaatgaagctgtggttcaaaagattttggacagggtgctgtcgagatacgatgtccgcctgagaccgaattttggaggnnnnnnnnnnnnnnnnnnnnnnnnnnnnnnnnnnnnnnnnnnnnnnnnnnnnnnnnnnnnnnnnnggactacacgatcacgatgttttttcatcagactggaaagatnnnnnnnnnnnnnnnnnnnnnnnnnnnnnnnnnnnnnnnnnnnnnnnnnnnnnnnnnnnnnnnnnnnnnnnnnnnnnnnnnnnnnnnnnnnnnnnnnnnnnnnnnnnnnnnnnnnnnnnnnnnnnnnnnnnnnnnnnnnnnnnnnnnnnnnnnnnnnnnnnnnnnnnnnnnnnnnnnnnnnnnnnnnnnnnnnnnnnnnnnnnnnnnnnnnnnnnnnnnnnnnnnnnnnnnnnnnnnnnnnnnnnnnnnnnnnnnnnnnnnnnnnnnnnnnnnnnnnnncatcatattattctgggatgacaatgggaacgccatccttatgactgaggagctgcatatccctcagttcactttcctggggaggacgattactagcaaggaggtgtatttctacacaggtncaggttcctacatacgcctgatactgaagttccaggttcagagggaannnnnnnnnnnnnnnnnnnnnnnnnnnnnnnnnnnnnnnnnnnnnnnnnnnnnnnnnnnnnnnnnnnnnnnnnnnnnnnnnnnnnnnnnnnnnnnnnnnnnnnnnnnnnnnnnnnnnnnnnnnnnnnnnnnnnnnnnnnnnnnnnnnnnnnnnnnnnnnnnnnnnnnnnnnnnnnnnnnnnnnnnnnnnnnnnnnnnnnnnnnnnnnnnnnnnnnnnnnnnnnnnnnnnnnnnnnnnnnnnnnnnnnnnnnnnnnnnnnnnnnnnnnnnnnnnnnnnnnnnnnnnnnnnnnnnnnnnnnnnnnnnnnnnnnnnnnnnnnnnnnnnnnnnnnnnnnnnnnnnnnnnnnnnnnnnnnnnnnnnnnnaggatggcctgattaacgtggaagacggagtcagctctctccccatcaccccagcgcaggcccccctggcaagcccggaaagcctcggttctttgacgtccacctccgagcaggcccagctggccacctcggaaagcctcagcccactcacttctctctcaggccaggcccccctggccactggagaaagcctgagtgatctcccctccacctcagagcaggcccggcacagctatggtgttcgctttaatggtttccaggctgatgacagtattattcctaccgaaatccgcaaccgtgccgaagcccatggccgtggtgttacccatgaccatgaagattccgatgagagcttgagctcagatgagcaccatggtcatggccccagtgggaagcccatgcttcacgatggcaagaagggtgtgcaagaagcaggctgggaccttgatgacaacagtgtcaagagtggctgccttgccgttgaggagcaactcaagtgtgatactaacagtacctggggccttaatgaggatgagctcatggcccatggccatgagaaggacaatagctcagagtctgaggatagttgccccccaagccctgggtgctccttcactgaagggttctcctttgatctctttaaccctgactacgtccctaaggttgacaagtggtcccggttcctcttccctctggcctttgggttattcaacattgtttactgggtataccatatgtatta

SEQ ID NO: 26929 - DNA, 792 bp, Macaca Mulatta
  misc_feature (1)...(792): n = A,T,C or G
aaaaattgggtaagggttttctttcccaataaaataaggaatattttttcccaaaaatttcccaaaaattagggtttgggtttaactttggttgccaacttttccccattatttgagtagttttcaatagaactttcatttccttaaggggcattttccttatgtaacaatggaannnnnnnnnnnnnnnnnnnnnttgccttcattttcttgcattcatggggttttccctcatctccagtgggaatatgttttaatagctttggagacttgacttctggaaggctttttgatattcacacgattcttctttgctgtgaatgttctactctgtaaggcttcactatggtttgaaaagttgttgagatgcactgcattcataggttcactctgaattaagatcagctttccatacaccatctcatttagagttctcaccctcaaggagtgcagacacataacacaatgtgactgtctaaaaatgttatcataattgcattttctgaagtccaagatgatctgtcaaagactactattaactgtatttctaggatttttttactgtatgagttctctgatgattgatgagctgtgacttctgtgaaaaagctttcccacattcaatgcattgataaggcttctctcctgtatgaattctctgatgattaaccagctgtgatttctgagagaaggccttcctacattcactgcatccgtagggtttctcacctgtatgtgtcctttgatgtggtataaggtgggacttccgagagaaagctttgccacactccc

SEQ ID NO: 26930 - DNA, 627 bp, Macaca Mulatta
tctctcagggtcgctatctcttcataatcaccagcggcttttctcacgcagtctggggtccaggcatgtttcccccttttgggtccagatctcttgttaatcttctcagaggtatttgcgtttcccggggggcacagctgtttcccatcgttttgtgggtcagatgtttctggcactccctttgaatcatttccttcctctgctggcttcttgggtatgatcttcgggatgattctctggagcttgccaaaagtcatctgaggacgttcaacctgattcctgtggttacggtcattatcagaatcattcccctggaagtctgtggcctgtttattatgcatgaaaggtgggagagtgacattgaaacctagtttagtcatggcctcatagtttctcttcatgtacacatagctgattttctccgagtatttcatcttttcccactctttcttagagaagtacttggcaatatcatcgaaggccttgcttctcttctttgatgttttagcattatccctgggtctctttgcaaaggcgttgtctccattcatggcaccaggagcagtctgacctcagagacaaagcagtggtggcgacgtcggcagcagttggcgacaaagtgtcccc

SEQ ID NO: 26931 - DNA, 3278 bp, Macaca Mulatta
  misc_feature (1)...(3278): n = A,T,C or G
gctttgaagaacatcctgaagattatataggagacaatatatcaagaatctatttattgaatggtctagaacaaaagccaggtgctccctaatggaagcacattagtgtttattttgatgaagaaatatatagattttttaacacaaccataaagtagatagctcagtaaaaaatcaattttggaagatgtcactgaacaactcttccaacatatttctggattcagtgcccagtaataccaatcgctttcaagttaatgtcataaaagagaaccatgagagcagtgcagcagcaaatgacaacactgacccaccacattatgaagaaacctctttaaggatgaggctcagaaaagactcagaatcagctttaggnnnnnnnnnnnnnnnnnnnnnnnnnnnnnnnnnnnnnnnnnnnnnnnnnnnnnnnnnnnnnnnnnnnnnnnnnnnnnnnnnnnnnnnnnnnnnnnnnnnnnnnnnnnnnnnnnnnnnnnnnnnnnnnnnnnnnnnnnnnnnnnnnnnnnnnnnnnnnnnnnnnnnnnnnnnnnnnnnnnnnnnnnnnnnnnnnnnnnnnnnnnnnnnnnnnnnnnnnnnnnnnnnnnnnnnnnnnnnnnnnnnnnnnnnnnnnnnnnnnnnnnnnnnnnnnnnnnnnnnnnnnnnnnnnnnnnnnnnnnnnnnnnnnnnnnnnnnnnnnnnnnnnnnnnnnnnnnnnnnnnnnnnnnnnnnnnnnnnnnnnnnnnnnnnnnnnnnnnnnnnnnnnnnnnnnnnnnnnnnnnnnnnnnnnnnnnnnnnnnnnnnnnnnnnnnnnnnnnnnnnnnnnnnnnnnnnnnnnnnnnnnnnnnnnnnnnnnnnnnnnnnnnnnnnnnnnnnnnnnnnnnnnnnnnnnnnnnnnnnnnnnnnnnnnnnnnnnnnnnnnnnnnnnnnnnnnnnnnnnnnnnnnnnnnnnnnnnnnnnnnnnnnnnnnnnnnnnnnnnnnnnnnnnnnnnnnnnnnnnnnnnnnnnnnnnnnnnnnnnnnnnnnnnnnnnnnnnnnnnnnnnnnnnnnnnnnnnnnnnnnnnnnnnnnnnnnnnnnnnnnnnnnnnnnnnnnnnnnnnnnnnnnnnnnnnnnnnnnnnnnnnnnnnnnnnnnnnnnnnnnnnnnnnnnnnnnnnnnnnnnnnnnnnnnnnnnnnnnnnnnnnnnnnnnnnnnnnnnnnnnnnnnnnnnnnnnnnnnnnnnnnnnnnnnnnnnnnnnnnnnnnnnnnnnnnnnnnnnnnnnnnnnnnnnnnnnnnnnnnnnnnnnnnnnnnnnnnnnnnnnnnnnnnnnnnnnnnnnnnnnnnnnnnnnnnnnnnnnnnnnnnnnnnnnnnnnnnnnnnnnnnnnnnnnnnnnnnnnnnnnnnnnnnnnnnnnnnnnnnnnnnnnnnnnnnnnnnnnnnnnnnnnnnnnnnnnnnnnnnnnnnnnnnnnnnnnnnnnnnnnnnnnnnnnnnnnnnnnnnnnnnnnnnnggggcctgtgtggtccgagatgccaccgggaacatgaatgacaccatcatttctgggatgaactgcaatggttcagcagcatgtgggttgggctatgacttctcaagatgtcgacatgaaccatgtcagtacggactgatgaacaatttccaggtnnnnnnnnnnnnnnnnnnnnnnnnnnnnnnnnnnnnnnnnnnnnnnnnnnnnnnnnnnnnnnnnnnnnnnnnnnnnnnnnnnnnnnnnnnnnnnnnnnnnnnnnnnnnnnnnnnnnnnnnnnnnnnnnnnnnnnnnnnnnnnnnnnnnnnnnnnnnnnnnnnnnnnnnnnnnnnnnnnnnnnnnnnnnnnnnnnnnnnnnnnnnnnnnnnnnnnnnnnnnnnnnnnnnnnnnnnnnnnnnnnnnnnnnnnnnnnnnnnnnnnnnnnnnnnnnnnnnnnnnnnnnnnnnnnnnnnnnnnnnnnnnnnnnnnnnnnnnnnnnnnnnnnnnnnnnnnnnnnnnnnnnnnnnnnnnnnnnnnnnnnnnnnnnnnnnnnnnnnnnnnnnnnnnnnnnnnnnnnnnnnnnnnnnnnnnnnnnnnnnnnnnnnnnnnnnnnnnnnnnnnnnnnnnnnnnnnnnnnnnnnnnnnnnnnnnnnnnnnnnnnnnnagatgtgaactggggctcctccacacaggctctttcctatgtgagtgctttagacaatgctctggaattaaccacagtggaagaccatgtaaaaaacttcaggnnnnnnnnnnnnnnnnnnnnnnnnnnnnnnnnnnnnnnnnnnnnnnnnnnnnnnnnnnnnnnnnnnnnnnnnnnnnnnnnnnnnnnnnnnnnnnnnnnnnnnnnnnnnnnnnnnnnnnnnnnnnnnnnnnnnnnnnnnnnnnnnnnnnnnnnnnnnnnnnnnnnnnnnnnnnnnnnnnnnnnnnnnnnnnnnnnnnnnnnnnnnnnnnnnnnnnnnnnnnnnnnnnnnnnnnnnnnnnnnnnnnnnnnnnnnnnnnnnnnnnnnnnnnnnnnnnnnnnnnnnnnnnnnnnnnnnnnnnnnnnnnnnnnnnnnnnnnnnnnnnnnnnnnnnnnnnnnnnnnnnnnnnnnnnnnnnnnnnnnnnnnnnnnnnnnnnnnnnnnnnnnnnnnnnnnnnnnnnnnnnnnnnnnnnnnnnnnnnnnnnnnnnnnnnnnnnnnnnnnnnnnnnnnnnnnnnnnnnnnnnnnnnnnnnnnnnnnnnnnnnnnnnnnnnnnnnnnnnnnnnnnnnnnnnnnnnnnnnnnnnnnnnnnnnnnnnnnnnnnnnnnnnnnnnnnnnnnnnnnnnnnnnnnnnnnnnnnnnnnnnnnnnnnnnnnnnnnnnnnnnnnnnnnnnnnnnnnnnnnnnnnnnnnnnnnnnnnnnnnnnnnnnnnnnnnnnnnnnnnnnnnnnnnnnnnnnnnnnnnnnnnnnnnnnnnnnnnnnnnnnnnnnnnnnnnnnnnnnnnnnnnnnnnnnnnnnnnnnnnnnnnnnnnnnnnnnnnnnnnnnnnnnnnnnnnnnnnnnnnnnnnnnnnnnnnnnnnnnnnnnnnnnnnnnnnnnnnnnnnnnnnnnnnnnnnnnnnnnnnnnnnnnnnnnnnnnnnnnnnnnnnnnnnnnnnnnnnnnnnnnnnnnnnnnnnnnnnnnnnnnnnnnnnnnnnnnnagctggaaagtctttgaagagatgattgaaccatatcgtctccatgaaagctgcaaagatttaacaactgctgagaaattaaaaagagaaactccatggaaaattacagatgcagaactggaagcagtcaaggaaaa

SEQ ID NO: 26932 - DNA, 155 bp, Macaca Mulatta
catcttccataatttttctcccttcacctccaggaaaaccctgtcatgtctttaaggtagtttctacctcattcactctctcatgaaatccacttctctccccacggtcagaaggctcgtagcctgatcggtcttttatttcactgctcctgttg

SEQ ID NO: 26933 - DNA, 1077 bp, Macaca Mulatta
  misc_feature (1)...(1077): n = A,T,C or G
gacagccgtgactcccacctgatgccctcccctgcccctgtggcccagcccttgcctggccatgtggtgccatgtccatcaccctttggacgggctcagcgtgtaccctccccaggccctccaactnnacctcatattcagtgttgcggcgtctcaccattcaacctaaaacccgattcacgcccatgccatcaacccccatagttcatcaggnnnnnnnnnnnnnnnnnnnnnnnnnnnnnnnnnnnnnnnnnnnnnnnnnnnnnnnnnnnnnnnnnnnnnnnnnnnnnnnnnnnnnnnnnnnnnnnnnnnnnnnnnnnnnnnnnnnnnnnnnnnnnnnnnnnnnnnnnnnnnnnnnnnnnnnnnnnnnnnnnnnnnnnnnnnnnnnnnnnnnnnnnnnnnnnnnncgcatcggtatcctgcagcagctgttgagacaggagatagaggggctggtagggggccagtgtgccccccttaacggaggctcttctctggatatggttgaacttcagcccctgctgactgagatttctagaaatctgaatgccacagagcataactctgggacttcccaccttcctggattgttaaaatgctcagggctgccaaagccctgccttccagaggagtgtggggaaccacagccctgccctccagcggagcctgggccgccagaggccgtctgtaggagtgagcatgagacaccagagccctccccccaggaacagcttgaggtaccagagccctgccctccagcagaacccaggcccccagagtcctgctgtaggagtgagcctgagataccggagccctcccgcaaggaacagcttgaggtaccagagccctgccctccagcagaacccaggtccccagagtcctgcggtaggagtgagcctgagataccagagccctctcagcaggaacagcttgaggtaccagaaccctgccctccagcagaacccagtccccttcagcccagcacccaggggcagtctggacccccagagccctaacgtagggtagagctgggggcatcagagccctgcaccctaaaagatagaagtccagagtcca

SEQ ID NO: 26934 - DNA, 139 bp, Macaca Mulatta
aggtgagtggtcagcaggccaaggaggaggtgtcacagctggtgcgggggctgggggctgtgctggaggagaagcgggcatcactgcttcaggccattgaagaatgccagcaggagcggctggcccgtctcagcgccca

SEQ ID NO: 26935 - DNA, 904 bp, Macaca Mulatta
  misc_feature (1)...(904): n = A,T,C or G
gggcggnnnnnnnnnnnnnnnnnnnnnnncattataaatgtgattactgtaaaaagacttcagaaaatgtaggccttcagagtaaaaactatttattctgaagacatacaaacataaagaggattgttgtacctttacttgcattatagattttattgtacatgttttatattaaaggaaaaatctgaagcagttaaactggtgaagcagacaccagtttatactaaattctttttgcaggtctagtaaatggggaaaatatgtttaatcagaaattgtttacataaacatttgaggattcccagtaaaaagaataaaggcactgaaacttcagacattacactaaatcagagtgttgagtgtaaaagagatcccaatatattttttaaaaagtagattttttttggagatttaaaaatatctttgaagtcatgctttttctgtaaaacaaaattagatttttctgaaaaacaaataataatgtaacccaaagtctcagaattatttcgagtttaattctgccccattgttttcagaatttccaacaattggtttgcatccgagcatattgaaaaaaatgttttttttcaaacggaccattttaggtaaataaaaatgcaataaaattttaaaaaaatggcttggtaacaagacttatcaaactgacaaaattcagtctctattctaatattcctacctaacaagccgcgatatttaaacaaatttccatacgcaccctcacataaaagcgttagacatacaactgaatattaatgtgttttgggatcgccacctgtaaccaccttagaagataaaagttcttactaacaaccactatttaattaattggaccctcggcggttcactaaaatttgatgatcattaaaaacaatattcctactac

SEQ ID NO: 26936 - DNA, 118 bp, Macaca Mulatta
aggttgaagaagcctcagcggaggcgatatggactcctggccaacaccgaggaccccaccgagatggcctcgctggacagcgatgaggagacggtctttgagtcgaggaatctgagat

SEQ ID NO: 26937 - DNA, 417 bp, Macaca Mulatta
tccacccaagaggcaggtgctttaaacatctcttggttgtttgtggttgttgttgaattttaaaatattgtcagtagggcagtttcttgctggcagttcaattgctttcagaaacatttctctgagacatcattttctcaggacataaataagttcaattttaggcagttttacaaaacgattttataacatcggtaaaaagggaggaaaaatactttttattttcgaccccagaggagaatttcggattagaaaccagtttataactagttgtctcaacggtacatcgtagcgcctggtcgttttctgggttgagtgtgaaaataatggagtacgaagtattgctttgcatgtagttttagtggtttggttaaatcaaacaccgggagaaattggaaggccctttaaaactccaca

SEQ ID NO: 26938 - DNA, 2646 bp, Macaca Mulatta
  misc_feature (1)...(2646): n = A,T,C or G
ctgcgacgactggagttccatgccagcaannnnnnnnnnnnnnnnnnnnnnnnnnnnnnnnnnnnnnnnnnnnnnnnnnnnnnnnnnnnnnnnnnnnnnnnnnnnnnnnnnnnnnnnnnnnnnnnnnnnnnnnnnnnnnnnnnnnnnnnnnnnnnnnnnnnnnnnnnnnnnnnnnnnnnnnnnnnnnnnnnnnnnnnnnnnnnnnnnnnnnnnnnnnnnnnnnnnnnnnnnnnnnnnnnnnnnnnnnnnnnnnnnnnnnnnnnnnnnnnnnnnnnnnnnnnnnnnnnnnnnnnnnnnnnnnnnnnnnnnnnnnnnnnnnnnnnnnnnnnnnnnnnnnnnnnnnnnnnnnnnnnnnnnnnnnnnnnnnnnnnnnnnnnnnnnnnnnnnnnnnnnnnnnnnnnnnnnnnnnnnnnnnnnnnnnnnnnnnnnnnnnnnnnnnnnnnnnnnnnnnnnnnnnnnnnnnnnnnnnnnnnnnnnnnnnnnnnnnnnnnnnnnnnnnnnnnnnnnnnnnnnnnnnnnnnnnnnnnnnnnnnnnnnnnnnnnnnnnnnnnnnnnnnnnnnnnnnnnnnnnnnnnnnnnnnnnnnnnnnnnnnnnnnnnnnnnnnnnnnnnnnnnnnnnnnnnnnnnnnnnnnnnnnnnnnnnnnnnnnnnnnnnnnnnnnnnnnnnnnnnnnnnnnnnnnnnnnnnnnnnnnnnnnnnnnnnnnnnnnnnnnnnnnnnnnnnnnnnnnnnnnnnnnnnnnnnnnnnnnnnnnnnnnnnnnnnnnnnnnnnnnnnnnnnnnnnnnnnnnnnnnnnnnnnnnnnnnnnnnnnnnnnnnnnnnnnnnnnnnnnnnnnnnnnnnnnnnnnnnnnnnnnnnnnnnnnnnnnnnnnnnnnnnnnnnnnnnnnnnnnnnnnnnnnnnnnnnnnnnnnnnnnnnnnnnnnnnnnnnnnnnnnnnnnnnnnnnnnnnnnnnnnnnnnnnnnnnnnnnnnnnnnnnnnnnnnnnnnnnnnnnnnnnnnnnnnnnnnnnnnnnnnnnnnnnnnnnnnnnnnnnnnnnnnnnnnnnnnnnnnnnnnnnnnnnnnnnnnnnnnnnnnnnnnnnnnnnnnnnnnnnnnnnnnnnnnnnnnnnnnnnnnnnnnnnnnnnnnnnnnnnnnnnnnnnnnnnnnnnnnnnnnnnnnnnnnnnnnnnnnnnnnnnnnnnnnnnnnnnnnnnnnnnnnnnnnnnnnnnnnnnnnnnnnnnnnnnnnnnnnnnnnnnnnnnnnnnnnnnnnnnnnnnnnnnnnnnnnnnnnnnnnnnnnnnnnnnnnnnnnnnnnnnnnnnnnnnnnnnnnnnnnnnnnnnnnnnnnnnnnnnnnnnnnnnnnnnnnnnnnnnnnnnnnnnnnnnnnnnnnnnnnnnnnnnnnnnnnnnnnnnnnnnnnnnnnnnnnnnnnnnnnnnnnnnnnnnnnnnnnnnnnnnnnnnnnnnnnnnnnnnnnnnnnnnnnnnnnnnnnnnnnnnnnnnnnnnnnnnnnnnnnnnnnnnnnnnnnnnnnnnnnnnnnnnnnnnnnnnnnnnnnnnnnnnnnnnnnnnnnnnnnnnnnnnnnnnnnnnnnnnnnnnnnnnnnnnnnnnnnnnnnnnnnnnnnnnnnnnnnnnnnnnnnnnnnnnnnnnnnnnnnnnnnnnnnnnnnnnnnnnnnnnnnnnnnnnnnnnnnnnnnnnnnnnnnnnnnnnnnnnnnnnnnnnnnnnnnnnnnnnnnnnnnnnnnnnnnnnnnnnnnnnnnnnnnnnnnnnnnnnnnnnnnnnnnnnnnnnnnnnnnnnnnnnnnnnnnnnnnnnnnnnnnnnnnnnnnnnnnnnnnnnnnnnnnnnnnnnnnnnnnnnnnnnnnnnnnnnnnnnnnnnnnnnnnnnnnnnnnnnnnnnnnnnnnnnnnnnnnnnnnnnnnnnnnnnnnnnnnnnnnnnnnnnnnnnnnnnnnnnnnnnnnnnnnnnnnnnnnnnnnnnnnnnnnnnnnnnnnnnnnnnnnnnnnnnnnnnnnnnnnnnnnnnnnnnnnnnnnnnnnnnnnnnnnnnnnnnnnnnnnnnnnnnnnnnnnnnnnnnnnnnnnnnnnnnnnnnnnnnnnnnnnnnnnnnnnnnnnnnnnnnnnnnnnnnnnnnnnnnnnnnnnnnnnnnnnnnnnnnnnnnnnnnnnnnnnnnnnnnnnnnnnnnnnnnnnnnnnnnnnnnnnnnnnnnnnnnnnnnnnnnnnnnnnnnnnnnnnnnnnnnnnnnnnnnnnnnnnnnnnnnnnnnnnnnnnnnnnnnnnnnnnnnnnnnnnnnnnnnnnnnnnnnnnnnnnnnnnnnnnnnnnnnnnnnnnnnnnnnnnnnnnnnnnnnnnnnnnnnnnnnnnnnnnnnnnnnnnnnnnnnnnnnnnnnnnnnnnnnnnnnnnnnnnnnnnnnnnnnnnnnnnnnnnnnnnnnnnnnnnnnnnnnnnnnnnnnnnnnnnnnnnnnnnnnnnnnnnnnnnnnnnnnnnnnnnnnnnnnnnnnnnnnnnagtggtgcagttctcggcctctcggcctggcttcttgaccttctgggaccagtgcacagagagacttagctgcttcctctgcccagtggagcgggtgcttctcaccttctgcaaccagtatggtgcccgcctctccctgcgccagccaggcttggctgaggct

SEQ ID NO: 26939 - DNA, 203 bp, Macaca Mulatta
accttcccagcagctgccaagaatcaggtgcccagctccggccgcctcccaccttctccagagcccagcgctgcattccttgccaaagggcaggactcggggctccctgctgttcctataccagcccaacagcccggggttgaaggaggtgacagggccaattccgtgttgaaccctccccagatccctcctccagtaccccc

SEQ ID NO: 26940 - DNA, 8323 bp, Macaca Mulatta
  misc_feature (1)...(8323): n = A,T,C or G
aaatacaggtgatgcttttgatactttccacattctggaagtatcatcactcagaaagccctgcattttgagactttgcccgtgtacacattgataatacaaggaacgaacatggctggtttgtccactaatacaacagtttcagttcagctgcaggatgagaatgacaactcgccagtttttatgcaggcagaatatacaggactcattagtgagtcagcctcaattaacagcgtggtcctcacagacaggaatgtccctctggtgattcgagcagctgatgctgataaagactccaatgctttgcttgtttaccacattgttgaaccatctgtacacaaatattttgctattgattctagcactggtgctattcatacagtcctcagtctggactatgaagaaacaagcacttttcacttcaccgtacaagtgcatgacatgggaaccccacgtttatttgctgagtatgcagctaatgtaacaatacatgtaattgacattaatgactgccctcccgtgttcgccaagccattatatgaagcatgtcttttgttgccaacatacaaaggagtaaaagtcatcacagtaaatgctacagatgccgattcaagcgcattctcacagttgatttactccatcaccgaaggcaacatcggggagaagttttccatggactacaagactggtgctctaactgtccaaaacacaactcagttaagaagccgctacgagctaaccgttagagcttccgatggcaggtttgctggccttacctctgtcaaaattaatgtgaaagaaagcaaagaaagtcacctnnnnnnnnnnnnnnnnnnnnnnnnnnnnnnnnnnnnnnnnnnnnnnnnnnnnnnnnnnnnnnnnnnnnnnnnnnnnnnnnnnnnnnnnnnnnnnnnnnnnnnnnnnnnnnnnnnnnnnnnnnnnnnnnnnnnnnnnnnnnnnnnnnnnnnnnnnnnnnnnnnnnnnnnnnnnnnnnnnnnnnnnnnnnnnnnnnnnnnnnnnnnnnnnnnnnnnnnnnnnnnnnnnnnnnnnnnnnnnnnnnnnnnnnnnnnnnnnnnnnnnnnnnnnnnnnnnnnnnnnnnnnnnnnnnnnnnnnnnnnnnnnnnnnnnnnnnnnnnnnnnnnnnnnnnnnnnnnnnnnnnnnnnnnnnnnnnnnnnnnnnnnnnnnnnnnnnnnnnnnnnnnnnnnnnnnnnnnnnnnnnnnnnnnnnnnnnnnnnnnnnnnnnnnnnnnnnnnnnnnnnnnnnnnnnnnnnnnnnnnnnnnnnnnnnnnnnnnnnnnnnnnnnnnnnnnnnnnnnnnnnnnnnnnnnnnnnnnnnnnnnnnnnnnnnnnnnnnnnnnnnnnnnnnnnnnnnnnnnnnnnnnnnnnnnnnnnnnnnnnnnnnnnnnnnnnnnnnnnnnnnnnnnnnnngtgtttgaaaaacctttctacagtgcagagattgcagagaatgtccaggtgcacagcnccgtggtccacgtacaggccaacagcccggaaggcttgaaagtgttctacagcatcacagacggagaccctttcagccagttcactattaacttcaataccggagttatcaacgtcatagctcctctggactttgaggcccacccggcgtataaactgagcatacgcgcaactgactccttgacgggcgctcatgctgaagtatttgtggacatcatagtggaggacatcaatgataatgctcctgtgtttgctcagcagtcttacgcagcaaccctgtctgaggcatctgtaatcggaacatctgttgttcaagtcagagccacagattctgattcagaacccaatagaggaatctcataccagctgtttgggaatctcagcaagagtcatgatcattttcatgtggacagcagcaccggcctcatttcactgctcagaactctggattacgagcagtcccagcggcacacgatttttgtgagggctgtcgacggtggtatgccgccgctgagcagtgacgtgattgtcacggtggacgttaccgacctcaatgataacccaccactctttgaacaacagatttacgaagccagaattagcgagcatgcccctcatgggcattttgtgacctgtgtaaaagcctantgatgcagacagttcggacatcgacaagttgcagtattccattctgacgggcaatgatcataaacattttatcattgacagtgcaaaaggaattatcaccctctcaaaccnnnnnnnnnnnnnnnnnnnnnnnnnnnnnnnnnnnnnnnnnnnnnnnnnnnnnnnnnnnnnnnnnnnnnnnnnnnnnnnnnnnnnnnnnnnnnnnnnnnnnnnnnnnnnnnnnnnnnnnnnnnnnnnnnnnnnnnnnnnnnnnnnnnnnnnnnnnnnnnnnnnnnnnnnnnnnnnnnnnnnnnnnnnnnnnnnnnnnnnnnnnnnnnnnnnnnnnnnnnnnnnnnnnnnnnnnnnnnnnnnnnnnnnnnnnnnnnnnnnnnnnnnnnnnnnnnnnnnnnnnnnnnnnnnnnnnnnnnnnnnnnnnnnnnnnnnnnnnnnnnnnnnnnnnnnnnnnnnnnnnnnnnnnnnnnnnnnnnnnnnnnnnnnnnnnnnnnnnnnnnnnnnnnnnnnnnnnnnnnnnnnnnnnnnnnnnnnnnnnnnnnnnnnnnnnnnnnnnnnnnnnnnnnnnnnnnnnnnnnnnnnnnnnnnnnnnnnnnnnnnnnnnnnnnnnnnnnnnnnnnnnnnnnnnnnnnnnnnnnnnnnnnnnnnnnnnnnnnnnnnnnnnnnnnnnnnnnnnnnnnnnnnnnnnnnnnnnnnnnnnnnnnnnnnnnnnnnnnnnnnnnnnnnnnnnnnnnnnnnnnnnnnnnnnnnnnnnnnnnnnnnnnnnnnnnnnnnnnnnnnnnnnnnnnnnnnnnnnnnnnnnnnnnnnnnnnnnnnnnnnnnnnnnnnnnnnnnnnnnnnnnnnnnnnnnnnnnnnnnnnnnnnnnnnnnnnnnnnnnnnnnnnnnnnnnnnnnnnnnnnnnnnnnnnnnnnnnnnnnnnnnnnnnnnnnnnnnnnnnnnnnnnnnnnnnnnnnnnnnnnnnnnnnnnnnnnnnnnnnnnnnnnnnnnnnnnnnnnnnnnnnnnnnnnnnnnnnnnnnnnnnnnnnnnnnnnnnnnnnnnnnnnnnnnnnnnnnnnnnnnnnnnnnnnnnnnnnnnnnnnnnnnnnnnnnnnnnnnnnnnnnnnnnnnnnnnnnnnnnnnnnnnnnnnnnnnnnnnnnnnnnnnnnnnnnnnnnnnnnnnnnnnnnnnnnnnnnnnnnnnnnnnnnnnnnnnnnnnnnnnnnnnnnnnnnnnnnnnnnnnnnnnnnnnnnnnnnnnnnnnnnnnnnnnnnnnnnnnnnnnnnnnnnnnnnnnnnnnnnnnnnnnnnnnnnnnnnnnnnnnnnnnnnnnnnnnnnnnnnnnnnnnnnnnnnnnnnnnnnnnnnnnnnnnnnnnnnnnnnnnnnnnnnnnnnnnnnnnnnnnnnnnnnnnnnnnnnnnnnnnnnnnnnnnnnnnnnnnnnnnnnnnnnnnnnnnnnnnnnnnnnnnnnnnnnnnnnnnnnnnnnnnnnnnnnnnnnnnnnnnnnnnnnnnnnnnnnnnnnnnnnnnnnnnnnnnnnnnnnnnnnnnnnnnnnnnnnnnnnnnnnnnnnnnnnnnnnnnnnnnnnnnnnnnnnnnnnnnnnnnnnnnnnnnnnnnnnnnnnnnnnnnnnnnnnnnnnnnnnnnnnnnnnnnnnnnnnnnnnnnnnnnnnnnnnnnnnnnnnnnnnnnnnnnnnnnnnnnnnnnnnnnnnnnnnnnnnnnnnnnnnnnnnnnnnnnnnnnnnnnnnnnnnnnnnnnnnnnnnnnnnnnnnnnnnnnnnnnnnnnnnnnnnnnnnnnnnnnnnnnnnnnnnnnnnnnnnnnnnnnnnnnnnnnnnnnnnnnnnnnnnnnnnnnnnnnnnnnnnnnnnnnnnnnnnnnnnnnnnnnnnnnnnnnnnnnnnnnnnnnnnnnnnnnnnnnnnnnnnnnnnnnnnnnnnnnnnnnnnnnnnnnnnnnnnnnnnnnnnnnnnnnnnnnnnnnnnnnnnnnnnnnnnnnnnnnnnnnnnnnnnnnnnnnnnnnnnnnnnnnnnnnnnnnnnnnnnnnnnnnnnnnnnnnnnnnnnnnnnnnnnnnnnnnnnnnnnnnnnnnnnnnnnnnnnnnnnnnnnnnnnnnnnnnnnnnnnnnnnnnnnnnnnnnnnnnnnnnnnnnnnnnnnnnnnnnnnnnnnnnnnnnnnnnnnnnnnnnnnnnnnnnnnnnnnnnnnnnnnnnnnnnnnnnnnnnnnnnnnnnnnnnnnnnnnnnnnnnnnnnnnnnnnnnnnnnnnnnnnnnnnnnnnnnnnnnnnnnnnnnnnnnnnnnnnnnnnnnnnnnnnnnnnnnnnnnnnnnnnnnnnnnnnnnnnnnnnnnnnnnnnnnnnnnnnnnnnnnnnnnnnnnnnnnnnnnnnnnnnnnnnnnnnnnnnnnnnnnnnnnnnnnnnnnnnnnnnnnnnnnnnnnnnnnnnnnnnnnnnnnnnnnnnnnnnnnnnnnnnnnnnnnnnnnnnnnnnnnnnnnnnnnnnnnnnnnnnnnnnnnnnnnnnnnnnnnnnnnnnnnnnnnnnnnnnnnnnnnnnnnnnnnnnnnnnnnnnnnnnnnnnnnnnnnnnnnnnnnnnnnnnnnnnnnnnnnnnnnnnnnnnnnnnnnnnnnnnnnnnnnnnnnnnnnnnnnnnnnnnnnnnnnnnnnnnnnnnnnnnnnnnnnnnnnnnnnnnnnnnnnnnnnnnnnnnnnnnnnnnnnnnnnnnnnnnnnnnnnnnnnnnnnnnnnnnnnnnnnnnnnnnnnnnnnnnnnnnnnnnnnnnnnnnnnnnnnnnnnnnnnnnnnnnnnnnnnnnnnnnnnnnnnnnnnnnnnnnnnnnnnnnnnnnnnnnnnnnnnnnnnnnnnnnnnnnnnnnnnnnnnnnnnnnnnnnnnnnnnnnnnnnnnnnnnnnnnnnnnnnnnnnnnnnnnnnnnnnnnnnnnnnnnnnnnnnnnnnnnnnnnnnnnnnnnnnnnnnnnnnnnnnnnnnnnnnnnnnnnnnnnnnnnnnnnnnnnnnnnnnnnnnnnnnnnnnnnnnnnnnnnnnnnnnnnnnnnnnnnnnnnnnnnnnnnnnnnnnnnnnnnnnnnnnnnnnnnnnnnnnnnnnnnnnnnnnnnnnnnnnnnnnnnnnnnnnnnnnnnnnnnnnnnnnnnnnnnnnnnnnnnnnnnnnnnnnnnnnnnnnnnnnnnnnnnnnnnnnnnnnnnnnnnnnnnnnnnnnnnnnnnnnnnnnnnnnnnnnnnnnnnnnnnnnnnnnnnnnnnnnnnnnnnnnnnnnnnnnnnnnnnnnnnnnnnnnnnnnnnnnnnnnnnnnnnnnnnnnnnnnnnnnnnnnnnnnnnnnnnnnnnnnnnnnnnnnnnnnnnnnnnnnnnnnnnnnnnnnnnnnnnnnnnnnnnnnnnnnnnnnnnnnnnnnnnnnnnnnnnnnnnnnnnnnnnnnnnnnnnnnnnnnnnnnnnnnnnnnnnnnnnnnnnnnnnnnnnnnnnnnnnnnnnnnnnnnnnnnnnnnnnnnnnnnnnnnnnnnnnnnnnnnnnnnnnnnnnnnnnnnnnnnnnnnnnnnnnnnnnnnnnnnnnnnnnnnnnnnnnnnnnnnnnnnnnnnnnnnnnnnnnnnnnnnnnnnnnnnnnnnnnnnnnnnnnnnnnnnnnnnnnnnnnnnnnnnnnnnnnnnnnnnnnnnnnnnnnnnnnnnnnnnnnnnnnnnnnnnnnnnnnnnnnnnnnnnnnnnnnnnnnnnnnnnnnnnnnnnnnnnnnnnnnnnnnnnnnnnnnnnnnnnnnnnnnnnnnnnnnnnnnnnnnnnnnnnnnnnnnnnnnnnnnnnnnnnnnnnnnnnnnnnnnnnnnnnnnnnnnnnnnnnnnnnnnnnnnnnnnnnnnnnnnnnnnnnnnnnnnnnnnnnnnnnnnnnnnnnnnnnnnnnnnnnnnnnnnnnnnnnnnnnnnnnnnnnnnnnnnnnnnnnnnnnnnnnnnnnnnnnnnnnnnnnnnnnnnnnnnnnnnnnnnnnnnnnnnnnnnnnnnnnnnnnnnnnnnnnnnnnnnnnnnnnnnnnnnnnnnnnnnnnnnnnnnnnnnnnnnnnnnnnnnnnnnnnnnnnnnnnnnnnnnnnnnnnnnnnnnnnnnnnnnnnnnnnnnnnnnnnnnnnnnnnnnnnnnnnnnnnnnnnnnnnnnnnnnnnnnnnnnnnnnnnnnnnnnnnnnnnnnnnnnnnnnnnnnnnnnnnnnnnnnnnnnnnnnnnnnnnnnnnnnnnnnnnnnnnnnnnnnnnnnnnnnnnnnnnnnnnnnnnnnnnnnnnnnnnnnnnnnnnnnnnnnnnnnnnnnnnnnnnnnnnnnnnnnnnnnnnnnnnnnnnnnnnnnnnnnnnnnnnnnnnnnnnnnnnnnnnnnnnnnnnnnnnnnnnnnnnnnnnnnnnnnnnnnnnnnnnnnnnnnnnnnnnnnnnnnnnnnnnnnnnnnnnnnnnnnnnnnnnnnnnnnnnnnnnnnnnnnnnnnnnnnnnnnnnnnnnnnnnnnnnnnnnnnnnnnnnnnnnnnnnnnnnnnnnnnnnnnnnnnnnnnnnnnnnnnnnnnnnnnnnnnnnnnnnnnnnnnnnnnnnnnnnnnnnnnnnnnnnnnnnnnnnnnnnnnnnnnnnnnnnnnnnnnnnnnnnnnnnnnnnnnnnnnnnnnnnnnnnnnnnnnnnnnnnnnnnnnnnnnnnnnnnnnnnnnnnnnnnnnnnnnnnnnnnnnnnnnnnnnnnnnnnnnnnnnnnnnnnnnnnnnnnnnnnnnnnnnnnnnnnnnnnnnnnnnnnnnnnnnnnnnnnnnnnnnnnnnnnnnnnnnnnnnnnnnnnnnnnnnnnnnnnnnnnnnnnnnnnnnnnnnnnnnnnnnnnnnnnnnnnnnnnnnnnnnnnnnnnnnnnnnnnnnnnnnnnnnnnnnnnnnnnnnnnnnnnnnnnnnnnnnnnnnnnnnnnnnnnnnnnnnnnnnnnnnnnnnnnnnnnnnnnnnnnnnnnnnnnnnnnnnnnnnnnnnnnnnnnnnnnnnnnnnnnnnnnnnnnnnnnnnnnnnnnnnnnnnnnnnnnnnnnnnnnnnnnnnnnnnnnnnnnnnnnnnnnnnnnnnnnnnnnnnnnnnnnnnnnnnnnnnnnnnnnnnnnnnnnnnnnnnnnnnnnnnnnnnnnnnnnnnnnnnnnnnnnnnnnnnnnnnnnnnnnnnnnnnnnnnnnnnnnnnnnnnnnnnnnnnnnnnnnnnnnnnnnnnnnnnnnnnnnnnnnnnnnnnnnnnnnnnnnnnnnnnnnnnnnnnnnnnnnnnnnnnnnnnnnnnnnnnnnnnnnnnnnnnnnnnnnnnnnnnnnnnnnnnnnnnnnnnnnnnnnnnnnnnnnnnnnnnnnnnnnnnnnnnnnnnnnnnnnnnnnnnnnnnnnnnnnnnnnnnnnnnnnnnnnnnnnnnnnnnnnnnnnnnnnnnnnnnnnnnnnnnnnnnnnnnnnnnnnnnnnnnnnnnnnnnnnnnnnnnnnnnnnnnnnnnnnnnnnnnnnnnnnnnnnnnnnnnnnnnnnnnnnnnnnnnnnnnnnnnnnnnnnnnnnnnnnnnnnnnnnnnnnnnnnnnnnnnnnnnnnnnnnnnnnnnnnnnnnnnnnnnnnnnnnnnnnnnnnnnnnnnnnnnnnnnnnnnnnnnnnnnnnnnnnnnnnnnnnnnnnnnnnnnnnnnnnnnnnnnnnnnnnnnnnnnnnnnnnnnnnnnnnnnnnnnnnnnnnnnnnnnnnnnnnnnnnnnnnnnnnnnnnnnnnnnnnnnnnnnnnnnnnnnnnnnnnnnnnnnnnnnnnnnnnnnnnnnnnnnnnnnnnnnnnnnnnnnnnnnnnnnnnnnnnnnnnnnnnnnnnnnnnnnnnnnnnnnnnnnnnnnnnnnnnnnnnnnnnnnnnnnnnnnnnnnnnnnnnnnnnnnnnnnnnnnnnnnnnnnnnnnnnnnnnnnnnnnnnnnnnnnnnnnnnnnnnnnnnnnnnnnnnnnnnnnnnngggtatcactgggatacatcagattggatgccaagcgttcctctgccggacatacaggagttccccaactatgaggtgattgatgagcagacacccctgtactcgggagatccgaacgccatcgatacggactattaccctgggggctacgacatcgaaagtgattttcctccaccccccgaagacttccccgccgccgacgagctgccaccgttaccgcccgaattcggcgatcagtttgagtccatccaccctcctagagacatgcctgccgcgggtagcttgggttctt

SEQ ID NO: 26941 - DNA, 446 bp, Macaca Mulatta
ttgtcaatcatgaccgaaagttgcttctcatcacttctacaaccccacaatggaaaaagaaccgagtaacagtgtatgagtatgatactagggaagatcagtggattaatataggtactatgttaggccttttgcagtttgactctggctttatttgcctttgtgcccgtgtttatccttcctgccttgaacctggtcagagttttattactgaggaagatgatgcacggagtgagtctagtactgaatgggacttagatggattcagtgagctggactctgagtcaggaagttcaagttctttttcagatgatgaagtctgggtgcaagtagcacctcagcgaaatgcacaggatcagcagggttctttgtaaatagattttgagacactaagatgtttctactgctacggaatgtattttaaacacatatcctttctttttctt

SEQ ID NO: 26942 - DNA, 1385 bp, Macaca Mulatta
  misc_feature (1)...(1385): n = A,T,C or G
ccgacatgtatgagcgggcggtgcttcgtttgccccagcaaaaagcgttcggggtgactgtggatctctggagcattggagtgaccttgtaccatgcagccaccggcagcctgcccttcatcccctttggtgggccacggcggaacaaggagatcatgtacnnnnnnnnnnnnnnnnnnnnnnnnnnnnnnnnnnnnnnnnnnnnnnnnnnnnnnnnnnnnnnnnnnnnnnnnnnnnnnnnnnnnnnnnnnnnnnnnnnnnnnnnnnnnnnnnnnnnnnnnnnnnnnnnnnnnnnnnnnnnnnnnnnnnnnnnnnnnnnnnnnnnnnnnnnnnnnnnnnnnnnnnnnnnnnnnnnnnnnnnnnnnnnnnnnnnnnnnnnnnnnnnnnnnnnnnnnnnnnnnnnnnnnnnnnnnnnnnnnnnnnnnnnnnnnnnnnnnnnnnnnnnnnnnnnnnnnnnnnnnnnnnnnnnnnnnnnnnnnnnnnnnnnnnnnnnnnnnnnnnnnnnnnnnnnnnnnnnnnnnnnnnnnnnnnnnnnnnnnnnnnnnnnnnnnnnnnnnnnnnnnnnnnnnnnnnnnnnnnnnnnnnnnnnnnnnnnnnnnnnnnnnnnnnnnnnnnnnnnnnnnnnnnnnnnnnnnnnnnnnnnnnnnnnnnnnnnnnnnnnnnnnnnnnnnnnnnnnnnnnnnnnnnnnnnnnnnnnnnnnnnnnnnnnnnnnnnnnnnnnnnnnnnnnnnnnnnnnnnnnnnnnnnnnnnnnnnnnnnnnnnnnnnnnnnnnnnnnnnnnnnnnnnnnnnnnnnnnnnnnnnnnnnnnnnnnnnnnnnnnnnnnnnnnnnnnnnnnnnnnnnnnnnnnnnnnnnnnnnnnnnnnnnnnnnnnnnnnnnnnggtccagcagcgtggctggaatgcctgagatccaggaactgaaggtggccgcagaactgaggtccaggctgcggactnctagctgaggtcctctccagatgctcccaaaatatcacggnnnnnnnnnnnnnnnnnnnnnnnnnnnnnnnnnnnnnnnnnnnnnnnnnnnnnnnnnnnnnnnnnnnnnnnagcatccagcagattcagtgctgtttggacaagatgaacttcatctacaaacagttcaagaagtctaggatgaggccagnnnnnnnnnnnnnnnnnnnnnnnnnnnnnnnnnnnnnnnnntgaatttcagccatttagccaaaaggctcctgcaggtgttccagaaggagtgcgtgcagaagtatcaagcatccctagtcacgcacggcaagnnnngagggtggtgcacgagaccaggaaccacctgcgcctggtcagctgttctgtggccgcctgtaacacagaagcccagggggtccaggagagtctcagcaa

SEQ ID NO: 26943 - DNA, 747 bp, Macaca Mulatta
  misc_feature (1)...(747): n = A,T,C or G
ggtggtcaaatctcagctaaatgtgtcttctgtcagtgagcacaatgcatatagagcaggccttcaccctgtcagcaagtggcaagcctatggactcaaaggctatcctggnnnnnnnnnnnnnnnnnnnnnnnnnnnnnnnnnnnnnnnnnnnnnnnnnnnnnnnnnnnnnnnnnnnnnnnnnnnnnnnnnnnnnnnnnnnnnnnnnnnnnnnnnnnnnnnnnnnnnnnnnnnnnnnnnnnnnnnnnnnnnnnnnnnnnnnnnnnnnnnnnnnnnnnnnnnnnnnnnnnnnnnnnnnnnnnnnnnnnnnnnnnnnnnnnnnnnnnnnnnnnnnnnnnnnnnnnnnnnnnnnnnnnnnnnnnnnnnnnnnnnnnnnnnnnnnnnnnnnnnnnnnnnnnnnnnnnnnnnnnnnnnnnnnnnnnnnnnnnnnnnnnnnnnnnnnnnnnnnnnnnnnnnnnnnnnnnnnnnnnnnnnnnnnnnnnnnnnnnnnnnnnnnnnnnnnnnnnnnnnnnnnnnnnnnnnnnnnnnnnnnnnnnnnnnnnnnnnnnnnnnnnagctttggacagtctgccatctttctcctgggtggtcttcaaagggatgaggcccccacggccatgtttatgcacagtggtgacatcatgataatgtcgggtttcagccgcctgttgaaccacgcagtccctcgtgtccttccaaatccagatggggaaggcctgcctcactgcctagaggcacctctccctg

SEQ ID NO: 26944 - DNA, 107 bp, Macaca Mulatta
tgaagaaattaaggcttaaggaactagagagtcgcctgccacaagtggatggattccaaaagcccaagctacttctagaacagtatcctaccaggccgcccattgca

SEQ ID NO: 26945 - DNA, 780 bp, Macaca Mulatta
aggacctccgtgacgagaggaattgggctgtgtgcagtttaactctggctgcagcagcctgtaacagccagttaagatttattaagtgaatgtgattaaaagcctgcctgtttctcctgttcagcttgtctcaactggacagtgcagtcgcccctccagacagtcctatgaggtttttctttctattcctgcaattttgggagaagacacaaaccaggaaagtgtgaaaatccaaccagaaggcaggaaaagctggccaaaccctgagcacaggctctaggtgacacatcaccaaagactgagaacaacatcaccctcacccacaactccagtggagcttctgaatttcagtctaactgcactcatttttgactcttatttcagagccgattaccatgcaccttcagatgctaatggaagtggtcccaccggaggaagaccctgagtaacaagctccatctcttgtagccaagtcaaagctgaatttattttcttaagcaatatttgtggttatttcttcctgatatttttcttatgaataaaatatactcagatgtttaaaatattgttatttttagatattcttagttctctgggtgggggttccagaaaggagaagtggcaagtgtttgctaaagttgctgtcaggtgagatgtcacctaacagaaggcagatgcttagggaagggctgaataaaagccactataagagtggcaactatttaacaaagggcatatcacacttaaaagagaggcattctttaactcaatgtcaataag

SEQ ID NO: 26946 - DNA, 863 bp, Macaca Mulatta
atagaagtaatagatattgattacagatcctctttcctgaatctttcaggaagcattttttatatgatgaccatagtttctgaagcagagtaaaatgaataagacttgagtaggaccacactgattctccttggtgacatggctgcggggaggagtggcatctgcctctggtgacaataatatctaacttctttcctgccttttctttcttctacagagagtgaccaatcaacttctggggagaaaagttccctgggactgacacaagtttattttcctcagagccttggaattctattttatgaatctagagaagcacaatccttacttttgtgagtctgattgaataaagcttattctttgtccatgtgtacttcagaaatagtaccttctaaagagtctggagcagagtggtgattacaattcctaatggtttgggagcaatactttcttcatagtggcctgtccattgggctctgtgttacaatgatatgatcagttctcaagagtgagtccctttttgtatgtgtttttatacttttagaaaataaaaacttgagattaactcatagtaaacaattctttcccatctgaagaggtgcaaggagctatgcattgtctccaccgaggtgtttaaatgcatcagttgaggaaaatgggctttcagaatgaaatgtagtctgtctctagaaacacagtgtgctgtagtgggagcactgttgtgggctttgaggagcgggtgtctggttagacgcccaccgggtgcacccagaggctgctgcgggagaggcatctcggatccagagcctcctctcagccccagtccagctcccacagggactctgtgtaggctggggagaaag

SEQ ID NO: 26947 - DNA, 1523 bp, Macaca Mulatta
  misc_feature (1)...(1523): n = A,T,C or G
agggccagcggggtatcttcggcgggctagtgtggcccaactgacccaggagctgggcactgccttcttccagcagcagcagctgccagctgctatggcagacaccttcctggagcacctctgcctactggacattgactccgagcccgtggctgctcgcagtaccagcatcattgccaccatcgnnnnnnnnnnnnnnnnnnnnnnnnnnnnnnnnnnnnnnnnnnnnnnnnnnnnnnnnnnnnnnnnnnnnnnnnnnnnnnnnnnnnnnnnnnnnnnnnnnnnnnnnnnnnnnnnnnnnnnnnnnnnnnnnnnnnnnnnnnnnnnnnnnnnnnnnnnnnnnnnnnnnnnnnnnnnnnnnnnnnnnnnnnnnnnnnnnnnnnnnnnnnnnnnnnnnnnnnnnnnnnnnnnnnnnnnnnnnnnnnnnnnnnnnnnnnnnnnnnnnnnnnnnnnnnactgtggaccccgcgtttcggacgccgttagaacgcgaacaccgtgtgggtggactaccccaatattctctgggtcgtgcctgtggggggccgcatctacattgacgacgggctcatctccctagtggtccagaaaatcggnggcccagagggactggtgacccaagtggagaacggtggcgtcctggccagccgtaagggcgtgaacttgccgggggcccaggtggacttgcccgggctgtccgagcaggacgtccgggacctgcgcttcggggtggagcatggagtggacatcgtgtttgcctcctttgtgcggaaagccagcgatgtggctgctgtcagggctgctctggggccggaaggacannnnnnnnnnnnnnnnnnnnnnnnnnnnnnnnnnnnnnnnnnnnnnnnnnnnnnnnnnnnnnnnnnnnnnnnnnnnnnnnnnnnnnnnnnnnnnnnnnnnnnnnnnnnnnnnnnnnnnnnnnnnnnnnnnnnnnnnnnnnnnnnnnnnnnnnnnnnnnnnnnnnnnnnnnnnnnnnnnnnnnnnnnnnnnnnnnnnagatgctggagagcatgattaccaagccccggccaacgagggcagagacaagcgatgtggccaatgctgtgctagatggggccgactgcatcatgctgtcaggggagactgccaaaggcaacttccctgtggaagccgtgaagatgcagcatgcgngattgcccgggaggcagaggctgcagtgtaccaccggcagctgtttgaggagctacgtcgggcagcgccactgagccgtgatcccactgaggtcatcgccattggcgccgtggaggctgccttcaagtgctgtgctgctgccatcatcgtactgaccacaactggccgctcagcccagcttctgtctcagtaccgacctcgggcagcagtcattgctgtcacccgctctgcccaagctgcccgccaggtccacttatgccgaggagtcttccccttgctttaccgtgaacctccagaagccatctgggcagatgacgtagatcgccgggtgcaatttggcattgaaagtg

SEQ ID NO: 26948 - DNA, 171 bp, Macaca Mulatta
  misc_feature (1)...(171): n = A,T,C or G
gtggccaattcgattcggagggtcttcatcgctgaggtgcccataatagnnnnnnnnnnnnnnnnnnnnnnnnnnnnnnnnnnnnnnnnnnnnnnnnnnnnnnnnnnnnnnnnnnnngattaattcccctcattagtgatgacattgtggacaagctgcagtactcccggg

SEQ ID NO: 26949 - DNA, 735 bp, Macaca Mulatta
gagggaagggtggaggggctcagggcaccgtgaggaggaggtttcagagtagacagtggtgtcagctccagctcccctctgtcggtggtggggcctcgccttgaagagggaagtctcaatattaggctaagctatttgggagacagctctccccaccgcccctgtatgcgtcatcctagccccccaaaggaaaggagttagggtctcagtgcctccagccacaccccctgctttccccagcttgtccatttccctgccccaaggcccagagctctccctggactggagagcaagcccagcccagcctcagcgaagacccgcttccggtacacccgcaggctcgcttcccggggttcattcctcagcctctgcttctcctttttatcccgataagttattgctactgctgtgaggccataggtactaggcaaccaatacatacacggttgtgttttctaatttttttaactttttaattaaatcaaagaaaacaataattggtttggaccaggtgatttctttgtcagctggttcccaagaggtggggggagagggaggtttagaatggagcctcacccagaaagaagcccttatcttaacccatggcctggccacatagacctccttggaatgctaagaaaagcaaggcctgtgtttttgtagtacatagcaagggtcaccctgtcattctgaccgctaggtgagggatggagagggacgttcttttgtccctga

SEQ ID NO: 26950 - DNA, 86 bp, Macaca Mulatta
tggagaatcaggtgttgacgccgcatgtctactgggctcagcgacaccgcgagctgtatctgcgcgtggagctgagtgacgtacag

SEQ ID NO: 26951 - DNA, 1588 bp, Macaca Mulatta
  misc_feature (1)...(1588): n = A,T,C or G
ggtggatcgtatgtctttcccgtgcggctgcactaaagaaggatgtagtaacacagcaggtagaattgaatttaatcctatccgtgttcggactcactttttgcacacaataatgaaacttgaactggagaaaaaccgagagcagcaaatccccacgctgaatggctgccacagtgagataagtgctcacagtagttccatgggccctgtcgctcactccgtagaatattcaatcgcagacggttttgagattgaaactgaaccccaggctgcagtgctgcacctgcagtcggctgaagaattagattgccaaggagaggaggaggaagaagaggaggatgggagcagcttttgcagtggagtcnnnnnnnnnnnnnnnnnnnnnnnnnnnnnnnnnnnnnnnnnnnnnnnnnnnnnnnnnnnnnnnnnnnnnnnnnnnnnnnnnnnnnnnnnnnnnnnnnnnnnnnnnnnnnnnnnnnnnnnnnnnnnnnnnnnnnnnnnnnnnnnnnnnnnnnnnnnnnnnnnnnnnnnnnnnnnnnnnnnnnnnnnnnnnnnnnnnnnnnnnnnnnnnnnnnnnnnnnnnnnnnnnnnnnnnnnnnnnnnnnnnnnnnnnnnnnnnnnnnnnnnnnnnnnnnnnnnnnnnnnnnnnnnnnnnnnnnnnnnnnnnnnnnnnnnnnnnnnnnnnnnnnnttcgctggtgccttacaccatgaccccggagcaattcgttgactatgcccgacaagcagaagaggcctatggtgcctcccactacccagctgccaacccctctgtaatcgtttgctgctcctcttccgaaaatgatagcggtgtgccctgcaatagtttatatcccgaacacaggtccagtcaccctcaagtggaatttcactcatacttgaaaggcccctcccaggaagggtttgtctctacattgaatggtgacagtcacatttcagagcatcctgctgaaaattctttgagccttgcagaaaagagcatattgcatgaagagtgcatcaaatcacccgtggttgagacagtccctgtttagtagcttaaattattctaggaccaactcttctcctatttaaggcactgtatttaattggatttcctgggctcatcattgtttaaactgaagaccaagaaaacttggacgatggttaatcctccagactgtattttgttttttcctttctagccacatgactgtggcattgcacaaatacagtctctgtagggattttaaaagatttcagactgttttgatagaaaatgctaaattttaaaatgcatatctcacagttgcctacctgtcaaactgtgtgaaacctgccaatctgtgtagatcagagctccaaattttggattatcgggcctgtgcaagattgttaactaaggctgggaaataataagatttagagtcctaattttcgatatatctgaagataatggtgactttttaatgtaaaagtaaatattgtaagaaaaagatttaattgttccatgtgtattttatttatggtagtttagaagtcatgttttgatgaaaatgaacagccgcatgttcattcaagctgaagat

SEQ ID NO: 26952 - DNA, 366 bp, Macaca Mulatta
ccctccctctcctgcacctctaccctcaccctgagctgtcttgttgaaaacagtaataaaaacattactttacattgtaattgactgaggattgttcttaaatgaaggcaggtgagataacagtttataatttgcaatgtaaagatgtgacttgaggaatcaaatgcaagaagcttccatttgaactgatttgcaaaatttaaaatacagcacattttgtagaattgactataagtccgcacgcaaatccttagaaaatagaaaatattaactttactcaactataacatatatttgttctgtagagttagaattaaaggtaacatctacttcacgcttggggaaaaaagtataaagtaaaatatt

SEQ ID NO: 26953 - DNA, 286 bp, Macaca Mulatta
  misc_feature (1)...(286): n = A,T,C or G
gggacatagaacgaaaatagaggtctaggaattatcaaaaggtactgcaaaaatactgttagtatataacatttctatttgtaaatagcacatacattgatagatggggtatgggaccaacaaaccaaattaaaagaaattgtttttctttcagtacactaaggtgtgttttcaaaaccaaacacaagcctgtcagagtatttgttggctagtttcttaaaaggccaagagaaaaaagctgatatcnnnnnnnnnnnnnnnnnnnnnnnnnnnnnnnnnnnnnnnc

SEQ ID NO: 26954 - DNA, 400 bp, Macaca Mulatta
gtcaggcctcttattcttccagccctggggactgtggcttcgatccagtgggctcctgttcgccaccttcctgctgctgtccctcctctcgttggtggccagcctgctcctcgcctcacacctctacctggtggccagcaacaccaccacctgggaattcatctcctcacaccgcatcgcctatctccgccagcgccccggcaaccccttcgaccgaggcctgacccgcaactttgcccacttcttctgtggatggccctcggggtcctgggagaccctctgggctgaggaggaggaggagggcagcagcccagctgtttagggttgctagaggctgggctactatcttgtgcctgaaaaccaggggacctgtccccagctagggtcagccctcggaggg

SEQ ID NO: 26955 - DNA, 186 bp, Macaca Mulatta
caggtaagccaagatgggtgcatacaagtacattcaggagctatggagaaagaagcagtctgatgtcatgcgctttcttctgagggtccgctgctggcagtaccgccagctctctgctctccacagggctccccgccccacccggcctgataaagcgcgccgactgggctacaaggccaagcaagg

SEQ ID NO: 26956 - DNA, 1003 bp, Macaca Mulatta
  misc_feature (1)...(1003): n = A,T,C or G
ggttcggcaggaattattggaagaatatgaacaagtgaaaagtattgtcagcactttagaaagttttaaaatcgacaagcctccagatttccctgtgtcctgtcaagatgaaccatttagagatcctgctgtttggccaccccctgttcctgcagaacacagnnnnnnnnnnnnnnnnnnnnnnnnnnnnnnnnnnnnnnnnnnnnnnnnnnnnnnnnnnnnnnnnnnnnnnnnnnnnnnnnnnnnnnnnnnnnnnnnnnnnnnnnnnnnnnnnnnnnnnnnnnnnnnnnnnnnnnnnnnnnnnnnnnnnnnnnnnnnnnnnnnnnnnnnnnnnnnnnnnnnnnnnnnnnnnnnnnnnnnnnnnnnnnnnnnnnnnnnnnnnnnnnnnnnnnnnnnnnnnnnnnnnnnnnnnnnnnnnnnnnnnnnnnnnnnnnnnnnnnnnnnnnnnnnnnnnnnnnnnnnnnnnnnnnnnnnnnnnnnnnnnnnnnnnnnnnnnnnnnnnnnnnnnnnnnnnnnnnnnnnnnnnnnnnnnnnnnnnnnnnnnnnnnnnnnnnnnnnnnnnnnnnnnnnnnnnnnnnnnnnnnnnnnnnnnnnnnnnnnnnnnnnnnnnnnnnnnnnnnnnnnnnnnnnnnnnnnnnnnnnnnnnnnnnnnnnnnnnnnnnnnnnnnnnnnnnnnnnnnnnnnnnnnnnnnnnnnnnnnnnnnnnnnnnnnnnnnnnnnnnnnnnnnnnnnnnnnnnnnnnnnnnnnnnnnnnnnnnnnnnnnnnnnnnnnnnnnnnnnnnnnnnnnnnnnnnnnnnnnnnnnnnnnnnnnnnnnnnnnnnnnnnnnnnnnnnnnnnnnnnnnnnnnnnnnnnnnnnnnnnnnnnnnggagttggaggagctttagaaaatgatgatccttccagaatggttatggtattggctgctacgaatttcccgtgggacattgatgaagctttgcgaagaaggttagaaaaaaggatatatatacctctcccaaca

SEQ ID NO: 26957 - DNA, 150 bp, Macaca Mulatta
aatgaccaatatgagaaaacagctctctgagatactcagatattaacttccagaagatcctctcagtctcctcaggagctgtttgaaatatcgaggccacagtccccagaatcagagagagacatttttggagccagctgagaggtctat

SEQ ID NO: 26958 - DNA, 4282 bp, Macaca Mulatta
  misc_feature (1)...(4282): n = A,T,C or G
gatttgcaatcttgtatgatctgtgtggcacgccgcattactacaggtgaaagagcatttccatcaaaccctgagagctttattaccagacatgatctttcaggnnnnnnnnnnnnnnnnnnnnnnnnnnnnnnnnnnnnnnnnnnnnnnnnnnnnnnnnnnnnnnnnnnnnnnnnnnnnnnnnnnnnnnnnnnnnnnnnnnnnnnnnnnnnnnnnnnnnnnnnnnnnnnnnnnnnnnnnnnnnnnnnnnnnnnnnnnnnnnnnnnnnnnnnnnnnnnnnnnnnnnnnnnnnnnnnnnnnnnnnnnnnnnnnnnnnnnnnnnnnnnnnnnnnnnnnnnnnnnnnnnnnnnnnnnnnnnnnnnnnnnnnnnnnnnnnnnnnnnnnnnnnnnnnnnnnnnnnnnnnnnnnnnnnnnnnnnnnnnnnnnnnnnnnnnnnnnnnnnnnnnnnnnnnnnnnnnnnnnnnnnnnnnnnnnnnnnnnnnnnnnnnnnnnnnnnnnnnnnnnnnnnnnnnnnnnnnnnnnnnnnnnnnnnnnnnnnnnnnnnnnnnnnnnnnnnnnnnnnnnnnnnnnnnnnnnnnnnnnnnnnnnnnnnnnnnnnnnnnnnnnnnnnnnnnnnnnnnnnnnnnnnnnnnnnnnnnnnnnnnnnnnnnnnnnnnnnnnnnnnnnnnnnnnnnnnnnnnnnnnnnnnnnnnnnnnnnnnnnnnnnnnnnnnnnnnnnnnnnnnnnnnnnnnnnnnnnnnnnnnnnnnnnnnnnnnnnnnnnnnnnnnnnnnnnnnnnnnnnnnnnnnnnnnnnnnnnnnnnnnnnnnnnnnnnnnnnnnnnnnnnnnnnnnnnnnnnnnnnnnnnnnnnnnnnnnnnnnnnnnnnnnnnnnnnnnnnnnnnnnnnnnnnnnnnnnnnnnnnnnnnnnnnnnnnnnnnnnnnnnnnnnnnnnnnnnnnnnnnnnnnnnnnnnnnnnnnnnnnnnnnnnnnnnnnnnnnnnnnnnnnnnnnnnnnnnnnnnnnnnnnnnnnnnnnnnnnnnnnnnnnnnnnnnnnnnnnnnnnnnnnnnnnnnnnnnnnnnnnnnnnnnnnnnnnnnnnnnnnnnnnnnnnnnnnnnnnnnnnnnnnnnnnnnnnnnnnnnnnnnnnnnnnnnnnnnnnnnnnnnnnnnnnnnnnnnnnnnnnnnnnnnnnnnnnnnnnnnnnnnnnnnnnnnnnnnnnnnnnnnnnnnnnnnnnnnnnnnnnnnnnnnnnnnnnnnnnnnnnnnnnnnnnnnnnnnnnnnnnnnnnnnnnnnnnnnnnnnnnnnnnnnnnnnnnnnnnnnnnnnnnnnnnnnnnnnnnnnnnnnnnnnnnnnnnnnnnnnnnnnnnnnnnnnnnnnnnnnnnnnnnnnnnnnnnnnnnnnnnnnnnnnnnnnnnnnnnnnnnnnnnnnnnnnnnnnnnnnnnnnnnnnnnnnnnnnnnnnnnnnnnnnnnnnnnnnnnnnnnnnnnnnnnnnnnnnnnnnnnnnnnnnnnnnnnnnnnnnnnnnnnnnnnnnnnnnnnnnnnnnnnnnnnnnnnnnnnnnnnnnnnnnnnnnnnnnnnnnnnnnnnnnnnnnnnnnnnnnnnnnnnnnnnnnnnnnnnnnnnnnnnnnnnnnnnnnnnnnnnnnnnnnnnnnnnnnnnnnnnnnnnnnnnnnnnnnnnnnnnnnnnnnnnnnnnnnnnnnnnnnagggatctggagacttggataatctagatgctattcttggtgatctgactagttctgacttttacaataattcnnnnnnnnnnnnnnnnnnnnnnnnnnnnnnnnnnnnnnnnnnnnnnnnnnnnnnnnnnnnnnnnnnnnnnnnnnnnnnnnnnnnnnnnnnnnnnnnnnnnnnnnnnnnnnnnnnnnnnnnnnnnnnnnnnnnnnnnnnnnnnnnnnnnnnnnnnnnnnnnnnnnnnnnnnnnnnnnnnnnnnnnnnnnnnnnnnnnnnnnnnnnnnnnnnnnnnnnnnnnnnnnnnnnnnnnnnnnnnnnnnnnnnnnnnnnnnnnnnnnnnnnnnnnnnnnnnnnnnnnnnnnnnnnnnnnnnnnnnnnnnnnnnnnnnnnnnnnnnnnnnnnnnnnnnnnnnnnnnnnnnnnnnnnnnttacccagacctgcagtgggtggatctatgcccgcgttgcctcttcggtctaatagcataccaggagcaagaccactattgcnnnnnnnnnnnnnnnnnnnnnnnnnnngcctggtgaactccccatgggaatggaggctaatccctatgnnnnnnnnnnnnnnnnnnnnnnnnnnnnnnnnnnnnnnnnnnnnnnnnnnnnnnnnnnnnnnnnnnnnnnnnnnnnnnnnnntaggccccttcttaggaattccctggatgatcttgtcgggccaccttccaacctggaaggccagagtgatgaaagagcattattggaccagctgcacactcttctcagcaacacagatgccacaggcctggaagaaattgacagagctttgggaatccctgaacttgtcaatcaggnnnnnnnnnnnnnnnnnnnnnnnnnnnnnnnnnnnnnnnnnnnnnnnnnnnnnnnnnnnnnnnnnnnnnnnnnnnnnnnnnnnnnnnnnnnnnnnnnnnnnnnnnnnnnnnnnnnnnnnnnnnnnnnnnnnnnnnnnnnnnnnnnnnnnnnnnnnnnnnnnnnnnnnnnnnnnnnnnnnnnnnnnnnnnnnnnnnnnnnnnnnnnnnnnnnnnnnnnnnnnnnnnnnnnnnnnnnnnnnnnnnnnnnnnnnnnnnnnnnnnnnnnnnnnnnnnnnnnnnnnnnnnnnnnncagtttttgaatcagagcagacaggcacttgaattgaaaatggaaaaccctactgctggtggtgctgccgtgatgaggcctatgatgcagccccanagcagggttttcttaatgctcaaatggtcgcccaacgcagcagagagctgctaagtcatcacttccgacaacagagggtggctatgatgannnnnnnnnnnnnnnnnnnnnnnnnnnnnnnnnnnnnnnnnnnnnnnnnnnnnnnnnnnnnnnnnnnnnnnnnnnnnnnnnnnnnnnnnnnnnnnnnnnnnnnnnnnnnnnnnnnnnnnnnnnnnnnnnnnnnnnnnnnnnnnnnnnnnnnnnnnnnnnnnnnnnnnnnnnnnnnnnnnnnnnnnnnnnnnnnnnnnnnnnnnnnnnnnnnnnnnnnnnnnnnnnnnnnnnnnnnnnnnnnnnnnnnnnnnnnnnnnnnnnnnnnnnnnnnnnnnnnnnnnnnnnnnnnnnnnnnnnnnnnnnnnnnnnnnnnnnnnnnnnnnnnnnnnnnnnnnnnnnnnnnnnnnnnnnnnnnnnnnnnnnnnnnnnnnnnnnnnnnagctccttttcccatcagcagtttgcccaccaggggaatcctgcagtgtataccatggtacacatgaatggcagcagtggtcacatgggacagatgaacatgaaccccatgcccatgtctggcatgcctatgggccctgatcagncagaaatactgctgacatctctgcaccaggacctcttaaggagaccactgtacaaatgacactgcactaggattattgggaaggaatcattgttccaggcatctatctttgaagaaaggaccagctttgagctccatcaagggtattttaagtgatgtcatttgagcaggactcgattttaagccgaacagcagtatctacctgttttttttctcctctcctcctgctgtgtatcatggtgttcaaaacagaaatattttttggcattccacctcctagggatataattctggagatatggagtcctactgatcataaaacttttgtgtcacttttttctgccttgctagccaaagtctcttaaatacacataggtgggccagagaacattggacaaatcaagagagattagaacatctggtttctctagttgcagtattggacaaagagcatagtcccagccctcaggtgtnagtagttctgtgttgaccctctgtccagtggaattggtgattctgaattgtcctttactgatggtgttgagttgctctgtccctattatttgacctaggttttctctttttgaaggttttcatttgccgttcatgtcctgtaagacttcacctccaggaactgtcatggatgtccaaatggctttgcagaagggaaatgagatgacagtatttaattgcagcagtagcaaacttttcacatgctaatgtgcagctgagtgcactttatttaaaaagtaatggataaatgcaata

SEQ ID NO: 26959 - DNA, 301 bp, Macaca Mulatta
agtgtttggggactcaataaaaccctcactggattttagcaataaagtttctcatcagggtggcaactgtgtcttagaataagagcacacaggggtgggcaggaccttcagactcactcatctcatcctatactgtcgttttgaggaagggaaacgcccacagaggacagaaactggcccaggtcatttgggaccagtgctcagactgctagtattagatcccagcacagcttcctgttgagagccaaggacgctctgggaagccagagttcatcccctcaggagaagactcatgttagag

SEQ ID NO: 26960 - DNA, 792 bp, Macaca Mulatta
  misc_feature (1)...(792): n = A,T,C or G
gttgacatcaaagacagttgaaggaaatgaattttgaaacttcacggtgtgccaccctacagtactgccctgacccttacatccagcnnnnnnnnnnnnnnnnnnnnnnnnnnnnnnnnnnnnnnnnnnnnnnnnnnnnnnnnnnnnnnnnnnnnnnnnnnnnnnnnnnnnnnnnnnnnnnnnnnnnnnnnnnnnnnnnnnnnnnnnnnnnnnnnnnnnnnnnnnnnnnnnnnnnnnnnnnnnnnnnnnnnnnnnnnnnnnnnnnnnnnnnnnnnnnnnnnnnnnnnnnnnnnnnnnnnnnnnnnnnnnnnnnnnnnnnnnnnnnnnnnnnnnnnnnnnnnnnnnnnnnnnnnnnnnnnnnnnnnnnnnnnnnnnnnnnnnnnnnnnnnnnnnnnnnnnnnnnnnnnnnnnnnnnnnnnnnnnnnnnnnnnnnnnnnnnnnnnnnnnnnnnnnnnnnnnnnnnnnnnnnnnnnnnnnnnnnnnnnnnnnnnnnnnnnnnnnnnnnnnnnnnnnnnnnnnnnnnnnnnnnnnnnnnnnnnnnnnnnnnnnnnnnnnnnnnnnnnnnnnnnnnnnnnnnnnnnnnnnnnnnnnnnnnnnnnnnnntattccactgaactgaagaaactgtactgccaaattgcaaagacatgccccatccagatcaaggtgatgaccccgcctcctcaaggagctgttatccgcgccatgcctgtctacaaaaaagctgagcacgtcactgaggtggtgaagcggtgtcccaaccatgagctgagccgcgaattcaatgagggn

SEQ ID NO: 26961 - DNA, 278 bp, Macaca Mulatta
tggatggtttagattggacgactgattattggacagaatggaatcttgtcgacacctgccgtctcctgcattatcaggaagatcaaggcagctggtggaatcattctaacagccagtcactgccctggaggaccagggggcgagtttggagtgaagtttaatgttgccaatggaggtatgtggttcagaatatgcttaataatcacgatttctttcctcttatattattatagtcttaaagtgaccctttgatgatagacaaacaaggtgaagaggac

SEQ ID NO: 26962 - DNA, 101 bp, Macaca Mulatta
agtgggggtcaacttgttctatttctgcatcatcgtttacctgtatggggaccttgccatctatgctgctgccgtgcccttctccctcatgcaggtgacct

SEQ ID NO: 26963 - DNA, 416 bp, Macaca Mulatta
  misc_feature (1)...(416): n = A,T,C or G
aagatctcaggaaacaggctcgacagctggaaaatgaacttgacctgaaactagtttccttcagcaaactatgtacaagttacagtcatagcagtacccgagatggaagacgcgacaggtatannagttctgatacaacacctcttttaaatggatcaagccaagacagaatgtttgagacaatggcgatcgagattgaacaacttttggcaaggnnnnnnnnnnnnnnnnnnnnnnnnnnnnnnnnnnnnnnnnnnnnnnnnnnnnnnnnnnnnnnnnnnnnnnnnnnnnnnnnnnnnnnnnnnnnnnnnnnnntattacaggattatacacgtggattccataaaacccaagcaaactttatggcaatacgggaaaggcagaatctcatgggatcagtatgaaaagatattgag

SEQ ID NO: 26964 - DNA, 1343 bp, Macaca Mulatta
  misc_feature (1)...(1343): n = A,T,C or G
gtttcaatgttaaccacttggatattgctccaagatatgccagtatcttaatgggcatttcgaatggtgttggcacattgtcaggaatggtttgtcctatcattgttggtgcaatgacaaagaataagnagtcacgtgaagagtggcagtatgtcttcctgatcgctgccctagtccactatggtggagttatattttatgcaatatttgcctcaggagagaaacaaaactgggcagaccctgaggaaacaagtgaagaaaaatgtggatttattcatgaagatgaacttgatgaagaaacaggggacattactcaaaattatataaattatggtaccaccaagtcttatggtgccacaacacaggccaatggaggttggcccagtggttgggaaaagaaagaggaatttgtacaaggagaagtgcaaaactcatatagctataaggaccgagttgattattcatannnnnnnnnnnnnnnnnnnnnnnnnnnnnnnnnnnnnnnnnnnnnnnnnnnnnnnnnnnnnnnnnnnnnnnnnnnnnnnnnnnnnnnnnnnnnnnnnnnnnnnnnnnnnnnnnnnnnnnnnnnnnnnnnnnnnnnnnnnnnnnnnnnnnnnnnntcaagtgcaatctgtaaaattgtgaagttccatcatttccattcaagtcatccattctggcatttgtgacttaaaagtttgactggtcaaaattgtagaaacaagtagttaccctttggattcatatgagctaaaactcatcactatttaataaagcacaacatctcatcctacaaaagttaggaagccaaagctacttgatcatgcaaaacgcacttatatatttgttacactgtattgcaggatagcatacagaagttggctgcatcaggtagaggcgacatttattaagtgaaaatcagggagttgggatatgtctcaaagaagtacattgtgaactatcagctacaaagttgtactgaataactatttgaattgcataatgtaagatattttgttagtcctcaaaaggagtatcttgcagtcttttctatgaaatgcttggccacaaacacttatttctgtgaaagagaatatgtaaattgaggggtgtgcttcatgttcttccatccatttacctaacagtatgaaacacttcacatttcaataaaatcaaacttttcatgtagcatatcacataacttttttgnnnnnnnnnnnnnnnnnnnnnncttcaatgtatttttattacaactttgtactggttgtaacttgcattagaaaaaaaagagatatatacaccacaaagaatctaataagaaatttactatggaaatatagccc

SEQ ID NO: 26965 - DNA, 2857 bp, Macaca Mulatta
  misc_feature (1)...(2857): n = A,T,C or G
agatcacgaggaatacgacaccaatgtatagaacgccagaaatcatagacttgtattccaacttcccgatcggcgagaagcaggatatctggnnnnnnnnnnnnnnnnnnnnnnnnnnnnnnnnnnnnnnnnnnnnnnnnnnnnnnnnnnnnnnnnnnnnnnnnnnnnnnnnnnnnnnnnnnnnnnnnnnnnnnnnnnnnnnnnnnnnnnnnnnnnnnnnnnnnnnnnnnnnnnnnnnnnnnnnnnnnnnnnnnnnnnnnnnnnnnnnnnnnnnnnnnnnnnnnnnnnnnnnnnnnnnnnnnnnnnnnnnnnnnnnnnnnnnnnnnnnnnnnnnnnnnnnnnnnnnnnnnnnnnnnnnnnnnnnnnnnnnnnnnnnnnnnnnnnnnnnnnnnnnnnnnnnnnnnnnnnnnnnnnnnnnnnnnnnnnnnnnnnnnnnnnnnnnnnnnnnnnnnnnnnnnnnnnnnnnnnnnnnnnnnnnnnnnnnnnnnnnnnnnnnnnnnnnnnnnnnnnnnnnnnnnnnnnnnnnnnnnnnnnnnnnnnnnnnnnnnnnnnnnnnnnnnnnnnnnnnnnnnnnnnnnnnnnnnnnnnnnnnnnnnnnnnnnnnnnnnnnnnnnnnnnnnnnnnnnnnnnnnnnnnnnnnnnnnnnnnnnnnnnnnnnnnnnnnnnnnnnnnnnnnnnnnnnnnnnnnnnnnnnnnnnnnnnnnnnnnnnnnnnnnnnnnnnnnnnnnnnnnnnnnnnnnnnnnnnnnnnnnnnnnnnnnnnnnnnnnnnnnnnnnnnnnnnnnnnnnnnnnnnnnnnnnnnnnnnnnnnnnnnnnnnnnnnnnnnnnnnnnnnnnnnnnnnnnnnnnnnnnnnnnnnnnnnnnnnnnnnnnnnnnnnnnnnnnnnnnnnnnnnnnnnnnnnnnnnnnnnnnnnnnnnnnnnnnnnnnnnnnnnnnnnnnnnnnnnnnnnnnnnnnnnnnnnnnnnnnnnnnnnnnnnnnnnnnnnnnnnnnnnnnnnnnnnnnnnnnnnnnnnnnnnnnnnnnnnnnnnnnnnnnnnnnnnnnnnnnnnnnnnnnnnnnnnnnnnnnnnnnnnnnnnnnnnnnnnnnnnnnnnnnnnnnnnnnnnnnnnnnnnnnnnnnnnnnnnnnnnnnnnnnnnnnnnnnnnnnnnnnnnnnnnnnnnnnnnnnnnnnnnnnnnnnnnnnnnnnnnnnnnnnnnnnnnnnnnnnnnnnnnnnnnnnnnnnnnnnnnnnnnnnnnnnnnnnnnnnnnnnnnnnnnnnnnnnnnnnnnnnnnnnnnnnnnnnnnnnnnnnnnnnnnnnnnnnnnnnnnnnnnnnnnnnnnnnnnnnnnnnnnnnnnnnnnnnnnnnnnnnnnnnnnnnnnnnnnnnnnnnnnnnnnnnnnnnnnnnnnnnnnnnnnnnnnnnnnnnnnnnnnnnnnnnnnnnnnnnnnnnnnnnnnnnnnnnnnnnnnnnnnnnnnnnnnnnnnnnnnnnnnnnnnnnnnnnnnnnnnnnnnnnnnnnnnnnnnnnnnnnnnnnnnnnnnnnnnnnnnnnnnnnnnnnnnnnnnnnnnnnnnnnnnnnnnnnnnnnnnnnnnnnnnnnnnnnnnnnnnnnnnnnnnnnnnnnnnnnnnnnnnnnnnnnnnnnnnnnnnnnnnnnnnnnnnnnnnnnnnnnnnnnnnnnnnnnnnnnnnnnnnnnnnnnnnnnnnnnnnnnnnnnnnnnnnnnnnnnnnnnnnnnnnnnnnnnnnnnnnnnnnnnnnnnnnnnnnnnnnnnnnnnnnnnnnnnnnnnnnnnnnnnnnnnnnnnnnnnnnnnnnnnnnnnnnnnnnnnnnnnnnnnnnnnnnnnnnnnnnnnnnnnnnnnnnnnnnnnnnnnnnnnnnnnnnnnnnnnnnnnnnnnnnnnnnnnnnnnnnnnnnnnnnnnnnnnnnnnnnnnnnnnnnnnnnnnnnnnnnnnnnnnnnnnnnnnnnnnnnnnnnnnnnnnnnnnnnnnnnnnnnnnnnnnnnnnnnnnnnnnnnnnnnnnnnnnnnnnnnnnnnnnnnnnnnnnnnnnnnnnnnnnnnnnnnnnnnnnnnnnnnnnnnnnnnnnnnnnnnnnnnnnnnnnnnnnnnnnnnnnnnnnnnnnnnnnnnnnnnnnnnnnnnnnnnnnnnnnnnnnnnnnnnnnnnnnnnnnnnnnnnnnnnnnnnnnnnnnnnnnnnnnnnnnnnnnnnnnnnnnnnnnnnnnnnnnnnnnnnnnnnnnnnnnnnnnnnnnnnnnnnnnnnnnnnnnnnnnnnnnnnnnnnnnnnnnnnnnnnnnnnnnnnnnnnnnnnnnnnnnnnnnnnnnnnnnnnnnnnnnnnnnnnnnnnnnnnnnnnnnnnnnnnnnnnnnnnnnnnnnnnnnnnnnnnnnnnnnnnnnnnnnnnnnnnnnnnnnnnnnnnnnnnnnnnnnnnnnnnnnnnnnnnnnnnnnnnnnnnnnnnnnnnnnnnnnnnnnnnnnnnnnnnnnnnnnnnnnnnnnnnnnnnnnnnnnnnnnnnnnnnnnnnnnnnnnnnnnnnnnnnnnnnnnnnnnnnnnnnnnnnnnnnnnnnnnnnnnnnnnnnnnnnnnnnnnnnnnnnnnnnnnnnnnnnnnnnnnnnnnnnnnnnnnnnnnnnnnnnnnnnnnnnnnnnnnnnnnnnnnnnnnnnnnnnnnnnnnnnnnnnnnnnnnnnnnnnntcccaaaacggccaccacagccaaaggcagtggctcctggcagacaagtcggccgccagcccagggcgcctcatggccccctcaggccaagccgcccctcaaagcctgcacacagccaaggcctaactatgctgcgaacttcagtgtgatcggggcacgagaggagcggggggtccgcgcacccagcttt

SEQ ID NO: 26966 - DNA, 842 bp, Macaca Mulatta
  misc_feature (1)...(842): n = A,T,C or G
agattacaagcgccatggctatggctagtgttaaattggttgctggtgttttaagaaagccagatgcctggattggactctggggtgttctccgagggacacctgcgtcatacaaactctgtacttcctggaatcgatacttgtatttttctagtaccaagttacgtgcaccaaattataaaacacttttttatagtattttctcactgagactcccaggacttttactatctccagaatatatttttcctttttccataagactcaaaagtaatataagctctacaaaatctactaaaaagtctctgcataaagtagatgaagaggactctgatgaagaaagcgatcatgacgagatgagtgagcaggaagaggagcttgaggatgaccctactgtagtcaaagactataaagacctggaaaaagcagtgcagtcttttcggtatgatgttatcttgaagacggggctagatattgggagaaannnnnnnnnnnnnnnnnnnnnnnnnnnnnnnnnnnnnnnnnnnnnnnnnnnnnnnnnnnnnnnnnnnnnnnnnnnnnnnnnnnnnnnnnnnnnnnnnnnnnnnnnnnnnnnnnnnnnnnnnnnnnnnnnnnnnnnnnnnnnnnnnnnnnnnnnnnnnnnnnnnnnnnnnnnnnnnnnnnnnnnnnnnnnnnnnnnnnnnnnnnnnnnnnnnnnnnnnnnnnnnnnnnnnnnnnnnnnnnnnnnnnnnnnnnnnnnnnnnnnnnnnnnnnnnnnnnnnnnnnnnnnnnnnnnnnnnnnnnnnnnnnnnnnnnnnnnnnnncatttttattaaaataaagttctcttagcgtgtgtggaa

SEQ ID NO: 26967 - DNA, 131 bp, Macaca Mulatta
acccctgtgggcccagtgagctctcctgccaggcaggagggtgtaagggtgtgcagtggatgtgtgacatgtggagagactgcaccgatggcagcgacgacaactgcagccaccccttgttcccaccccca

SEQ ID NO: 26968 - DNA, 944 bp, Macaca Mulatta
gggggcctggccctcaacttctccgtgttctactatgagatccagaatgcacccgagcaagcctgcctcttagccaaacaagccttcgatgatgccatagctgagctggacacactaaacgaggattcctataaggactccacgctcatcatgcagttgctgcgagacaacctcaccctctggacgagcgaccagcaggatgaagaagcaggagaaggcaactgaagatccttcaggtcccctggcccttccttcacccaccacccccatcatcaccgattcttccttgccacaatcactaaatatctagtgctaaacctatctgtattggcagcacagctactcagatctgcactcctgtctcttgggaagcagtttcagataaatcatgggcattgctggactgacggttgctttgagcccacaggagctccctttttgaattgtgtggagaagtgtgttctgatgaggcattttactatgcctgttgatgtatgggaaatctaggcgaaagtaatgggggagattagaaagaattagccaacacaggctacagttgatgtttaaaagatccatttaaaacaagctgatagtgtttcgttaagcagtacatcttgtgcatgcaaaaatgaattcacccctcccacctctttcttcacctaatggaaaactgttaaagggaagctgaatacagagagacaaccttgctcccctttccatcaggcttttataaataaactgtttaacgtgaggtttcagtagcgccttgtatttgcctctttaaattatgacgtgcacaaaccttcttttcaatgcaatgcatctaaaagttttgataccttgtaacttttacgaggcacacgagtgcgagtgttcaagactcatgaattcatttcgtgtaactcttaggctattgtccttgtgtctcctgacagcgccatgtg

SEQ ID NO: 26969 - DNA, 426 bp, Macaca Mulatta
atgtgtgaatagagagtgagggataagtggaaaaagaatggggcacagtgaatactgtagtgggccagggctgtgatgagagtagaaggctgctagactccatgtttagttcttttcttgtattatgaaaagaataaatgatgtcctgaagctcagtgccaacagtctgtttagaatttgtggatctttgccctctggtagcctctggattgaacctggtgactgtgctgtctcctcacagaaccctgactcctgtcagtaaacttgacagtcttgaccctctggcctcatggtgactttgctgaaggacacaaagatgcttccaagttcatttgcttaagagaaggctgtgaaaaatctgaatttctatctctgactcattggaaatttggtgaattatccactcagattcctgagttaggaccc

SEQ ID NO: 26970 - DNA, 1176 bp, Macaca Mulatta
  misc_feature (1)...(1176): n = A,T,C or G
gggattttcctcaatgaaaatcaaatacaaggaggatcttgaacaaaaatgacagatacaaagtatttctatcctgagtagtaatctcacacttcatcctacggagtcaaccaccacagacaggaattcctnnnnnnnnnnnnnnnnnnnnnngaagacagagtctcactctgttgctnnnnnnnnnnnnnnnnnnngtgatctcatnnnnnnnnnnnnnnnnnnnnnnnnnnnnnnnnnnnnnntgtgcctcagtnnnnnnnnnnnnnnnnnnnnnnncatgcccgccatcatgcccagctaatatttgcatttttaatagagatatggtttcaccatgctggccacgctgctctccnnnnnnnnnnnnnnnnnnnnntgcccnnnnnnnnnnnnnnnnnnnnnnnnnnnnnnnatgtgaaccaccacgcctggctggaatacttactcttgttgggagaacgaaccactaaaatgtcagagcagaattcattatgtgataggtgtcttgtctgagaacaaatacaattcagtcttctctttggggctttagtatgtgtcaaacataggactggaagtttgcccttcttttttcttttgaaagaacatcagtttcttttgaaagaacaatcagagattgtgcattttgagaatagttttccccaatgtggatacagttcccagagttttcagcgagtacacaggtaagattagtttgaaacattgaaccttctatttatccctaatttccctttaatcaaaaccagcgtcctgtggggaaggagaaattgagaggagctttaaaatgaaaatggtaaaaatatgccttttattataaaaaaatacctgcctctcgtgtattgttctgaccctggtaaatatatttcaaaacttcagatgacaaggattagaaaactcattaaagatactattcttcnnnnnnnnnnnnnnnnnnnnnnnnnnnnnnnnnnnnnnnnnnnnnnnnnnnnnnnnnnnnnnnnnnnnnnnnnnnnnnnnnnnnnnnnnnnnnnnnnnncccctccgccccccgaaaacttttaaaaacaattctttggggccggggccccnttgggnagggaaacgcaattcgattgcgccgtataacaaacgcatnnnnnnnnnnnnnnnnnnnnnnnnnnnnnnnnnnncgcaaca

SEQ ID NO: 26971 - DNA, 749 bp, Macaca Mulatta
  misc_feature (1)...(749): n = A,T,C or G
tcgaggagaagtggggaccccatcctcatcaggagtcccagtgctgcatgcgnattatctacccacatccccgcggcacctcaccctctccacacacctctggctgtctttttgtactctttgttccagagctgcttctgtctggtttatttagggtttatccttccttttctttgagagttcgtgaagagggaagccaggattggggacctgatagagagtgagagcatgtgaggggtagtgggatggtggggtaccagccactggaggggtcatccttgcccattgggaccagagacctgggagagacttgcatgaggagtggttgggctgtgcctgaacctagcacggacacagtctgtcctgagagcactcctcagcaggcatggctggtgcctgaagaccccagatgtgagggcaccaccaagaatttgtggcctaccttgtgagggagagaactgagcatctccagcattctcagccacaacnnnnnnnnnnnnnnnnnnnnngccctccttaccactgtgcaagttccccaagggctttggggcatgagccggtgaagatgcaggtttgaccgggaaagcagcgctagtggagggttggaggaggaagtaaaggatgagggttcatcatccctccctgcctaaggaagctaaaagcatgggcctgctgtccctccctggctccacccacagtggagagggctacagaggaggacaaaacctctcaggctgtccaagctccca

SEQ ID NO: 26972 - DNA, 444 bp, Macaca Mulatta
cacagcaacacatgccatacttccggaagcggatggtctgggagatcctccaccgaaaactcttgtgaagactgtctcagttagcagaccttgaccatgtgggggaccagctctttgttgtctacagccagaggccttggaaacagctgctcccagccctctgttcttgtagcacccttgatcctggaccaggccctggtgagatgcattcacaagcacatctgcctttccttttgtatctcagatactatttttgcaaagaaactttggtgctgtgaaaggggtgagggacatccctaatctgaagagagactgcttttcacttcttcggttctgccatcttgttttcaaagggctccagcctcactcagtccctaattatgggactgagaaaagcttggaaagaatcttggtttcatagaaattcttgttgttaggccttac

SEQ ID NO: 26973 - DNA, 1336 bp, Macaca Mulatta
  misc_feature (1)...(1336): n = A,T,C or G
ccatgacttcctacagttatttccagtcgtcggctatgtcgtctgtcggaggcctgggcggcggctcggtgcgttttgggccgggggtcgcctttcgcgcgcccagcatgcacgggggctccggcggccgcggtgtgtccgtgtcctcttcccgcttcgtgtcttcgtcctcctccgggggctacggcggcggctactgcggcgtcctggccgcgaccgacgggctgcnnnnnnnnnnnnnnnnnnnnnnnnnnnnnnnnnnnnnnnnnnnnnnnnnnnnnnnnnnnnnnnnnnnnnnnnnnnnnnnnnnnnnnnnnnnnnnnnnnnnnnnnnnnnnnnnnnnnnnnnnnnnnnnnnnnnnnnnnnnnnnnnnnnnnnnnnnnnnnnnnnnnnnnnnnnnnnnnnnnnnnnnnnnnnnnagattcttggtgccaccattgagaactccaggattgtcctgcagatcgacaatgcccgtctagctgcagatgacttccgaaccaagnngtttgagaccgagcaagctctgcgtatgagcgtggaggccgacatcaacggcctgcgcagagtgctggatgagctgaccctggccaggactgacctggagatgcagattgaaggcctgaaggaagagctggcctacctgaagaagaaccatgaggagnnnnnnnnnnnnnnnnnnnnnnnnnnnnnnnnnnnnnnnnnnnnnnnnnnnnnnnnnnnnnnnnnnnnnnnnnnnnnnnnnnnnnnnnnnnnnnnnnnnnnnnnnnnnnnnnnnnnnnnnnnnnnnnnnnnnnnnnnnnnnnnnnnnnnnnnnnnnnnnnnnnnnnnnnnnnnnnnnnnnnnnnnnnnnnnnnnnnnnnnnnnnnnnnnnnnnnnnnnnnnnnnnnnnnnnnnnnnnnnnnnnnnnnnnnnnnnnnnnnnnnnnnnnnnnnnnnnnnnnnnnnnnnnnnnnnnnnnnnnnnnnnnnnactggcagaaaccgaggcgcgctttggagcccagctggcgcatatccaggcactgatcagtggtgttgaagcccagctgggtgatgtgcgagctgatagtgagcggcagaatcaggagtaccagcggctcatggacatcaagtcgcggctggagcaggagattgccacctaccgcagcctgctcgagggccaggaagatcactacaacaacctgtccgcctccaaggtcctctgaggcagcaggctctgggggcttctgctgtccttcggagggtgtctcctgggtaaggggatgggaagggagggacccttacccctggctcttcccctgaccttccaataaaattttattgtccaagggagga

SEQ ID NO: 26974 - DNA, 242 bp, Macaca Mulatta
tgcctcctgccatccacataagatgtgacttgctcctccttgtcttccactatgattttgaggcctcctcagccatgtggactagtaagtccaataaacctctttcttctgtaaattgcccagtctcagatgtcttcagcagcagcgtgaaaacggactaatacaacaagtaaatcactgaacatttaaacccagcagttctcttttttcaaacttctccccttgattttgtgtcagccctg

SEQ ID NO: 26975 - DNA, 882 bp, Macaca Mulatta
  misc_feature (1)...(882): n = A,T,C or G
agatcacaccatgcatccagccttgcgacagaggnnnnnnnnnnnnncnnnnnnnnnnnnnccaagcatagatccaaactgagacactgaggaggcctccttacagtagtcaggatcaggcgattgaagtaattctgtcctgtggggttcggcatcatgcacgttccccctgggccgttctcttgatacagggcacttgctccacattccgggaacccagattaaccagtctgccctgtcacgtagttgaaggagttgcatttatctttctggctctcagttcctttaaaattacttttgttgcagaacttccacaaggctaaataaaattacatttgtgaccatcagagaactgaaggaactattaactggctgtcctggttttgctgagatcaggctgttgacagttcctggttggcccacacctacccatgtcagttatctccactaacatctccaagaatctttgtaggacagtttctccacctgcaaggtctttcaaataaaactcttctttcctttaaggcaattagcccactgccaaaaggttttactgtcttaaagctggaactgtctttctgagatctaattccaaggacttctccacagctaagtgagatgcctcacaccagtattagatgattctttgtgtggacagaacagagcattttcaccttgtgtttaaagcaatgcgttggcttcggctcctcaccactttctatactagtctcccatttacgtccctagtaatgcctannnnnnnnnnnnnnnnnnnnctgatgatgaaacctacaggttttaagggctttaattctcaaacttttgtgttangagttaacaggaatgtgctgaaaagggcaagcaataaaaacaagtcatacc

SEQ ID NO: 26976 - DNA, 320 bp, Macaca Mulatta
cctgaatacagtaacttctgctactggcgggagccactgttcactctggaccttgataccctggactgaacctgccctggcttctcctccctggcccagcccagaactgactaggtgtaccggggtataggagggtgggagctggagtgccacggggcaaacccactgaaggggaagaagggggctgcaggttggttggagctagagagactcccccatcttccccgtcctgtttttgccagctaagctgcagatgctccaggcgtcagtgtggcactggcctggggcaattagtttgtcatctgggcccttgcagggtt

SEQ ID NO: 26977 - DNA, 654 bp, Macaca Mulatta
gcctctctagcctgtggccaaagttgtgttgcagcaggcaggctgcttggagcttcccatgaactggaaagctcatctccattgcatctttttcttggccttccagtccatcgatgtgtaagagtaggaaatatcgtgtcactggaggcctccatggcattgtgtagtgctcagaaccactgatctccggctgcaccgaaggcgggtccggagtgggaggctcagcctggagcggtggccccggagagggcacctcgatgcctgctctgacctgacccggagggcgaggccctccagcaggggacattccccggctgaacggaccccacagctctctcccatgcctgatttatgacatgaagaagtttttgccacaagtccgagagcaggcttgagttaggcagactgaagactaattttccttttctcccagttggtttctgctgcttcagaaaagtacaccttttccttatgggccagaggaagaggaagaccattttatcagtcactgaaaagagtcccctggcactgatgagcctgaagagaactatgctccttggggggtggggaaggaagacagggactgcagctatctcacactcagtggcctccagacaaactccagacaagcacagacctccccactaagagcag

SEQ ID NO: 26978 - DNA, 565 bp, Macaca Mulatta
gggagaccatactagggcgagtcctgtgtgactgatttcccagcccttccgttcagcctgtgccatccctggccccaagaccaggatcaaagtggctgcagcagagttagctgtctagcgcctagcaaggtgcctttgtacctcaggtgttttaggtgtgagatgtttcaatgaaccaaagttctgataccttgtttacattgtttgtttttatggcatttctatctattgtggctttaaccaaaaaataaaatgtccctgcgagaagccttaaagagccttacttggagtatttttaagactggaagcttttaccaggttcatcacttcctgtgcatcgcctccatgcaggcagagtctggatcatgaatgctttagtaacaaaacatcttgggtcttggatttgagacctggtttcaacacttgtgtctcctctaagtgtcagtgtccttttcgggaaagtagggtaaataatttctctttgtctcccagagaacatagcacacgtgttcatgattgtaatgctgttataatgtataatttattttaaaattttgagataagg

SEQ ID NO: 26979 - DNA, 795 bp, Macaca Mulatta
  misc_feature (1)...(795): n = A,T,C or G
aaaacctaggttaccaccaatggcatgggggttctatcaaggttaaaaacggggcatttggccacaaattcccaaaaacccntgaaaacaagccaccattcttcaacaatttgagcaaagataaaatgcctaagtaccaacatggatgacttgcaaaggatggcctctttactttaagcacnnnnnnnnnnnnnnnnnnnnnnnnnnnnngcacaaatggatgagtgtgttcagttatatacactgaattgaacctttggcactaggaatcagagcattttgtcatatagcattaacacgtattataaaagtgcgtagtgtcaaaggaatagaaccaccagcattcaaaagcagctttgtcaactaggcaataaaacactctacagcatatccctcctgttgtccatcattgaaaacactggcagcaaatttgaannnnnnnnnnnnnnnnnnnnnnnnnnnagctattaccccttttattttctctgtttaaaaatcaaacagaaaacaaacatcaattgttatacactaacatcttcaaagcacatcgtttgtacaagagatagactaagaacaaaaatgtgtttacggagatccaaacataagtgagtgagagtgcctctcacacagctttccgatggtactcaggaggagccacttcgtaatcgctggcactaaacaaagttgcagaattctttgccaggtactttaggaaatcatgaagataattgagtaataaagcaaggctcttctcatccagaggtgtataggccaacattgctccaattcgtaccc

SEQ ID NO: 26980 - DNA, 112 bp, Macaca Mulatta
tgccaaaaattctcctcttcaacttatagaatgcacctaataaagtaattagtcttgtgtcttacagtgtaaagttcattctttctcttaaggactccgcagtccggactgg

SEQ ID NO: 26981 - DNA, 811 bp, Macaca Mulatta
catttcatgttcttttaaaaacagaaatttgttatgtatcagtttgtaatggcaagctggtagactctaataaaagaatataattttgcacatctaagaaaacattttcaaaattgacatatcataatgttaatactgttagatactgcagaggatctcaagaaacagtaaagatccaaaaatgccatttttgggagtaccattcctggagaaattgacagaggttttatatatcacatcttctgaacattaagaatacttaacccctctaaagtatattattgttttattattgctttgcactttctcagccccatagagcttattaatttaatagttatatttttgagaatactaaacaatattagaaaatatcatatggtattaatgtgatttaattcatctgcttttatttcatagaaccgatcactgaaacagcttcacctagaagaacagaagactctttttataataacagctataatccctttaaagaggtgcagactccacagtatttgaacccattcgatgagccagaagcatttgtgaccataaaggattctcctccccagtctacaaaaagaaaaaatataagacctgtggacatgagcaagtacctctatgctgatagttctaaaactgaagaagaagagttggatgagtaagtacatttcattttgctatcatcacaagttagtctctatgttaactaaagagattcttttgtaatgtacctttagatgggtacaaatcattaatgtacactttataagtcagtatctaactcatccactatctgaatgtttatagt

SEQ ID NO: 26982 - DNA, 262 bp, Macaca Mulatta
tactgcaggaaggaacaatttacagcaatgagggatttgtacatgaaaaatggacaaggatttgcattagtttattccgtcacagcacagtccacttttaacgatttgtaagacctgagagagaacagattcttcgagttaaagacactgatgatgttccaatgattcttgttggtaataagtgtgacttggaagatgaaagagttgtagggaaggaacaaggtcaaaatctagcaagataatggaacaactgtgcattctt

SEQ ID NO: 26983 - DNA, 579 bp, Macaca Mulatta
agctgtgagacacagattacagcctatgctaattcaaaaatttttaataaaatgttccttatctcaaactagctggtcctaatggaccagtaaatactattcactctttcagcctcttctggcttcctctgtagaggctctaggttatgacaaagttagctgtgagtatgaaggaaatagaagtcaatgtccaatcgtggctcaactggaggaaagaaaacaatggactctgacgggaatcaaacaatagttagggaatgttctattttctcaaattccctactagctttctcaccctcctgtactagattgccaggtccctctagcctcagtagtgggaaagggagtcatttactgaacacctaccctgtcccattttacatacagctcacttaaatttcaccaagtaggcagccttcagcgtcacaggtgattgaatcaaagtaatttgccaggggccgccagcttcagcggagccaaagctggagcctaggcgtattaacctgagcccatgccttcatgtatcactgcacagtacagaatggcagcacatactgtgtgtagacatttttctgcaca

SEQ ID NO: 26984 - DNA, 238 bp, Macaca Mulatta
  misc_feature (1)...(238): n = A,T,C or G
aannnnnnnnnnnnnnnnnnnnnnnnnnnnnnnngccaatttctgagtttttctggtgtttctaaaaagccaattatttttaagagggttgttgtggtgggggggaagggggttagtttaaagttttgattttttatgtgtggggataacttggggataatttggagggagggtgtttaaagccaatcgatttntgtacatgtttgaagatgttgctgttactcagccgcgatggagg

SEQ ID NO: 26985 - DNA, 279 bp, Macaca Mulatta
aggttgaaaattctacccttaattcccaaagtacctcacttatgaaccagaatgcacaactcctaatccagcagtcttccttagaaaatgaaaatgaatcggtaatcaaagagcgagaagacctaaaatctctctatgattctctgatcaaagatcatgaaaagctggaacttcttcatgaacgtcaggcttcagagtatgaatctcttatctctaaacatggaactctgaagtctgcccacaaaaatcttgaggtggaacatagagaccttgaagacc

SEQ ID NO: 26986 - DNA, 768 bp, Macaca Mulatta
ggcatctacaacaagatgatttttgcacaagaatttttatatctttggctatctaagcccagccgtggtagttggattttcagcagcactaggatacagatactatggcacaaccaaagtatgttggcttagcacagaaaacaactttatttggagttttataggaccagcatgcctaatcattcttgttaatctcttggcttttggagttatcatatacaaagtttttcgtcacactgcagggttgaaaccagaagttagttgctttgagaacataaggtcttgtgcaagaggagccctcgctcttctgttccttcttggcaccacctggatctttggggttctccatgttgtgcacgcatcggtggttacagcttacctcttcacagtcagcaatgctttccaggggatgttcattttcttattcctgtgtgttttatctagaaagattcaagaagagtattaccgattgttcaaaaatgtcccctgttgttttggatgtttaaggtaaacacggagagtgatggataattacaactgcacaaaaataaaaattccaagctgtggatgaccaatgtataaaaatgactcatcaaattatccaattattaactactagacaaaaagtattttaaatcagtttctctgtttacagtataggaactgtagataataaggtaaaattatgtatcatatagatatagtatgctttttctacgtgaaatggttctgtcaaaaatagtattgcagatattttggaaagtaatt

SEQ ID NO: 26987 - DNA, 583 bp, Macaca Mulatta
  misc_feature (1)...(583): n = A,T,C or G
gaaatggcagccggtcaagcagatgacttcctccaggactatcttattgatcaacatccttcatagtgaagacctaggaaaggatgttgaattgaggtgtggtgatgccccggaaaaagttgggacccataacaaanggctgaaaggaatgttgctaaaagcataaccaatggcagtgatgatggagctcagccctctacctccacagctcaagagcaagatgacgttctcatagttgattcggatgaagaagattcttcaaataatgctgacatcagtgaagaagagagaagccgcaagaggaaattagatgagaaagagaatctcagtgcaaagaggtcacgtctagaacagaaggaagagcttgatgatgtcatagcattagattgaacagaaacgcctctaaacagaaccctcttactgtttagtttatctgggcagaaccagattgttatgtcctttgttccaaagggaaaaaattgacaccagtgacttgaaaattattctgctccctttgaaagcattctttttgctagaactgttagacacattgcagtatgctgtattgaaagtaggaatatag

SEQ ID NO: 26988 - DNA, 94 bp, Macaca Mulatta
ctcagtgtctccttccataaagtgcccagcaaatatctgagaaattcttttaaaatgacagtgcaaagtgccatttagaatcaccttggaatgt

SEQ ID NO: 26989 - DNA, 922 bp, Macaca Mulatta
  misc_feature (1)...(922): n = A,T,C or G
cagcctcaccgctgcactgaagcccagggctgtggagcagcctctctccttggacctcctctcggccctaaagagactgggcagagccttccaggaccatggttggactgaagccttcagacgtgcctcccaccatggctgtgaagttcctgggggcaggcacagcagcctgttttgctgacctccttacctttccactggacacagccaaggtccgcctgcannnnnnnnnnnnnnnnnnnnnnnnnnnnnnnnnnnnnnnnnnnnnnnnnnnnnnnnnnnnnnnnnnnnnnnnnnnnnnnnnnnnnnnnnnnnnnnnnnnnnnnnnnnnnnnnnnnnnnnnnnnnnnnnnnnnnnnnnnnnnnnnnnnnnnnnnnnnnnnnnnnnnnnnnnnnnnnnnnnnnnnnnnnnnnnnnnnnnnnnnnnnnnnnnnnnnnnnnnnnnnnnnnnnnnnnnnnnnnnnnnnnnnnnnnnnnnnnnnnnnnnnnnnnnnnnnnnnnnnnnnnnnnnnnnnnnnnnnnnnnnnnnnnnnnnnnnnnnnnnnnnnnnnnnnnnnnnnnnnnnnnnnnnnnnnnnnnnnnnnnnnnnnnnnnnnnnnnnnnnnnnnnnnnnnnnnnnnnnnnnnnnnnnnnnnnnnnnnnnnnnnnnnnnnnnnnnnnnnnnnnnnnnnnnnnnnnnnnnnnnnnnnnnnnnnnnnnnnnnnnnnnnnnnnnnnnnnnnnnnnnnnnnnnnnnnnnnnngacaacttcccctgccactttgcctctgccattggaacaaacttctgttccacagtggtggcctacccggtggatgtggtgaagacccggaaaaaaaactcacctccagaccagtacctcagccccctcgactgtatgataaagatggaggcccaggagggccccacagccttctacaaggg

SEQ ID NO: 26990 - DNA, 623 bp, Macaca Mulatta
ggggagtctcatctgcctccacccggctcagttcattatcactgttcctgtgctcgcggtcatcaattatagaccctataacatgcaccctgaagacagaatgttccagaccagagctgttatcttgagaaccctctccttggctttgctgctgagtctcggaggagctggggccatcaaggcagaccatgtatcaacttatgccacgtttgtacagacacatagaccaacaggggagtttatgtttgagtttgatgaagatgagatgttctatgtggatctggacaagaaggagaccgtctggcatctggaggagtttggccgagccttttcctttgaggctcagggcgggctggctaacattgctatattgaacaacaacttgaatatcacgatccggcgttccaactacactcaggccgccaatgatcctcctgaagctaccgggtttcccaatgaacctgtggagctgggcaaatccaacaccttcttttcctcattgaaaattctaccctccaatcgaccattaacgtcaatttcacggttcacctccctttgaattttctctataccttttcctccccatctcatttttttcaaactacctctctttcatccccttc

SEQ ID NO: 26991 - DNA, 4471 bp, Macaca Mulatta
  misc_feature (1)...(4471): n = A,T,C or G
actcttttctcccaaaaaatggaaactttttggaaacattacccaggnnnnnnnnnnnnnnnnnnnnnnnnnnnnnnnnnnnnnnnnnnnnnnnnnnnnnnnnnnnnnnnnnnnnnnnnnnnnnnnnnnnnnnnnnnnnnnnnnnnnnnnnnnnnnnnnnnnnnnnnnnnnnnnnnnnnnnnnnnnnnnnnnnnnnnnnnnnnnnnnnnnnnnnnnnnnnnnnnnnnnnnnnnnnnnnnnnnnnnnnnnnnnnnnnnnnnnnnnnnnnnnnnnnnnnnnnnnnnnnnnnnnnnnnnnnnnnnnnnnnnnnnnnnnnnnnnnnnnnnnnnnnnnnnnnnnnnnnnnnnnnnnnnnnnnnnnnnnnnnnnnnnnnnnnnnnnnnnnnnnnnnnnnnnnnnnnnnnnnnnnnnnnnnnnnnnnnnnnnnnnnnnnnnnnnnnnnnnnnnnnnnnnnnnnnnnnnnnnnnnnnnnnnnnnnnnnnnnnnnnnnnnnnnnnnnnnnnnnnnnnnnnnnnnnnnnnnnnnnnnnnnnnnnnnnnnnnnnnnnnnnnnnnnnnnnnnnnnnnnnnnnnnnnnnnnnnnnnnnnnnnnnnnnnnnnnnnnnnnnnnnnnnnnnnnnnnnnnnnnnnnnnnnnnnnnnnnnnnnnnnnnnnnnnnnnnnnnnnnnnnnnnnnnnnnnnnnnnnnnnnnnnnnnnnnnnnnnnnnnnnnnnnnnnnnnnnnnnnnnnnnnnnnnnnnnnnnnnnnnnnnnnnnnnnnnnnnnnnnnnnnnnnnnnnnnnnnnnnnnnnnnnnnnnnnnnnnnnnnnnnnnnnnnnnnnnnnnnnnnnnnnnnnnnnnnnnnnnnnnnnnnnnnnnnnnnnnnnnnnnnnnnnnnnnnnnnnnnnnnnnnnnnnnnnnnnnnnnnnnnnnnnnnnnnnnnnnnnnnnnnnnnnnnnnnnnnnnnnnnnnnnnnnnnnnnnnnnnnnnnnnnnnnnnnnnnnnnnnnnnnnnnnnnnnnnnnnnnnnnnnnnnnnnnnnnnnnnnnnnnnnnnnnnnnnnnnnnnnnnnnnnnnnnnnnnnnnnnnnnnnnnnnnnnnnnnnnnnnnnnnnnnnnnnnnnnnnnnnnnnnnnnnnnnnnnnnnnnnnnnnnnnnnnnnnnnnnnnnnnnnnnnnnnnnnnnnnnnnnnnnnnnnnnnnnnnnnnnnnnnnnnnnnnnnnnnnnnnnnnnnnnnnnnnnnnnnnnnnnnnnnnnnnnnnnnnnnnnnnnnnnnnnnnnnnnnnnnnnnnnnnnnnnnnnnnnnnnnnnnnnnnnnnnnnnnnnnnnnnnnnnnnnnnnnnnnnnnnnnnnnnnnnnnnnnnnnnnnnnnnnnnnnnnnnnnnnnnnnnnnnnnnnnnnnnnnnnnnnnnnnnnnnnnnnnnnnnnnnnnnnnnnnnnnnnnnnnnnnnnnnnnnnnnnnnnnnnnnnnnnnnnnnnnnnnnnnnnnnnnnnnnnnnnnnnnnnnnnnnnnnnnnnnnnnnnnnnnnnnnnnnnnnnnnnnnnnnnnnnnnnnnnnnnnnnnnnnnnnnnnnnnnnnnnnnnnnnnnnnnnnnnnnnnnnnnnnnnnnnnnnnnnnnnnnnnnnnnnnnnnnnnnnnnnnnnnnnnnnnnnnnnnnnnnnnnnnnnnnnnnnnnnnnnnnnnnnnnnnnnnnnnnnnnnnnnnnnnnnnnnnnnnnnnnnnnnnnnnnnnnnnnnnnnnnnnnnnnnnnnnnnnnnnnnnnnnnnnnnnnnnnnnnnnnnnnnnnnnnnnnnnnnnnnnnnnnnnnnnnnnnnnnnnnnnnnnnnnnnnnnnnnnnnnnnnnnnnnnnnnnnnnnnnnnnnnnnnnnnnnnnnnnnnnnnnnnnnnnnnnnnnnnnnnnnnnnnnnnnnnnnnnnnnnnnnnnnnnnnnnnnnnnnnnnnnnnnnnnnnnnnnnnnnnnnnnnnnnnnnnnnnnnnnnnnnnnnnnnnnnnnnnnnnnnnnnnnnnnnnnnnnnnnnnnnnnnnnnnnnnnnnnnnnnnnnnnnnnnnnnnnnnnnnnnnnnnnnnnnnnnnnnnnnnnnnnnnnnnnnnnnnnnnnnnnnnnnnnnnnnnnnnnnnnnnnnnnnnnnnnnnnnnnnnnnnnnnnnnnnnnnnnnnnnnnnnnnnnnnnnnnnnnnnnnnnnnnnnnnnnnnnnnnnnnnnnnnnnnnnnnnnnnnnnnnnnnnnnnnnnnnnnnnnnnnnnnnnnnnnnnnnnnnnnnnnnnnnnnnnnnnnnnnnnnnnnnnnnnnnnnnnnnnnnnnnnnnnnnnnnnnnnnnnnnnnnnnnnnnnnnnnnnnnnnnnnnnnnnnnnnnnnnnnnnnnnnnnnnnnnnnnnnnnnnnnnnnnnnnnnnnnnnnnnnnnnnnnnnnnnnnnnnnnnnnnnnnnnnnnnnnnnnnnnnnnnnnnnnnnntcctggatataagccatttttaaacatcattaagccacaactgcagaagctcagtgagataacttaagagcaggttcagccagatgccttccagccagtaactgtgggtaagactcctgaacagactagcccccgggcagaggagagcagaggctcctccagccatggaagcatcccccagggagaagctggaagcagcagtatggtcagccggaaagaggaggacacagcccaagcagaggaggaagaannnnnnnnnnnnnnnnnnnnnnnnnnnnnnnnnnnnnnnnnnnnnnnnnnnnnnnnnnnnnnnnnnnnnnnnnnnnnnnnnnnnnnnnnnnnnnnnnnnnnnnnnnnnnnnnnnnnnnnnnnnnnnnnnnnnnnnnnnnnnnnnnnnnnnnnnnnnnnnnnnnnnnnnnnnnnnnnnnnnnnnnnnnnnnnnnnnnnnnnnnnnnnnnnnnnnnnnnnnnnnnnnnnnnnnnnnnnnnnnnnnnnnnnnnnnnnnnnnnnnnnnnnnnnnnnnnnnnnnnnnnnnnnnnnnnnnnnnnnnnnnnnnnnnnnnnnnnnnnnnnnnnnnnnnnnnnnnnnnnnnnnnnnnnnnnnnnnnnnnnnnnnnnnnnnnnnnnnnnnnnnnnnnnnnnnnnnnnnnnnnnnnnnnnnnnnnnnnnnnnnnnnnnnnnnnnnnnnnnnnnnnnnnnnnnnnnnnnnnnnnnnnnnnnnnnnnnnnnnnnnnnnnnnnnnnnnnnnnnnnnnnnnnnnnnnnnnnnnnnnnnnnnnnnnnnnnnnnnnnnnnnnnnnnnnnnnnnnnnnnnnnnnnnnnnnnnnnnnnnnnnnnnnnnnnnnnnnnnnnnnnnnnnnnnnnnnnnnnnnnnnnnnnnnnnnnnnnnnnnnnnnnnnnnnnnnnnnnnnnnnnnnnnnnnnnnnnnnnnnnnnnnnnnnnnnnnnnnnnnnnnnnnnnnnnnnnnnnnnnnnnnnnnnnnnnnnnnnnnnnnnnnnnnnnnnnnnnnnnnnnnnnnnnnnnnnnnnnnnnnnnnnnnnnnnnnnnnnnnnnnnnnnnnnnnnnnnnnnnnnnnnnnnnnnnnnnnnnnnnnnnnnnnnnnnnnnnnnnnnnnnnnnnnnnnnnnnnnnnnnnnnnnnnnnnnnnnnnnnnnnnnnnnnnnnnnnnnnnnnnnnnnnnnnnnnnnnnnnnnnnnnnnnnnnnnnnnnnnnnnnnnnnnnnnnnnnnnnnnnnnnnnnnnnnnnnnnnnnnnnnnnnnnnnnnnnnnnnnnnnnnnnnnnnnnnnnnnnnnnnnnnnnnnnnnnnnnnnnnnnnnnnnnnnnnnnnnnnnnnnnnnnnnnnnnnnnnnnnnnnnnnnnnnnnnnnnnnnnnnnnnnnnnnnnnnnnnnnnnnnnnnnnnnnnnnnnnnnnnnnnnnnnnnnnnnnnnnnnnnnnnnnnnnnnnnnnnnnnnnnnnnnnnnnnnnnnnnnnnnnnnnnnnnnnnnnnnnnnnnnnnnnnnnnnnnnnnnnnnnnnnnnnnnnnnnnnnnnnnnnnnnnnnnnnnnnnnnnnnnnnnnnnnnnnnnnnnnnnnnnnnnnnnnnnnnnnnnnnnnnnnnnnnnnnnnnnnnnnnnnnnnnnngcctcttttctcatagtgcaattgtagtttagaaacaaaacttggtcctctctccttgctttttaaagtaaatggctagatttagttgtcttagccacgtttcctttgaagagaaactcaaaaccattttgaaactgcttagttcagaatgcatcaaagtatttaaaattaaagagttgggtaatttactatcatttactttttacattacaagtgcaataatatttcataaaataaaacttccgaatgggtggagtatgtgattattggtacctggtccttctggtgctatttttatttaagtctttatttcaaaccacctttccctgaatcttaagataatgttttgcatgtgagtacatgcagcccagcaagaaactaaacaactctcttctcctgtcctagtccattaaggagaagaaccagca

SEQ ID NO: 26992 - DNA, 6215 bp, Macaca Mulatta
  misc_feature (1)...(6215): n = A,T,C or G
atgtctgccagctcagaggagaggcccatggtgcccttcatagcgtcatccaggnnnnnnnnnnnnnnnnnnnnnnnnnnnnnnnnnnnnnnnnnnnnnnnnnnnnnnnnnnnnnnnnnnnnnnnnnnnnnnnnnnnnnnnnnnnnnnnnnnnnnnnnnnnnnnnnnnnnnnnnnnnnnnnnnnnnnnnnnnnnnnnnnnnnnnnnnnnnnnnnnnnnnnnnnggagacacatctgcctgctgtgtggtcactgagagtgacccagagcttttggtagaataccgggagagccgtgaatcagacctgggacctgctgggctagactctgcttcgctgtcagatgtagacactgtgaatcctgatgaagactccttcagtatcttgggggacgactcacccactgggcctgagagcctcctgcatgacctgcccccactcttcctgcacctcacgtgctccgtgcggctgcgtgggcagcacagctcagtacctgtgtgcagcctgcctacctgcctgggnnnnnnnnnnnnnnnnnnnnnnnnnnnnnnnnnnnnnnnnnnnnnnnnnnnnnnnnnnnnnnnnnnnnnnnnnnnnnnnnnnnnnnnnnnnnnnnnnnnnnnnnnnnnnnnnnnnnnnnnnnnnnnnnnnnnnnnnnnnnnnnnnnnnnnnnnnnnnnnnnnnnnnnnnnnnnnnnnnnnnnnnnnnnnnnnnnnnnnnnnnnnnnnnnnnnnnnnnnnnnnnnnnnnnnnnnnnnnnnnnnnnnnnnnnnnnnnnnnnnnnnnnnnnnnnnnnnnnnnnnnnnnnnnnnnnnnnnnnnnnnnnnnnnnnnnnnnnnnnnnnnnttgttggaagatgagatggtgggggcactccgaagagggggcatcccccagagccctgccctgcaccgcgcagctgcccatatccatagctctcctggacgctccacctgccttcgccaaactctgccactgagttttgtatttgggccagagcgttccctcacacaattcaaggagnnnnnnnnnnnnnnnnnnnnnnnnnnnnnnnnnnnnnnnnnnnnnnnnnnnnnnnnnnnnnnnnnnnnnnnnnnnnnnnnnnnnnnnnnnnnnnnnnnnnnnnnnnnnnnnnnnnnnnnnnnnnnnnnnnnnnnnnnnnnnnnnnnnnnnnnnnnnnnnnnnnnnnnnnnnnnnnnnnnnnnnnnnnnnnnnnnnnnnnnnnnnnnnnnnnnnnnnnnnnnnnnnnnnnnnnnnnnnnnnnnnnnnnnnnnnnnnnnnnnnnnnnnnnnnnnnnnnnnnnnnnnnnnnnnnnnnnnnnnnnnnnnnnnnnnnnnnnnnnnnnnnnnnnnnnnnnnnnnnnnnnnnnnnnnnnnnnnnnnnnnnnnnnnnnnnnnnnnnnnnnnnnnnnnnnnnnnnnnnnnnnnnnnnnnnnnnnnnnnnnnnnnnnnnnnnnnnnnnnnnnnnnnnnnnnnnnnnnnnnnnnnnnnnnnnnnnnnnnnnnnnnnnnnnnnnnnnnnnnnnnnnnnnnnnnnnnnnnnnnnnnnnnnnnnnnnnnnnnnnnnnnnnnnnnnnnnnnnnnnnnnnnnnnnnnnnnnnnnnnnnnnnnnnnnnnnnnnnnnnnnnnnnnnnnnnnnnnnnnnnnnnnnnnnnnnnnnnnnnnnnnnnnnnnnnnnnnnnnnnnnnnnnnnnnnnnnnnnnnnnnnnnnnnnnnnnnnnnnnnnnnnnnnnnnnnnnnnnnnnnnnnnnnnnnnnnnnnnnnnnnnnnnnnnnnnnnnnnnattatgctgctgatgagagctgtgcgccccgagggtacctggcagccacaatgcagtttgtccctggccatttctcctgtgacgttgtgtggggaactgtgatccgagtccattcacgcctcaaaatgggacccagcatgggggtctctcgggnnnnnnnnnnnnnnnnnnnnnnnnnnnnnnnnnnnnnnnnnnnnnnnnnnnnnnnnnnnnnnnnnnnnnnnnnnnnnnnnnnnnnnnnnnnnnnnnnnnnnnnnnnnnnnnnnnnnnnnnnnnnnnnnnnnnnnnnnnnnnnnnnnnnnnnnnnnnnnnnnnnnnnnnnnnnnnnnnnnnnnnnnnnnnnnnnnnnnnnnnnnnnnnnnnnnnnnnnnnnnnnnnnnnnnnnnnnnnnnnnnnnnnnnnnnnnnnnnnnnnnnnnnnnnnnnnnnnnnnnnnnnnnnnnnnnnnnnnnnnnnnnnnnnnnnnnnnnnnnnnnnnnnnnnnnnnnnnnnnnnnnnnnnnnnnnnnnnnnnnnnnnnnnnnnnnnnnnnnnnnnnnnnnnnnnnnnnnnnnnnnnnnnnnnnnnnnnnnnnnnnnnnnnnnnnnnnnnnnnnnnnnnnnnnnnnnnnnnnnnnnnnnnnnnnnnnnnnnnnnnnnnnnnnnnnnnnnnnnnnnnnnnnnnnnnnnnnnnnnnnnnnnnnnnnnnnnnnnnnnnnnnnnnnnnnnnnnnnnnnnnnnnnnnnnnnnnnnnnnnnnnnnnnnnnnnnnnnnnnnnnnnnnnnnnnnnnnnnnnnnnnnnnnnnnnnnnnnnnnnnnnnnnnnnnnnnnnnnnnnnnnnnnnnnnnnnnnnnnnnnnnnnnnnnnnnnnnnnnnnnnnnnnnnnnnnnnnnnnnnnnnnnnnnnnnnnnnnnnnnnnnnnnnnnnnnnnnnnnnnnnnnnnnnnnnnnnnnnnnnnnnnnnnnnnnnnnnnnnnnnnnnnnnnnnnnnnnnnnnnnnnnnnnnnnnnnnnnnnnnnnnnnnnnnnnnnnnnnnnnnnnnnnnnnnnnnnnnnnnnnnnnnnnnnnnnnnnnnnnnnnnnnnnnnnnnnnnnnnnnnnnnnnnnnnnnnnnnnnnnnnnnnnnnnnnnnnnnnnnnnnnnnnnnnnnnnnnnnnnnnnnnnnnnnnnnnnnnnnnnnnnnnnnnnnnnnnnnnnnnnnnnnnnnnnnnnnnnnnnnnnnnnnnnnnnnnnnnnnnnnnnnnnnnnnnnnnnnnnnnnnnnnnnnnnnnnnnnnnnnnnnnnnnnnnnnnnnnnnnnnnnnnnnnnnnnnnnnnnnnnnnnnnnnnnnnnnnnnnnnnnnnnnnnnnnnnnnnnnnnnnnnnnnnnnnnnnnnnnnnnnnnnnnnnnnnnnnnnnnnnnnnnnnnnnnnnnnnnnnnnnnnnnnnnnnnnnnnnnnnnnnnnnnnnnnnnnnnnnnnnnnnnnnnnnnnnnnnnnnnnnnnnnnnnnnnnnnnnnnnnnnnnnnnnnnnnnnnnnnnnnnnnnnnnnnnnnnnnnnnnnnnnnnnnnnnnnnnnnnnnnnnnnnnnnnnnnnnnnnnnnnnnnnnnnnnnnnnnnnnnnnnnnnnnnnnnnnnnnnnnnnnnnnnnnnnnnnnnnnnnnnnnnnnnnnnnnnnnnnnnnnnnnnnnnnnnnnnnnnnnnnnnnnnnnnnnnnnnnnnnnnnnnnnnnnnnnnnnnnnnnnnnnnnnnnnnnnnnnnnnnnnnnnnnnnnnnnnnnnnnnnnnnnnnnnnnnnnnnnnnnnnnnnnnnnnnnnnnnnnnnnnnnnnnnnnnnnnnnnnnnnnnnnnnnnnnnnnnnnnnnnnnnnnnnnnnnnnnnnnnnnnnnnnnnnnnnnnnnnnnnnnnnnnnnnnnnnnnnnnnnnnnnnnnnnnnnnnnnnnnnnnnnnnnnnnnnnnnnnnnnnnnnnnnnnnnnnnnnnnnnnnnnnnnnnnnnnnnnnnnnnnnnnnnnnnnnnnnnnnnnnnnnnnnnnnnnnnnnnnnnnnnnnnnnnnnnnnnnnnnnnnnnnnnnnnnnnnnnnnnnnnnnnnnnnnnnnnnnnnnnnnnnnnnnnnnnnnnnnnnnnnnnnnnnnnnnnnnnnnnnnnnnnnnnnnnnnnnnnnnnnnnnnnnnnnnnnnnnnnnnnnnnnnnnnnnnnnnnnnnnnnnnnnnnnnnnnnnnnnnnnnnnnnnnnnnnnnnnnnnnnnnnnnnnnnnnnnnnnnnnnnnnnnnnnnnnnnnnnnnnnnnnnnnnnnnnnnnnnnnnnnnnnnnnnnnnnnnnnnnnnnnnnnnnnnnnnnnnnnnnnnnnnnnnnnnnnnnnnnnnnnnnnnnnnnnnnnnnnnnnnnnnnnnnnnnnnnnnnnnnnnnnnnnnnnnnnnnnnnnnnnnnnnnnnnnnnnnnnnnnnnnnnnnnnnnnnnnnnnnnnnnnnnnnnnnnnnnnnnnnnnnnnnnnnnnnnnnnnnnnnnnnnnnnnnnnnnnnnnnnnnnnnnnnnnnnnnnnnnnnnnnnnnnnnnnnnnnnnnnnnnnnnnnnnnnnnnnnnnnnnnnnnnnnnnnnnnnnnnnnnnnnnnnnnnnnnnnnnnnnnnnnnnnnnnnnnnnnnnnnnnnnnnnnnnnnnnnnnnnnnnnnnnnnnnnnnnnnnnnnnnnnnnnnnnnnnnnnnnnnnnnnnnnnnnnnnnnnnnnnnnnnnnnnnnnnnnnnnnnnnnnnnnnnnnnnnnnnnnnnnnnnnnnnnnnnnnnnnnnnnnnnnnnnnnnnnnnnnnnnnnnnnnnnnnnnnnnnnnnnnnnnnnnnnnnnnnnnnnnnnnnnnnnnnnnnnnnnnnnnnnnnnnnnnnnnnnnnnnnnnnnnnnnnnnnnnnnnnnnnnnnnnnnnnnnnnnnnnnnnnnnnnnnnnnnnnnnnnnnnnnnnnnnnnnnnnnnnnnnnnnnnnnnnnnnnnnnnnnnnnnnnnnnnnnnnnnnnnnnnnnnnnnnnnnnnnnnnnnnnnnnnnnnnnnnnnnnnnnnnnnnnnnnnnnnnnnnnnnnnnnnnnnnnnnnnnnnnnnnnnnnnnnnnnnnnnnnnnnnnnnnnnnnnnnnnnnnnnnnnnnnnnnnnnnnnnnnnnnnnnnnnnnnnnnnnnnnnnnnnnnnnnnnnnnnnnnnnnnnnnnnnnnnnnnnnnnnnnnnnnnnnnnnnnnnnnnnnnnnnnnnnnnnnnnnnnnnnnnnnnnnnnnnnnnnnnnnnnnnnnnnnnnnnnnnnnnnnnnnnnnnnnnnnnnnnnnnnnnnnnnnnnnnnnnnnnnnnnnnnnnnnnnnnnnnnnnnnnnnnnnnnnnnnnnnnnnnnnnnnnnnnnnnnnnnnnnnnnnnnnnnnnnnnnnnnnnnnnnnnnnnnnnnnnnnnnnnnnnnnnnnnnnnnnnnnnnnnnnnnnnnnnnnnnnnnnnnnnnnnnnnnnnnnnnnnnnnnnnnnnnnnnnnnnnnnnnnnnnnnnnnnnnnnnnnnnnnnnnnnnnnnnnnnnnnnnnnnnnnnnnnnnnnnnnnnnnnnnnnnnnnnnnnnnnnnnnnnnnnnnnnnnnnnnnnnnnnnnnnnnnnnnnnnnnnnnnnnnnnnnnnnnnnnnnnnnnnnnnnnnnnnnnnnnnnnnnnnnnnnnnnnnnnnnnnnnnnnnnnnnnnnnnnnnnnnnnnnnnnnnnnnnnnnnnnnnnnnnnnnnnnnnnnnnnnnnnnnnnnnnnnnnnnnnnnnnnnnnnnnnnnnnnnnnnnnnnnnnnnnnnnnnnnnnnnnnnnnnnnnnnnnnnnnnnnnnnnnnnnnnnnnnnnnnnnnnnnnnnnnnnnnnnnnnnnnnnnnnnnnnnnnnnnnnnnnnnnnnnnnnnnnnnnnnnnnnnnnnnnnnnnnnnnnnnnnnnnnnnnnnnnnnnnnnnnnnnnnnnnnnnnnnnnnnnnnnnnnnnnnnnnnnnnnnnnnnnnnnnnnnnnnnnnnnnnnnnnnnnnnnnnnnnnnnnnnnnnnnnnnnnnnnnnnnnnnnnnnnnnnnnnnnnnnnnnnnnnnnnnnnnnnnnnnnnnnnnnnnnnnnnnnnnnnnnnnnnnnnnnnnnnnnnnnnnnnnnnnnnnnnnnnnnnnnnnnnnnnnnnnnnnnnnnnnnnnnnnnnnnnnnnnnnnncctttgaccatggtcagccacctgtgtcccttgatccctcgggtcttcacctcccacttggacatcactgctggacattcccattgagatgacaactgggttccaatcccagctttgcctttgaagcacctgtggccactgtcaagtccctttgctctcagaccctgggtttctcatcctttaatgagaaggtgggctcagaagctctcccacctccacagcaaccctggcactggcttctcaatgggagggaagcaacagagaaactgaagtgttagacactatgtgtccccccaccccataacagagacata

SEQ ID NO: 26993 - DNA, 776 bp, Macaca Mulatta
  misc_feature (1)...(776): n = A,T,C or G
gtccttcagtgctgaccagattgctnnnnnnnnnnnnnnnnnnnnnnnnnnnnnnnnnnnnnnnnnnnnnnnnnnnnnnnnnnnnnnnnnnnnnnnnnnnnnnnnnnnnnnnnnnnnnnnnnnnnnnnnnnnnnnnnnnnnnnnnnnnnnnnnnnnnnnnnnnnnnnnnnnnnnnnnnnnnnnnnnnnnnnnnnnnnnnnnnnnnnnnnnnnnnnnnnnnnnnnnnnnnnnnnnnnnnnnnnnnnnnnnnnnnnnnnnnnnnnnnnnnnnnnnnnnnnnnnnnnnnnnnnnnnnnnnnnnnnnnnnnnnnnnnnnnnnnnnnnnnnnnnnnnnnnnnnnnnnnnnnnnnnnnnnnnnnnnnnnnnnnnnnnnnnnnnnnnnnnnnnnnnnnnnnnnnnnnnnnnnnnnnnnnnnnnnnnnnnnnnnnnnnnnnnnnnnnnnnnnnnnnnnnnnnnnnnnnnnnnaacaagcattgtttaggaagactggctggaaatttattttaatcacacccatgacaaactctccagatctgtttaccatcattcagaaaaacaaagcaatctgggactgttcaagactgagcaactccctgaatttttatacatcttcagtttttctctgaattgtattcataccacacaaagtatctgctgctctagacgagaagaataaaatattgacaatctcaaatccaagcaccattctttattatctactatgaatcaacaaacattcttaaaacaataaatcaataaacaattttggtcagtctg

SEQ ID NO: 26994 - DNA, 595 bp, Macaca Mulatta
atgtgaggtgataaatatgcgtaccatcagaccaatggacatggaaaccatagaagccagtgtcatgaagacaaatcatctcgtaactgtggaaggaggctggccacagtttggagtaggagctgaaatctgtgccaggatcatggaaggtcctgcgttcaatttcctggatgctcctgctgttcgtgtcactggtgctgacgtccctatgccttatgcaaagattctagaagacaactctatacctcaggtcaaagacatcatatttgcaataaagaaaacattaaatatttagtttggacttgagtatcaagtcgttgaaatttatttgaaatacttgctggcactgcacttgtactggaagaactgactactcataaaggaaaacgatttctaaagcaacagcaggtgtttttgtacagagaagtttaaatgtgtttgtgtggggaaacctctccactctcctgccctagatgccatgcttccttttgtctgttacagttgccacgttctttgaataacaaattatataacattttaccctgtctcaccacaaggaccaagtatggatgtggcagagtcctgatgaaagata

SEQ ID NO: 26995 - DNA, 633 bp, Macaca Mulatta
actcataaatttaaaccagtgtatttttttagaactggtttgtgtatatatatagtgattatggatactaattcaatgtaatttataattttctatgtcaatataaaaatacatcatagccttctcaaacagctgaagcaatatattgtatattgccatatcgtctggtgaaagggttaaattacttcacctcttgcacttttagatgcaaatcagtttttcatttctgtaatagaaaattattcacgtatttttacatcatttgtttttcctgaccagtatttaaaaccaaaaggatattctgaaaaatggccaacaatttttttagaaatagcatcccaagcagcgtgcctaaacattacattgcatatggaaataaaagaatcaaacgtctaatgccttatttctgatttcctttttcatttgaagtggtgtagagactccagcactcacaggacagtggagtcagcagtaagccctgggacaggtggcaagagtggctcccttgacctttgcacgcctcctgaggaacccactttcccgggtgagctcctctctgaagagactgtcctcgggcctcctctggaatcggcactgccagaggacagggctcctcctgcttgcctcaggact

SEQ ID NO: 26996 - DNA, 246 bp, Macaca Mulatta
caaggttggacctgaacaggagctcacggctcagcaggccactctggtcctccagtacatttaaaagtttcctttctaggtgtggaccttatgcattttccctttgttttctggacctggtagtcaaataaaagctatgctcacaagtggcttgctcatcattagttcagaggccaaacacataattttgtttctatttcagatgctactttgctaggttgtgactctgaaatgggttagtaaaga

SEQ ID NO: 26997 - DNA, 317 bp, Macaca Mulatta
tttattttattatcatttcctctgaatactattcagtttaatattaggaattcaaagtaacaaccaaaaattatttgacattattaaaatagatgataactgttcaaaaattgattttttataagttaagtaattgttttccacaattaaaaagtttccaagatttaaattactatttgagttattagttagaaatccttatataattatattcccactagtagatatatttgggctttgcaaaatttttgcatattctttcaactcatacctagcttttatttgttaagatgtacagtgtttatcaagtttatttc

SEQ ID NO: 26998 - DNA, 421 bp, Macaca Mulatta
tgtctctggacatcttcagcccagaatctttttaggagcaaaggcttcctgatgcctcattcatgtcaagaaaggaggccaggagccatcctgtgttccgatgactgaggcagtgactacgagggcaggacaatgccgtgagaaacacttcatggtgacagagtccaacccagctgggaacggctgcaatggggaagctctggagcattttgtgagcaccgtctcggtggatggaaaagccaaagtctgcccctctcctactggggacactaaaccccctccctgggttgacctcacagacattgaagtgagtctgcccacaaaggaaaagaggccacagaccgccatgaagacatccactaggtaccagaaggaaagttgaggggccaaaaaagacaataaaaggtatctggagaggtca

SEQ ID NO: 26999 - DNA, 4437 bp, Macaca Mulatta
  misc_feature (1)...(4437): n = A,T,C or G
tcctctctttattttagctggaccagaccaattttgaggaaaggatacagacagcgcctggaattgtcagatatataccaaatcccttctgctgattctgctgacaatctatctgaaaaattggaaangagaatgggatagagagctggcttcaaagaaaaatcccaaactcattaatgcccttcggcgatgctttttctggagatttatgttctatggaatcttgttatatttaggggnggaagtcaccaaagcagtacagcctctcttactgggaagaatcatagcttcctatgacccggataacaaggaggaacgctctattgcgatttatctaggcataggcttatgccttctctttatcgtgaggacactgctcttacacccagccatttttggccttcatcacattggaatgcagatgagaatagctatgtttagtttgatttataagaagnagactttaaagctgtcaagccgtgttctagataaaataagtattggacaacttgttagtctcctttccaacaacctgaacaaatttgatgaagnggacttgcattggcacatttcgtgtggatcgttcctctgcaagtggcactcctcatggggctaatctgggagttgttacaggcctctgccttctgtggacttggtttcctgatagtccttgccctttttcaggctgggctagggagaatgatgatgaagtacagnnnnnnnnnnnnnnnnnnnnnnnnnnnnnnnnnnnnnnnnnnnnnnnnnnnnnnnnnnnnnnnnnnnnnnnnnnnnnnnnnnnnnnnnnnnnnnnnnnnnnnnnnnnnnnnnnnnnnnnnnnnnnnnnnnnnnnnnnnnnnnnnnnnnnnnnnnnnnnnnnnnnnnnnnnnnnnnnnnnnnnnnnnnnnnnnnnnnnnnnnnnnnnnnnnnnnnnnnnnnnnnnnnnnnnnnnnnnnnnnnnnnnnnnnnnnnnnnnnnnnnnnnnnnnnnnnnnnnnnnnnnnnnnnnnnnnnnnnnnnnnnnnnnnnnnnnnnnnnnnnnnnnnnnnnnnnnnnnnnnnnnnnnnnnnnnnnnnnnnnnnnnnnnnnnnnnnnnnnnnnnnnnnnnnnnnnnnnnnnnnnnnnnnnnnnnnnnnnnnnnnnnnnnnnnnnnnnnnnnnnnnnnnnnnnnnnnnnnnnnnnnnnnnnnnnnnnnnnnnnnnnnnnnnnnnnnnnnnnnnnnnnnnnnnnnnnnnnnnnnnnnnnnnnnnnnnnnnnnnnnnnnnnnnnnnnnnnnnnnnnnnnnnnnnnnnnnnnnnnnnnnnnnnnnnnnnnnnnnnnnnnnnnnnnnnnnnnnnnnnnnnnnnnnnnnnnnnnnnnnnnnnnnnnnnnnnnnnnnnnnnnnnnnnnnnnnnnnnnnnnnnnnnnnnnnnnnnnnnnnnnnnnnnnnnnnnnnnnnnnnnnnnnnnnnnnnnnnnnnnnnnnnnnnnnnnnnnnnnnnnnnnnnnnnnnnnnnnnnnnnnnnnnnnnnnnnnnnnnnnnnnnnnnnnnnnnnnnnnnnnnnnnnnnnnnnnnnnnnnnnnnnnnnnnnnnnnnnnnnnnnnnnnnnnnnnnnnnnnnnnnnnnnnnnnnnnnnnnnnnnnnnnnnnnnnnnnnnnnnnnnnnnnnnnnnnnnnnnnnnnnnnnnnnnnnnnnnnnnnnnnnnnnnnnnnnnnnnnnnnnnnnnnnnnnnnnnnnnnnnnnnnnnnnnnnnnnnnnnnnnnnnnnnnnnnnnnnnnnnnnnnnnnnnnnnnnnnnnnnnnnnnnnnnnnnnnnnnnnnnnnnnnnnnnnnnnnnnnnnnnnnnnnnnnnnnnnnnnnnnnnnnnnnnnnnnnnnnnnnnnnnnnnnnnnnnnnnnnnnnnnnnnnnnnnnnnnnnnnnnnnnnnnnnnnnnnnnnnnnnnnnnnnnnnnnnnnnnnnnnnnnnnnnnnnnnnnnnnnnnnnnnnnnnnnnnnnnnnnnnnnnnnnnnnnnnnnnnnnnnnnnnnnnnnnnnnnnnnnnnnnnnnnnnnnnnnnnnnnnnnnnnnnnnnnnnnnnnnnnnnnnnnnnnnnnnnnnnnnnnnnnnnnnnnnnnnnnnnnnnnnnnnnnnnnnnnnnnnnnnnnnnnnnnnnnnnnnnnnnnnnnnnnnnnnnnnnnnnnnnnnnnnnnnnnnnnnnnnnnnnnnnnnnnnnnnnnnnnnnnnnnnnnnnnnnnnnnnnnnnnnnnnnnnnnnnnnnnnnnnnnnnnnnnnnnnnnnnnnnnnnnnnnnnnnnnnnnnnnnnnnnnnnnnnnnnnnnnnnnnnnnnnnnnnnnnnnnnnnnnnnnnnnnnnnnnnnnnnnnnnnnnnnnnnnnnnnnnnnnnnnnnnnnnnnnnnnnnnnnnnnnnnnnnnnnnnnnnnnnnnnnnnnnnnnnnnnnnnnnnnnnnnnnnnnnnnnnnnnnnnnnnnnnnnnnnnnnnnnnnnnnnnnnnnnnnnnnnnnnnnnnnnnnnnnnnnnnnnnnnnnnnnnnnnnnnnnnnnnnnnnnnnnnnnnnnnnnnnnnnnnnnnnnnnnnnnnnnnnnnnnnnnnnnnnnnnnnnnnnnnnnnnnnnnnnnnnnnnnnnnnnnnnnnnnnnnnnnnnnnnnnnnnnnnnnnnnnnnnnnnnnnnnnnnnnnnnnnnnnnnnnnnnnnnnnnnnnnnnnnnnnnnnnnnnnnnnnnnnnnnnnnnnnnnnnnnnnnnnnnnnnnnnnnnnnnnnnnnnnnnnnnnnnnnnnnnnnnnnnnnnnnnnnnnnnnnnnnnnnnnnnnnnnnnnnnnnnnnnnnnnnnnnnnnnnnnnnnnnnnnnnnnnnnnnnnnnnnnnnnnnnnnnnnnnnnnnnnnnnnnnnnnnnnnnnnnnnnnnnnnnnnnnnnnnnnnnnnnnnnnnnnnnnnnnnnnnnnnnnnnnnnnnnnnnnnnnnnnnnnnnnnnnnnnnnnnnnnnnnnnnnnnnnnnnnnnnnnnnnnnnnnnnnnnnnnnnnnnnnnnnnnnnnnnnnnnnnnnnnnnnnnnnnnnnnnnnnnnnnnnnnnnnnnnnnnnnnnnnnnnnnnnnnnnnnnnnnnnnnnnnnnnnnnnnnnnnnnnnnnnnnnnnnnnnnnnnnnnnnnnnnnnnnnnnnnnnnnnnnnnnnnnnnnnnnnnnnnnnnnnnnnnnnnnnnnnnnnnnnnnnnnnnnnnnnnnnnnnnnnnnnnnnnnnnnnnnnnnnnnnnnnnnnnnnnnnnnnnnnnnnnnnnnnnnnnnnnnnnnnnnnnnnnnnnnnnnnnnnnnnnnnnnnnnnnnnnnnnnnnnnnnnnnnnnnnnnnnnnnnnnnnnnnnnnnnnnnnnnnnnnnnnnnnnnnnnnnnnnnnnnnnnnnnnnnnnnnnnnnnnnnnnnnnnnnnnnnnnnnnnnnnnnnnnnnnnnnnnnnnnnnnnnnnnnnnnnnnnnnnnnnnatgcgatctgtgagccgagtctttaagttcattgacatgccaacagaagaaggtaaacctaccaggtcaaccaaaccatacaagaatggccaactctcgaaagttatggttattgagaattcacacgtgaagaaagatgacatctggccctcgggggggccaaatgacggtcaaagatctcacagcaaaatacacagaaggtggaaatcccatattagagaacatttccttctcaataagtcctggccagagggtgnggtgggcctcttgggaagaactggatcagggaagagtactttgttatcagcttttttgagactactgaacactgaaggagaaatccagatcgatggtgtgtcttgggattcaataactttgcaacagtggaggaaagcctttggagtgataccacagnagaaagtatttatcttttctggaacatttagaaaaaacttggatccctatgaacagtggagtgatcaagaaatatggaaagttgcagatgaggtnaggttgggctcagatctgtgatagaacagtttcctgggaagcttgactttgtccttgtggatgggggctgtgtcctaagccatggccacaagcagttgatgtgtttggctagatctgttctcagtaaggcgaagatcttgctgcttgatgaacccagtgctcatttggatccagtnaacataccagataattagaagaactctaaaacaagcatttgctgactgcacagtaatcctctgtgaacacaggatagaagcaatgctggaatgccaacaatttttggtnggtcatagaagagaacaaagtgcggcagtatgattccatccagaaactgctgaatgagaggagcctcttccggcaagccatcagcccctccgacagggtgaagctctttccccaccggaactcaagcaagtgcaagactcagccccaaattgctgctctgaaagaggagacagaagaagaggtgcaagatacaaggctttag

SEQ ID NO: 27000 - DNA, 352 bp, Macaca Mulatta
tatttatgaaagtaaaggagtctccaaggaccctttaacaaagaggaatgcaaagtaggtattaatcttttacagggtgtaaaaaacgttgcaggtacttctgacacccctacttttccatccctacacactcttccatttattatggcatacaaaaactcaacacttctttggctcttgagagtttccagtcttcagtagtccactactaacgtagtaatagtacaatgattccttatttgctacatattatagcagttcataatgcttaaataatttttttcacacacaatgttactgaatcatctattcaggacaggaaggcaaatggaaatactaaaccgtccctcac

SEQ ID NO: 27001 - DNA, 765 bp, Macaca Mulatta
  misc_feature (1)...(765): n = A,T,C or G
gggggtcctccaccaccagtcaggcactttctactgccatgaatccactcctgatccttacctttgtgggagctgctgttgctgccccctttgacgatgatgacaagatcgttgggggctacacctgtgggaagaattctctcccctaccaggtgtccctgaattctggctaccacttctgcggtggctccctcattaacaaccagtgggtggtgtcagcaggtcactgctacaagacccgcatccaggtgagactgggagagcacaacatcgaagtcctggagggaactgagcagttcatcaatgcagccaagatcatccgccaccccaattataacaggaatactctgaacaatgacatcctgctgatcaagctctcctcacctgccgtcatcaatgcccgtgtgtccaccatctctctgcccaccgcccctccagctgctggcgccaagtgtctcatctctggctggngcaacactctgagctctggtatcgactacccagatgagctgcagtgcctggaagctcctgtactgacccaggctaagtgtgaagcctcctaccctggaaaagaataccagcaacatgttctgtgccgggcttccttgagggaggcaaggattcctgcccagggtgactctggtggccctgttgtctccaacggacaactccaagaaatgttctcctggggccgatggctgtgtcccaaaaaaacaaaccttggagtctacccccaaggtctacaactaatttggacctggaatt

SEQ ID NO: 27002 - DNA, 1883 bp, Macaca Mulatta
  misc_feature (1)...(1883): n = A,T,C or G
ggaaacaagcctccaggtctgcttccccgcaaaggacaatacatggcaaatgacataaagctcctgagacaccatttccagattcccatccagttccccaaggatttcttttctgtgattattgaaaaaggnaggaagtttgtctgccatgcgtttcctcaccgcggtgagcttagagcatccagagatgctggagaaagcgtcccgggagctgtggatgcgcgtctggtcaaggnatgaagacatcacccagccccagagcatcctggcggnnnnnnnnnnnnnnnnnnnnnnnnnnnnnnnnnnnnnnnnnnnnnnnnnnnnnnnnnnnnnnnnnnnnnnnnnnnnnnnnnnnnnnnnnnnnnnnnnnnnnnnnnnnnnnnnnnnnnnnnnnnnnnnnnnnnnnnnnnnnnnnnnnnnnnnnnnnnnnnnnnnnnnnnnnnnnnnnnnnnnnnnnnnnnnnnnnnnnnnnnnnnnnnnnggagagaagtggatgggccctgtgcctccagctgtgaatgccagactttaagattgcccggaggaagcaaactcttcgtataaaaacagcaggccatctgctgaaccccagctccaccataaggcactgggacttggatttctctatctgatagannnnnnnnnnnnnnnnnnnnnnnnnnnnnnnnnnnnnnnnnnnnnnnnnnnnnnnnnnnnnnnnnnnnnnnnnnnnnnnnnnnnnnnnnnnnnnnnnnnnnnnnnnnnnnnnnnnnnnnnnnnnnnnnnnnnnnnnnnnnnnnnnnnnnnnnnnnnnnnnnnnnnnnnnnnnnnnnnnnnnnnnnnnnnnnnnnnnnnnnnnnnnnnnnnnnnnnnnnnnnnnnnnnnnnnnnnnnnnnnnnnnnnnnnnnnnnnnnnnnnnnnnnnnnnnnnnnnnnnnnnnnnnnnnnnnnnnnnnnnnnnnnnnnnnnnnnnnnnnnnnnnnnnnnnnnnnnnnnnnnnnnnnnnnnnnnnnnnnnnnnnnnnnnnnnnnnnnnnnnnnnnnnnnnnnnnnnnnnnnnnnnnnnnnnnnnnnnnnnnnnnnnnnnnnnnnnnnnnnnnnnnnnnnnnnnnnnnnnnnnnnnnnnnnnnnnnnnnnnnnnnnnnnnnnnnnnnnnnnnnnnnnnnnnnnnnnnnnnnntgaaacctcacttggacccattgtcgggaaccaagtacaaagccttacatagaccagaggagtttcaggagtcatgccaccttctcttctatctctccctctgggtctggctcttcccatactccattttccccttttatctcccattactttctgtcttcctctctcacctttcccatatctgtagcatcctccaggatttaaaatcaactttagccagcttatctgtgacaaaagaacatctccagattaagtactccttttatttcaaaggagtttcatgtacaactactgtaaaataaaaatataggaagatgtccaatcttaaaaatcataaggacaaattgagacaaaactaagcttcccagagcagggtgagtggaaccagttttatgaataaagatgcttgtctcagcactatttgttgatatcaaaaattgtaaacaacttaaacacctattaggaggagaataataaatcatgacagattcaggagataatgttttacagccatcaaaaattgtattttttgagggctggcatggtggctcacacctataatgccaagcactttgggaggccaaggcgggtggatcacctgaggtcaggagttcgagaccaacctggctaacatggtaaaaccctgtttctactanaaatacaaaaaattaaccgggcatggtggcacgtgctgttaatcccagctactcgggaggctgaagcagga

SEQ ID NO: 27003 - DNA, 549 bp, Macaca Mulatta
tattcctggtttcttctcttgagaggattgttataaggaagaacattgagcagggaggaagacctaagtgtttctttctagtaatttacctggagtaatttctaatgttttgtgaacattcaataatatttctaatgctttattattattatttatgttgttacttaattaaaaaaaaacagtactagtgaatgccaaactgcactttcacgatcaaattttgatacctttttgcttatcttaaagccttaacgaaagacagtcctcccatagagcctgggcttctcacagctgagacattttcttggaaatctctgaaaccaggcaatcctgttctgaagattcacacatatgctaccaaggctacagtggttcgtctgcctgttgggtaggaagtgacttcatttttcccataataaaaatggtttgaagcattgcaaattgttggttactaaagaagtaaacaatatagactctaagatattgtttcttaaagtaatttctcaaggcataggtctatcattattattcttgagaaaaataattcca

SEQ ID NO: 27004 - DNA, 2240 bp, Macaca Mulatta
  misc_feature (1)...(2240): n = A,T,C or G
agatgagccaacgcgctctcttagcggcctcatcctcaagaacaacgtgaaggcgcactatcagagcttcccaccccctgtggcagacttcatcaaacaggagtgtctcaacaacattggcgacgcctcctcgctcatccgagccacgattgnnnnnnnnnnnnnnnnnnnnnnnnnnnnnnnnnnnnnnnnnnnnnnnnnnnnnnnnnnnnnnnnnnnnnnnnnnnnnnnnnnnnnnnnnnnnnnnnnnnnnnnnnnnnnnnnnnnnnnnnnnnnnnnnnnnnnnnnnnnnnnnnnnnnnnnnnnnnnnnnnnnnnnnnnnnnnnnnnnnnnnnnnnnnnnnnnnnnnnnnnnnnnnnnnnnnnnnnnnnnnnnnnnnnnnnnnnnnnnnnnnnnnnnnnnnnnnnnnnnnnnnnnnnnnnnnnnnnnnnnnnnnnnnnnnnnnnnnnnnnnnnnnnnnnnnnnnnnnnnnnnnnnnnnnnnnnnnnnnnnnnnnnnnnnnnnnnnnnnnnnnnnnnnnnnnnnnnnnnnnnnnnnnnnnnnnnnnnnnnnnnnnnnnnnnnnnnnnnnnnnnnnnnnnnnnnnnnnnnnnnnnnnnnnnnnnnnnnnnnnnnnnnnnnnnnnnnnnnnnnnnnnnnnnnnnnnnnnnnnnnnnnnnnnnnnnnnnnnnnnnnnnnnnnnnnnnnnnnnnnnnnnnnnnnnnnnnnnnnnnnnnnnnnnnnnnnnnnnnnnnnnnnnnnnnnnnnnnnnnnnnnnnnnnnnnnnnnnnnnnnnnnnnnnnnnnnnnnnnnnnnnnnnnnnnnnnnnnnnnnnnnnnnnnnnnnnnnnnnnnnnnnnnnnnnnnnnnnnnnnnnnnnnnnnnnnnnnnnnnnnnnnnnnnnnnnnnnnnnnnnnnnnnnnnnnnnnnnnnnnnnnnnnnnnnnnnnnnnnnnnnnnnnnnnnnnnnnnnnnnnnnnnnnnnnnnnnnnnnnnnnnnnnnnnnnnnnnnnnnnnnnnnnnnnnnnnnnnnnnnnnnnnnnnnnnnnnnnnnnnnnnnnnnnnnnnnnnnnnnnnnnnnnnnnnnnnnnnnnnnnnnnnnnnnnnnnnnnnnnnnnnnnnnnnnnnnnnnnnnnnnnnnnnnnnnnnnnnnnnnnnnnnnnnnnnnnnnnnnnnnnnnnnnnnnnnnnnnnnnnnnnnnnnnnnnnnnnnnnnnnnnnnnnnnnnnnnnnnnnnnnnnnnnnnnnnnnnnnnnnnnnnnnnnnnnnnnnnnnnnnnnnnnnnnnnnnnnnnnnnnnnnnnnnnnnnnnnnnnnnnnnnnnnnnnnnnnnnnnnnnnnnnnnnnnnnnnnnnnnnnnnnnnnnnnnnnnnnnnnnnnnnnnnnnnnnnnnnnnnnnnnnnnnnnnnnnnnnnnnnnnnnnnnnnnnnnnnnnnnnnnnnnnnnnnnnnnnnnnnnnnnnnnnnnnnnnnnnnnnnnnnnnnnnnnnnnnnnnnnnnnnnnnnnnnnnnnnnnnnnnnnnnnnnnnnnnnnnnnnnnnnnnnnnnnnnnnnnnnnnnnnnnnnnnnnnnnnnnnnnnnnnnnnnnnnnnnnnnnnnnnnnnnnnnnnnnnnnnnnnnnnnnnnnnnnnnnnnnnnnnnnnnnnnnnnnnnnnnnnnnnnnnnnnnnnnnnnnnnnnnnnnnnnnnnnnnnnnnnnnnnnnnnnnnnnnnnnnnnnnnnnnnnnnnnnnnnnnnnnnnnnnnnnnnnnnnnnnnnnnnnnnnnnnnnnnnnnnnnnnnnnnnnnnnnnnnnnnnnnnnnnnnnnnnnnnnnnnnnnnnnnnnnnnnnnnnnnnnnnnnnnnnnnnnnnnnnnnnnnnnnnnnnnnnnnnnnnnnnnnnnnnnnnnnnnnnnnnnnnnnnnnnnnnnnnnnnnnnnnnnnnnnnnnnnnnnnnnnnnnnnnnnnnnnnnnnnnnnnnnnnnnnnnnnnnnnnnnnnnnnnnnnnnnnnnnnnnnnnnnnnnnnnnnnnnnnnnnnnnnnnnnnnnnnnnnnnnnnnnnnnnnnnnnnnnnnnnnnnnnnnnnnnnnnnnnnnnnnnnnnnnnnnnnnnnnnnnnnnnnnnnnnnnnnnnnnnnnnnnnnnnnnnnnnnnnnnnnnnnnnnnnnnnnnnnnnnnnncaggtcgtctgacgagtccctctgccattccagccatcaccatcggccgcttgggctatgtgtgcccccaggaggtggcacccatgctgcagcagttcatccggccttggt

SEQ ID NO: 27005 - DNA, 358 bp, Macaca Mulatta
  misc_feature (1)...(358): n = A,T,C or G
aagtacagctggagtgaagccctcctgctcaagggaaacagcaaaaccgtgccttagcaaccccttgcaaaaacaatggcatgtgcagggatgggtggaacagatatgtctgtgattgttccggaacaggctatcttggcaggtcatgtgagagagnnnnnacggttttgaggtatgatggaagcatgttatgaaaattcagctccctgtagtcatgcacacggaggctgaggatgttccctaccggtccgatcccagcgtgcatatggcattctgatggcaaccacttctagagactctgctgacaccctccgcctggagctagatgcaggacgtgtgaaactgacggtcaatctag

SEQ ID NO: 27006 - DNA, 1612 bp, Macaca Mulatta
  misc_feature (1)...(1612): n = A,T,C or G
ncccaggagcttcagaccaagttggcagagataggagctccgatccagggnnnnnnnnnnnnnnnnnnnnnnnnnnnnnnnnnnnnnnnnnnnnnnnnnnnnnnnnnnnnnnnnnnnnnnnnnnnnnnnnnnnnnnnnnnnnnnnnnnnnnnnnnnnnnnnnnnnnnnacagctccctggaattcccatgccaccaccacctttgggactcccccctttgcagcctcctccacctcccccaccacctccaccaggccttggccttggctttcctatggcccacccaccaaatttggggcccccgcctcctctccgtgtgggtgagccagtggcactgtcagaggaggagcggctgaagttggctcagcagcaggcggcattgctgatgcagcaggaggaacgtgccaagcagnagcagggagatcattcgctgaaggaacatgagctcttggagcagcagaagcgggnggcagctgtgttattggagcaggaacgacagcaggagattgccaagatgggcaccccagtccctcggcccccacaagacatgggccagattggtgtgcgcactcctctgggtcctcgannnnnnnnnnnnnnnnnnnnnnnnnnnnnnnnnnnnnnnnnnnnnnnnnnnnnnnnnnnnnnnnnnnnnnnnnnnnnnnnnnnnnnnnnnnnnnnnnnnnnnnnnnnnnnnnnnnnnnnnnnnnnnnnnnnnnnnnnnnnnnnaggctttggagaagatcctgcagctgaccgagagccgccaggaagagatgaactctcagcaggngaggaagaggaaatggaaacagatgctcgctcatccctgggccagtcagcgtcagagactgaggaggacacagtgtccgtatctaaaaaggagnnnnnnnnnnnnnnnnnnnnnnnnnnnnnnnnnnnnnnnnnnnnnnnnnnnnnnnnnnnnnnnnnnnnnnnnnnnnnnnnnnnnnnnnnnnnnnnnnnnnnnnnnnnnnnnnnnnnnnnnnnnnnnnnnnnnnnnnnnnnnnnnnnnnnnnnnnnnnnnnnnnnnnnnnnnnnnnnnnnnnnnnnnnnnnnnnnnnnnnnnnnnnnnnnnnnnnnnnnnnnnnnnnnnnnnnnnnnnnnnnnnnnnnnnnnnnnnnnnnnnnnnnnnnnnnnnnnnnnnnnnnnnnnnnnnnnnnnnnnnnnnnnnnnnnnnnnnnnnnnnnnnnnnnnnnnnnnnnnnnnnnnnnnnnnnnnnnnnnnnnnnnnnnnnnnnnnnnnnnnnnnnnnnnnnnnnnnnnnnnnnnnnnnnnnnnnnnnnnnnnnnnnnnnnnnnnnnnnnnnnnnnnnnnnnnnnnnnnnnnnnnnnnnnnnnnnnnnnnnnnnnnnnnnnnnnnnnnnnnnnnnnnnnnnnnnnnnnnnnnnnnnnnnnnnnnnnnnnnnnnnnnnnnnnnnnnnnnnnnnnnnnnnnnnnnnnnnnnnnnnnnattgagaagccccccttcgagctgccagacttcatcaaacgcacaggcatccaggagatgcgagaggccctgcaggagaagnnaggaagaacagaagaccatgaagtcaaaaatgcgagagaaagttcggcctaagatgggca

SEQ ID NO: 27007 - DNA, 773 bp, Macaca Mulatta
ggcacggggctcttcctcaggcggccgccatggcgggacaggaggatccggtgcagcgggagattcaccaggactgggctaaccgggagtacattgagataatcaccagcagcatcaagaaaatcgcggactttctcaactcgttcgatatgtcttgtcgttcaagacttgcaacactaaacgagaaattgacagcccttgaacggagaatagagtacattgaagcacgggtgacaaaaggtgagacactcacctagaacagtgacgtgctgctgctgggaagttgctttacacaacacaggccacatgggaaaggccccagcagccttcagctccttcctttctccttaaagagcaacagggcttattcttgtttttcttttttcaaaagtgtggcctttgggctctgccatctggggtgtggtgtgttatgtggggagaagtccagaggaactgctggaaacgacatgaggcattttaccttttcagtaacattttatagatctacttgtcaatgtatttgagacattcacagccaaaaccctgggactctttgtgaaggtcctccccgcctctatctttctttctctctctctcaaactttccttaaagttctcattgccctttgcactgcttctgtgaacagtctttttctccccccacccttggtgggaaatgggggggcaatcctggccaagacactcatggccctggcaatgtggctgcccaaagaatgtttgttgcaaacccccccagttttcttgttggatttg

SEQ ID NO: 27008 - DNA, 197 bp, Macaca Mulatta
  misc_feature (1)...(197): n = A,T,C or G
tcccggcagctgcgggtcagccaccggctgtgtcagcaaaatcctggccaggtngcaggtactacgagaccggcagcatcaagccaggtgtgatcggtggctccaagcccaaagtggcgacgcccaaagtggtggacaagattgctgaatacaaacgacagaacccgactatgttcgcctgggagatccgagaccgg

SEQ ID NO: 27009 - DNA, 1438 bp, Macaca Mulatta
  misc_feature (1)...(1438): n = A,T,C or G
aggagagaattcctccagacggcttcatgggtgcccccccaagaagggnncccaaattggnaannnggtcctgacagattattacaggtccctggagaaaactatgccttggtccaattcttctgaagtgctcttgattactttctattatgattagatgcttgtataatgtctcaatgatgcattttaatcttttataatgaagtaaaagttgtgtctataatttaaatacacacacatacacacatacacaaagtcaaactgaagaccaaatcttagcaggtgaaagcaatattcttatacatttcagaataaaattagctctatgtattttctactgcatctgagcaggcaggtcccagatttcttaaagctttgaccatgtgtctagttacttgatgaaaaatgaatatattttccagcatgtcttgccaacctgcactcttaacaatgtcatttatcagttataaaacatatcagattaagcatcctcttctgtacaattgaatttccaagnnnnnnnnnnnnnnnnncactctaaaagaggtgtggctcacatcaagattcttcctgatgttttacttcatgctgtacaaagccttaatgttgtaatcatatcttacgtgttgaagacctgactggagaaacaaaatgtgcaataacattaatttaatcttagagatctgtgcagcctatttctgtcacaaaagttatattgtctaataagaagagacgtcttaatggcctctgtgagtaatgtaactccagttaaacggtgactttttatagcgtacagcgctttgatgaaagggggtcaatgtggcgatgttgtggaaagttatctttcccgctcttggctaatggtcattgtgtcctgcagaaaggatggccctgactgcagcagcagcgtcagctataacaaaaaataattcacactatcagactagcaaggcactagaactggaaagaccaccgaaaacaaaagaatccagcccctttcatcttacaggtgaacaaactgtgatgatgcacaatgtatgtgcctttgtaagctggctgagcactgtaaaccaaaaatggaaatttgccacttattagggaaaatgcccggtggggagtgaaggaagtaacccaggccaaccttgaatccccacgccggggtgggcctgggtttacgcccaaagcactcatggtagctggggtcaaaagttccccccacccctgggggtcaaacaaaaaatatcattgtaaaccggagaaggggcaaacaatagaagaataactatactcctcagaggnnnaaaaggggcccagatttttctgaaaacttcccaccggaaatttaaaaggcgagttgtgtacggaacagcacagcaccaaaattctagccgcttcttcccaaaagaatttttccaaacccggggtaggacagaaaaaa

SEQ ID NO: 27010 - DNA, 509 bp, Macaca Mulatta
gtgaatgaaagaaccataggcagtcctcctaatgagttttactgttctgaaaacacttctgtccctaacgaatctaacaggattcttgttaataaagatgtacctcagaaaccaggaggtgaaaccacaccttcagtaactgacttactaacattattttttggctccagagattcttactggtgataaccaatattattgtgaaaactgtgcctctctgcagaatgctgagaaaactatgcaaatcacagaggaacctgaataccttattcttactctcctgagattttcgtatgatcagaagtatcatgtgagaaggaaaattttagacaatgtatcactgccactggttttggagttgccagttaaaagaactacttctttctcttcattgtcagaaagttggtctgtagatgttgacttcactgatcttagtgagaaccttgctaaaaaattaaagccttcagggactgatgaagcttcctgcacaaaattggtgccctatctat

SEQ ID NO: 27011 - DNA, 2337 bp, Macaca Mulatta
  misc_feature (1)...(2337): n = A,T,C or G
agtataaagatgcatttatgaaagcaaatcctggctacaaatggtgtcctaccacaaacaagcctgtgaaatccccaacacccactgtcaatccacgaaagaaactttgggccttcccatctgactcttcaagagacttgccaagccccaagaaagcaaagactgaagaaatgcctcagcttaactttggaatggctnnnnnnnnnnnnnnnnnnnnnnnnnnnnnnnnnnnnnnnnnnnnnnnnnnnnnnnnnnnnnnnnnnnnnnnnnnnnnnnnnnnnnnnnnnnnnnnnnnnnnnnnnnnnnnnnnnnnnnnnnnnnnnnnnnnnnnnnnnnnnnnnnnnnnnnnnnnnnnnnnnnnnnnnnnnnnnnnnnnnnnnnnnnnnnnnnnnnnnnnnnnnnnnnnnnnnnnnnnnnnnnnnnnnnnnnnnnnnnnnnnnnnnnnnnnnnnnnnnnnnnnnnnnnnnnnnnnnnnnnnnnnnnnnnnnnnnnnnnnnnnnnnnnnnnnnnnnnnnnnnnnnnnnnnnnnnnnnnnnnnnnnnnnnnnnnnnnnnnnnnnnnnnnnnnnnnnnnnnnnnnnnnnnnnnnnnnnnnnnnnnnnnnnnnnnnnnnnnnnnnnnnnnnnnnnnnnnnnnnnnnnnnnnnnnnnnnnnnnnnnnnnnnnnnnnnnnnnnnnnnnnnnnnnnnnnnnnnnnnnnnnnnnnnnnnnnnnnnnnnnnnnnnnnnnnnnnnnnnnnnnnnnnnnnnnnnnnnnnnnnnnnnnnnnnnnnnnnnnnnnnnnnnnnnnnnnnnnnnnnnnnnnnnnnnnnnnnnnnnnnnnnnnnnnnnnnnnnnnnnnnnnnnnnnnnnnnnnnnnnnnnnnnnnnnnnnnnnnnnnnnnnnnnnnnnnnnnnnnnnnnnnnnnnnnnnnnnnnnnnnnnnnnnnnnnnnnnnnnnnnnnnnnnnnnnnnnnnnnnnnnnnnnnnnnnnnnnnnggatcgacatggaaatgataaatccacacccaagaagacttgcaaaaagaggcagtcttctgagtctgacattgagagcgtcatatataccattgaagccgtcgcaaagggagactggggaatagagaaacttggagatacccctcgcaagaaggtccgcacatcctcaagtggcaagggaagcattttggatgccaagccaccaaagaaaaaagtgaaatcaagagagaagaaaatgtcaaaggagaaatcctcagataccaccaaagagtcaagacctccagatttcattagtatttctgctagcaagaacatttctggtgaggcgccagagggtataaaagcagaaccattgacgcccatggaagatgcactaccacccagcctatcaggacaggccaagcctgaggacagtgactgtcacagaaaaatagaaacttgcggttccaggaaatccgagaggtcttgcaaaggtgctctttataaaaccctggtgtctgagggcatgctcacctctctgcgagctaatgttgacagaggnnnnnnnnnnnnnnnnnnnnnnnnnnnnnnnnnnnnnnnnnnnnnnnnnnnnnnnnnnnnnnnnnnnnnnnnnnnnnnnnnnnnnnnnnnnnnnnnnnnnnnnnnnnnnnnnnnnnnnnnnnnnnnnnnnnnnnnnnngctccgcaaagctggatgaagaatttgaaaaaaaattcaacagcctccctcaatatagtcctgttacatttgaccggaaatgtgtacctgtcccaagaaaaaagaagaagactggaaatgtgtcctcagaaccgactaaaaccagcaaagnnaggaagtggggataaatggtcaaacaagcaactcttcttggatgccattcaccctacagaannnnnnnnnnnnnnnnnnnnnnnnnnnnnnnnnnnnnnnnnnnnnnnnnnnnnnnnnnnnnnnnnnnnnnnnnnnnnnnnnnnnnnnnnnnnnnnnnnnnnnnnnnnnnnnnnnnnnnnnnnnnnnnnnnnnnnnnnnnnnnnnnnnnnnnnnnnnnnnnnnnnnnnnnnnnnnnnnnnnnnnnnnnnnnnnnnnnnnnnnnnnnnnnnnnnnnnnnnnnnnnnnnnnnnnnnnnnnnnnnnnnnnnnnnnnnnnnnnnnnnnnnnnnnnnnnnnnnnnnnnnnnnnnnnnnnnnnnnnnnnnnnnnnnnnnnnnnnnnnnnnnnnnnnnnnnnnnnnnnnnnnnnnnnnnnnnnnnnnnnnnnnnnnnnnnnnnnnnnnncagaggtcagaggtcaactccgctcacccatgatggacagccaaaagaaatgccacaggctcctgtacttatttcctgcgctgaccagtga

SEQ ID NO: 27012 - DNA, 678 bp, Macaca Mulatta
tacgtgccatgcctttgactcaaagataggacataaaaacaaagtcaccatgacattccatagtaaatttggaatcagaactccatatgcaacttcgggctcactggagaacaattaaggagcaccaaaccctctgaggttttactttaagcctcgctgtatgtttgccttggataaaaaggctacctaccatgtgctatccagtaatgtacttaaataagccaatacttagatctactgtaaggcagatgctaattataagcattaagtaagcaagtagtgccctcagctactgcagaagaaaagtcccactaaggaaaagaaagtcttgtgatttttaaaggcaagttttcaagtgctctcctagttctatcctctgattccattgaatccatactatgagcgtcagtgagggttttcatagcttttggaaatactttggtctctgaactgtaattagcaagaagtaaaaacagaaacctcaaacatcaaatgcttgctttgttacctggaggactaaccgtagatgtctttagtatactttgtatgttcttaatattggaagataattttgtgaatctgtagattttattttttcagtcttaccttacgaatttcttttctaatgaataatagagaggaacttacaggcacttctgccattgggtaatgaaagga

SEQ ID NO: 27013 - DNA, 306 bp, Macaca Mulatta
gcttctccgtgtcacagctcctcgacgaccctgaggtcctggctgtcatcaccattccacacacttccgagcacacgccggttttcatcagacttcccagcaatgggtgctacatgctgcccctgcccatctccaaggagcatgcgctgctgcccagacacatgagctaccgcctgctgcccaggtgcccgcagaagtccttcaatgtggtgaccatccctgctggacagcagcctctgcaaggcaaggctccccagggggcggcagaggaggaccaggataggcgagtgcgtggtgaaaagctcc

SEQ ID NO: 27014 - DNA, 966 bp, Macaca Mulatta
gggtcaaggatgttcgtcgtggcaacgttgctggtgacagcaaaaacgacccaccaatggaagcagctggcttcactgctcaggtgattatcctgaaccatccaggccaaataagtgctggctatgcccctgtgttggattgccacacagctcacattgcatgcaagtttgctgagctgaaggaaaagattgatcgccgttctggtaaaaaactggaagatggccctaaattcttgaagtctggtgatgctgccattgttgatatggttcctggcaagcctatgtgtgttgagagcttctcagactatccacctttgggtcgctttgctgttcgtgatatgaggcagacagttgcggtgggtgtcatcaaagcagtggacaagaaggctgctggagctggcaaggtcaccaagtctgcccagaaagctcagaaggctaaatgaatattatccctaatacctgccaccccactcttaatcagtggtggaagaacggtctcagaactgtttgtttcaattggccatttaagtttagtagtaaaagactggttaatgataacaatgcatcgtaaaaccttcagaaggaaaggagaatgttttgtggaccactttggttttcttttttgcgtgtggcagttttaagttattagtttttaaaatcagtactttttaatggaaacaacttggaccaaaaatttgtcacagaattttgagacccattaaaaaaggtttaattgagggagtaattatatttaagtataaaaaatcacattgtcgggcccgccctcggccccctcaaaaaagcttttctagaaccatttccttttgggcgccgcggggcccacatagggaaagtgaaacatggtccataaccggtttctccaagaaaaatctggggcatgaaccaatgcgcttgaattcccccccaattaaaaaaagccccgtggggaaacccaaacgtttcttc

SEQ ID NO: 27015 - DNA, 688 bp, Macaca Mulatta
tccattcctagcttgggaagcttccgctcagaggtcctggcgcctcggcacagctgccacgggctctcctgggcttatggccggtcacagcctcagtgtgactctgcagtggcccctgtagctgggcaagcaggagcaggtctctctgcatctgttctttgaggaactcaagtttggttgccagaaaaatgtgcttcattcccccctggttaatttttacacaccctaggaaacatttccaagatcctgtgatggcgagacaaatgatccttaaagaagatgtggggtctttcccaacctgagactttctgaaaggttcacaggttcaatatttaatgcttcagaagcatgtgaggttcccaacactgtcagcaaaaaccttaggagaaaacttaaaaatatatgaatacatgcacaatacacagctacagactcacattctgttgacaagggaaaaccttcaaagcatgtttctctccctcaccacaacggaacatgcagtactaaagcaatatatttgtgattccccatgtaattcttcaatgttaaacagtgcagtcctctttaaaaagctaagatgaccatgcgccctttcctctgtacatatacccttaagaacgtcccctccacacactgccccccagtatatgccgcattgtactgctgtgttatatgctacgtacatgtc

SEQ ID NO: 27016 - DNA, 1944 bp, Macaca Mulatta
  misc_feature (1)...(1944): n = A,T,C or G
atggctggtgcctcggtgaaagtagcagtgagggttcggccctttaacgcccgtgagaccagccaggatgccaagtgtgtggtcagcatgcagggcaacaccaccnnnnnnnnnnnnnnnnnnnnnnnnnnnnnnnnnnnnnnnnnnnnnnnnnnnnnnnnnnnnnnnnnnnnnnnnnnnnnncggaggatccccagtttgcatctcagcagcaagtgtatcgggacattggagaagagatgctgctccacgcctctgaaggctacaacgtgtgcatctttgcctatgggcagaccggggctgggaaatcctataccatgatggggcggcaggagccagggcagcagggcatcgtgccccannnnnnnnnnnnnnnnnnnnnnnnnnnnnnnnnnnnnnnnnnnnnnnnnnnnnnnnnnnnnnnnnnnnnnnnnnnnnnnnnnnnnnnnnnnnnnnnnnnnnnnnnnnnnnnnnnnnnnnnnnnnnnnnnnnnnnnnnnnnnnnnnnnnnnnnnnnnnnnnnnnnnnnnnnnnnnnnnnnnnnnnnnnnnnnnnnnnnnnnnnnnnnnnnnnnnnnnnnnnnnnnnnnnnnnnnnnnnnnnnnnnnnnnnnnnnnnnnnnnnnnnnnnnnnnnnnnnnnnnnnnnnnnnnnnnnnnnnnnnnnnnnnnnnnnnnnnnnnnnnnnnnnnnnnnnnnnnnnnnnnnnnnnnnnnnnnnggtcagtaagatcagtttggtggaccttgctgggagtgagcgagccgactcctcaggggcccggggcatgcgcctgaaggnnnnnccaacattaataagtccctaactactctagggaaggtgatctcggcccttgcagatatgngcaatcaaagaagcggaagtcagattttatcccctacagggactctgtgctcacctggctgctcaaggaaaatttgggnnnnnnnnnnnnnnnnnnnnnnnnnnnnnnnnnnnnnnnnnnnnnnnnnnnnnnnnnnnnnnnnnnnnnnnnnnncaggtacgctgaccgcaccaagcaaatccgctgcaatgccgtcatcaacgaggacccgaatgcccggctgatcagagagctgcaggaggaagtagcccggctgcgggaactactgatggctcagggactgtcagcctctgctctagaagnnnnnnnnnnnnnnnnnnnnnnnnnnnnnnnnnnnnnnnnnnnnnnnnnnnnnnnnnnnnnnnnnnnnnnnnnnnnnnnnnnnnnnnnnnnnnnnnnnnnnnnnnnnnnnnnnnnnnnnnnnnnnnnnnnnnnnnnnnnnnnnnnnnnnnnnnnnnnnnnnnnnnnnnnnnnnnnnnnnnnnnnnnnnnnnnnnnnnnnnnnnnnnnnnnnnnnnnnnnnnnnnnnnnnnnnnnnnnnnnnnnnnnnnnnnnnnnnnnnnnnnnnnnnnnnnnnnnnnnnnnnnnnnnnnnnnnnnnnnnnnnnnnnnnnnnnnnnnnnnnnngactccccacctggtgaacctgaacgaagaccctctgatgtctgagtgtctgctctaccacatcaaggatggcgtcaccaggnccagggtcggccaggtagatatggacatcaagctgaccggacagttcattcgggagcaacactgtctcttccgcagcatcccccagccagatggagaagnnnnnnnnnnnnnnnnnnnnnnnnnnnnnnnnnnnnnnnnnnnnnnnnnnnnnnnnnnacggagccgctggtgctgaagtcaggnagggaataggattgtgatgggcaagaaccatgttttccgcttcaaccacccggagcaggcgaggctggaacgggaacgaggggtccccccacccccaggaccgccctctgagccagtcgactggaactttgcccagaaggaactgctggagcagcaaggcatcgacatcaagctggaaatggagaagaggn

SEQ ID NO: 27017 - DNA, 776 bp, Macaca Mulatta
  misc_feature (1)...(776): n = A,T,C or G
ggtgagaataaacactatgaggtgcaaagaaatgcgttgaggatttggcactctacttaaaaccactaagtggaggtaaaggnnnnnnnnnnnnnnnnnnnnnnnnnnnnnnnnnnnnnnnnnnnnnnnnnnnnnnnnnnnnnnnnnnnnnnnnnnnnnnnnnnnnnnnnnnnnnnnnnnnnnnnnnnnnnnnnnnnnnnnnnnnnnnnnnnnnnnnnnnnnnnnnnnnnnnnnnnnnnnnnnnnnnnnnnnnnnnnnnnnnnnnnnnnnnnnnnnnnnnnnnnnnnnnnnnnnnnnnnnnnnnnnnnnnnnnnnnnnnnnnnnnnnnnnnnnnnnnnnnnnnnnnnnnnnnnnnnnnnnnnnnnnnnnnnnnnnnnnnnnnnnnnnnnnnnnnnnnnnnnnnnnnnnnnnnnnnnnnnnnnnnnnnnnnnnnnnnnnnnnnnnnnnnnnnnnnnnnnnnnnnnnnnnnnnnnnnnnnnnnnnnnnnnnnnnnnnnnnnnnnnnnnnnnctcttccttactgcagctgaaggaagaatttcggagttatgaagcgttacgcagggaacatgatgcccaaattgttcatattgctatggaagcaggactccgtatttcacctgaacagtggtcctctcttttgtatggtgatttggctcataaatcacacatgcagtctatcattgataagnagctacagtctccagagtcatttgcaaagagtgtccaggaattgacaattgttttgcaacgaacaggtgacccagctaacttaaa

SEQ ID NO: 27018 - DNA, 186 bp, Macaca Mulatta
gaaatgaagctgttgtcatttctggaaggaaactggcccaggagatcaagcaggaagtgcggcaggaggtagaagagtgggtggcctcaggcaacaagcggccacacctgagcgtgatcctggttggcgagaatcctgcaagtcactcctacgtcctcaacaaaaccagggcagctgcagatgtgg

SEQ ID NO: 27019 - DNA, 349 bp, Macaca Mulatta
atttttctggagacgctatctttttttgaatataattaacttgcccccaactcaaaatagctgtctgtgttgcactcattgcaaaatctaaattcttttgttacttaaaaaaaaccacgttttttatggctgttatagtcgtctctctcccctctcctttctgcattgctctttttaattttcaatgtctcattgtgatcatcagatttatttttacttggattgtaagatttatctccttgatgattccttgccatttttggaggtcacggttttacccattcacacgtgtaaacttcaagtaaacgaagcaatattcaggatggagaagcagttagtgactggctag

SEQ ID NO: 27020 - DNA, 1836 bp, Macaca Mulatta
  misc_feature (1)...(1836): n = A,T,C or G
cagaaataccgctaccaagatgaagacacgccccctctggagcacagcccggcccacctccccaaccaggnnnnnnnnnnnnnnnnnnnnnnnnnnnnnnnnnnnnnnnnnnnnnnnnnnnnnnnnnnnnnnnnnnnnnnnnnnnnnnnnnnnnnnnnnnnnnnnnnnnnnnnnnnnnnnnnnnnnnnnnnnnnnnnnnnnnnnnnnnnnnnnnnnnnnnnnnnnnnnnnnnnnnnnnnnnnnnnnnnnnnnnnnnnnnnnnnnnnnnnnnnnnnnnnnnnnnnnnnnnnnnnnnnnnnnnnnnnnnnnnnnnnnnnnnnnnnnnnnnnnnnnnnnnnnnnnnnnnnnnnnnnnnnnnnnnnnnnnnnnnnnnnnnnnnnnnnnnnnnnnnnnnnnnnnnnnnnnnnnnnnnnnnnnnnnnnnnnnnnnnnnnnnnnnnnnnnnnnnnnnnnnnnnnnnnnnnnnnnaggtcttggcttcagcatcgcagggggcgtagggaaccagcacatcccaggagataatagcatctatgtaacaaagatcatcgaagggggtgctgcccacaaggatgggaggttgcagattggagacaagatcctggcggtnggtcaacagtgtggggctagaggatgtcatgcatgaagatgctgtggcagccctgaagaacacgtatgatgttgtctacctaaaggtggccaagcccagcaatgcctacctgagtgacagctatgctcccccagacatcacaacctnnnnnnnnnnnnnnnnnnnnnnnnnnnnnnnnnnnnnnnnnnnnnnnnnnnnnnnnnnnnnnnnnnnnnnnnnnnnnnnnnnnnnnnnnnnnnnnnnnnnnnnnnnnnnnnnnnnnnnnnnnnnnnnnnnnnnnnnnnnnnnnnnnnnnnnnnnnnnnnnnnnnnnnnnnnnnnnnnnnnnnnnnnnnnnnnnnnnnnnnnnnnnnnnnnnnnnnnnnnnnnnnnnnnnnnnnnnnnnnnnnnnnnnnnnnnnnnnnnnnnnnnnnnnnnnnnnnnnnnnnnnnnnnnnnnnnnnnnnnnnnnnnnnnnnnnnnnnnnnnnnnnnnnnnnnnnnnnnnnnnnnnnnnnnnnnnnnnnnnnnnnnnnnnnnnnnnnnnnnnnnnnnnnnnnnnnnnnnnnnnnnnnnnnnnnnnnnnnnnnnnnnnnnnnnnnnnnnnnnnnnnnnnnnnnnnnnnnnnnnnnnnnnnnnnnnnnnnnnnnnnnnnnnnnnnnnnnnnnnnnnnnnnnnnnnnnnnnnnnnnnnnnnnnnnnnnnnnnnnnnnnnnnnnnnnnnnnnnnnnnnnnnnnnnnnnnnnnnnnnnnnnnnnnnnnnnnnnnnnnnnnnnnnnnnnnnnnnnnnnnnnnnnnnnnnnnnnnnnnnnnnnnnnnnnnnnnnnnnnnnnnnnnnnnnnnnnnnnnnnnnnnnnnnnnnnnnnnnnnnnnnnnnnnnnnnnnnnnnnnnnnnnnnnnnnnnnnnnnnnnnnnnnnnnnnnnnnnnnnnnnnnnnnnnnnnnnnnnnnnnnnnnnnnnnnnnnnnnnnnnnnnnnnnnnnnnnnnnnnnnnnnnnnnnnnnnnnnnnnnnnnnnnnnnnnnnnnnnnnnnnnnnnnnnnnnnnnnnnnnnnnnnnnnnnnnnnnnnnnnnnnnnnatacgacacggcccaagcgggagtatgagatagatggccgggattaccactttgtgtcgtctcggggagaaaatggagaaggacattcaggcgcacaagttcattgaggccggccagtacaacagccacctctatgggaccagcgttcagtccgtgcgagaggtggcagagcagg

SEQ ID NO: 27021 - DNA, 633 bp, Macaca Mulatta
  misc_feature (1)...(633): n = A,T,C or G
gggaggtgcaaatgcttaactctgtctacattgcgtctttaagggataacaacttttgtcagtgtgtttctttgctacagaagtgttttgtagagcacaactggtttcacttgattggcataacctgtggactagctatctacaactccactgtggttgatctccacttcccattggctctctacaagaagttactcaatgtanagcctggcttggaagacttaaaggagttgtcacccactgaaggaaggagtcttcaagaagcttttagattacccctgnggagaatgtggaaggaaactttctggctcaactttcccgatttggccaagaaacttatggaatggattgaacaaaaaaaacctgaatccctgggggaaaaaaatggtgactttttggccaggataaacgggccggaattttgggaagcctttttccaattatgtctttccaaatccccttttagaaaagggcaaccacccttcccagggggctcnnnnnnnnnnnnnnnnnnnnnnnnnnnaaccttcccccccttaaaaaaaggggatttagggggggaaaaccccccccctgggaaaaagggaaaaacccccctcaaggggaaattcccccccccccccttaaaaattg

SEQ ID NO: 27022 - DNA, 1347 bp, Macaca Mulatta
  misc_feature (1)...(1347): n = A,T,C or G
cttgaggtatacatatacccgacacaccttacatctctgatttggctgcattttggaatcatctgggaagttttaaacaatactgatgtctaggtccaacctccagagattatgatttaattggtatggggtggggttttgcagttttcaaaccacaatatccagcaaactttgagaaccactgccctacacagccctccttcttccttatctggagtcaggggcaccttcagcttctccaatcacctggccagtggctcttgtttccagtcctgctgttccagggtggataggccttcaggcggagacccaggaatccagctccagactctgtccccggcagcctcttcagtccgggacgggacaggaagtgtccggcggaggtgggggtggannnnnnnnnnnnnnnnnnnnnnnnnnnnnnnnnnnnnnnnnnnnnnnnnnnnnnnnnnnnnnnnnnnnnnnnnnnnnnnnnnnnnnnnnnnnnnnnnnnnnnnnnnnnnnnnnnnnnnnnnnnnnnnnnnnnnnnnnnnnnnnnnnnnnnnnnnnnnnnnnnnnnnnnnnnnnnnnnnnnnnnnnnnnnnnnnnnnnnnnnnnnnnnnnnnnnnnnnnnnnnnnnnnnnnnnnnnnnnnnnnnnnnnnnnnnnnnnnnnnnnnnnnnnnnnnnnnnnnnnnnnnnnnnnnnnnnnnnnnnnnnnnnnnnnnnnnnnnnnnnnnnnnnnnnnnnnnnnnnnnnnnnnnnnnnnnnnnnnnnnnnnnnnnnnnnnnnnnnnnnnnnnnnnnnnnnnnnnnnnnnnnnnnnnnnnnnnnnnnnnnnnnnnnnnnnnnnnnnnnnnnnnnnnnnnnnnnnnnnnnnnnnnnnnnnnnnnnnnnnnnnnnnnnnnnnnnnnnnnnnnnnnnnnnnnnnnnnnnnnnnnnnnnnnnnnnnnnnnnnnnnnnnnnnnnnnnnnnnnnnnnnnnnnnnnnnnnnnnnnnnnnnnnnnnnnnnnnnnnnnnnnnnnnnnnnnnnnnnnnnnnnnnnnnnnnnnnnnnnnnnnnnnnnnnnnnnnnnnnnnnnnnnnnnnnnnnnnnnnnnnnnnnnnnnnnnnnnnnnnnnnnnnnnnnnnnnnnnnnnnnnnnnnnnnnnnnnnnnnnnnnnnnnnnnnnnnnnnnnnnnnnnnnnnnnnnnnnnnnnnnnnnnnnnnnnnnnnnnnnnnnnnnnnnnggtggagccagctggactggaggagatgatcacagatgctgtggctgggctgccccatgccgtacgagtcagtgcccgggactttctggatgctggcacctggagcacctggagcccggaggcctggggaactccgagcactg

SEQ ID NO: 27023 - DNA, 782 bp, Macaca Mulatta
gggaataaaaagctccgtcaaaggctgcttgaagagtatggagtcagaacctgtactcttattcagttccttggtgatgctattgttttgccagcaggagcacttcatcaggttcagaattttcacagctgtattcaggtaactgaagattttgtgtctccagaacatcttgtggagtcatttcatttaacacaggaactgagacttttgaaggaagaaatcaattatgatgataaactacaggttaaaaatattttgtatcatgccgtcaaagaaatggtgagagccttgaagatacatgaggatgaagtagaggatatggaagaaaattaagtgtgatccagtttgatatgtttaggtcattgaactgggattacttaaccttgaatgatgatatgtatgcacactgacttacgcttcataaaaccatcagtgccaagaaattctctttgtagtaattacttgttactgacactgcagcagtatagcctatgtcacagctcctgtgattcaatgttagctataaaacaaacagaattttaaaagcagcactatatagctgttttgtattatagtgtatatgatgttcgtgaaaaatgccagattaaaatgatgtatttatttttggtaaaaaataaaaaattctatgctatattgttgatcaagtgtaaatgtgaccttttacattttactaaaattactggtattttttcactacatttgagacaggttactggtgagaataggacacaaaacacccggctatttgccttgcatctggg

SEQ ID NO: 27024 - DNA, 380 bp, Macaca Mulatta
  misc_feature (1)...(380): n = A,T,C or G
caccctcagcgtgcctttcccaacccccttggaggcggaaatcgcccatgggtccctggctccagatgccgagccccaccaaagggtggttgggaaggagctcacagtgagcggcaggatcctgnnnnccgctggaaagctgaagactgccgcctgctccgaatttccgtcatcaactttctcgaccagctttnnnnnnnnnnngaccagctttccctggtggtgcggaccatgcagcgcttcgggcccccagtttcccgctaagcctggcctgggaaaatggggcgaggtctcactttacctctcctcctaggcagtgcatcatccatccttccctagggcaggaattcccagttgctactttcttgtgagggcctcat

SEQ ID NO: 27025 - DNA, 198 bp, Macaca Mulatta
cagtgttactgcatctgattaaatgtctccagaaataaagtgagaataattctgccaatcctgcctgttcttggagccggtggtggtggtgggagcaggtggcctcctgagttctaagaactgaagaagcctcgggctagtgatactagtcctgaacccctgccctatggtcttccagtttagttatgaattcattca

SEQ ID NO: 27026 - DNA, 2151 bp, Macaca Mulatta
  misc_feature (1)...(2151): n = A,T,C or G
gagcggaccagcgtcacggctgctacgtgtgcgggaagagcttcgcctggcgctccacactggtggagcacgtctacagccacactggcgagaaacccttccactgcactgactgcggcaagggtttcggccacgcttcctccctgagcaaacaccgggccatccatcgcggggagcggcctcaccgctgtcccgagtgtggccgggccttcacgcagcgctcagcactgacttcgcacctgcgcgtccacaccggtgagaagccctatggctgcgccgactgtggccgccgcttcagccagagctctgccctctaccagcaccggcgtgtgcacagcggcgagacccccttcccctgcccggactgtggccgcgccttcgcctacccctcggacctacggcgccacgtgcgcacccacaccggcgagaagccctaccagtgcccggactgcgggcgctgcttccgccagagctcagagatggcagcccacaggcgcacccacagcggcgagaagccctacccctgcccgcagtgtggccgccgcttcggccagaaatcagcagtggccaagcaccagtgggttcataggcccggggccaggggccacaggggccgggtcactgggggtctgcctgtgaccctgacccctggccctggagatctggaaccgcccgtgggcttccagctgtacccagagatattccaggagtgtgggtgacggccttaaaagtgactatctagacattacagaggcccgagatgggctcaggggcccgaacctctgcggcggcctgcagggaggtcccagaatctacaagacctggccctggggtgcggacagtctgatcttggaccctcagcagcctcctctgccagcacctnnnnnnnnnnnnnnnnnnnnnnnnnnnnnnnnnnnnnnnnnnnnnnnnnnnnnnnnnnnnnnnnnnnnnnnnnnnnnnnnnnnnnnnnnnnnnnnnnnnnnnnnnnnnnnnnnnnnnnnnnnnnnnnnnnnnnnnnnnnnnnnnnnnnnnnnnnnnnnnnnnnnnnnnnnnnnnnnnnnnnnnnnnnnnnnnnnnnnnnnnnnnnnnnnnnnnnnnnnnnnnnnnnnnnnnnnnnnnnnnnnnnnnnnnnnnnnnnnnnnnnnnnnnnnnnnnnnnnnnnnnnnnnnnnnnnnnnnnnnnnnnnnnnnnnnnnnnnnnnnnnnnnnnnnnnnnnnnnnnnnnnnnnnnnnnnnnnnnnnnnnnnnnnnnnnnnnnnnnnnnnnnnnnnnnnnnnnnnnnnnnnnnnnnnnnnnnnnnnnnnnnnnnnnnnnnnnnnnnnnnnnnnnnnnnnnnnnnnnnnnnnnnnnnnnnnnnnnnnnnnnnnnnnnnnnnnnnnnnnnnnnnnnnnnnnnnnnnnnnnnnnnnnnnnnnnnnnnnnnnnnnnnnnnnnnnnnnnnnnnnnnnnnnnnnnnnnnnnnnnnnnnnnnnnnnnnnnnnnnnnnnnnnnnnnnnnnnnnnnnnnnnnnnnnnnnnnnnnnnnnnnnnnnnnnnnnnnnnnnnnnnnnnnnnnnnnnnnnnnnnnnnnnnnnnnnnnnnnnnnnnnnnnnnnnnnnnnnnnnnnnnnnnnnnnnnnnnnnnnnnnnnnnnnnnnnnnnnnnnnnnnnnnnnnnnnnnnnnnnnnnnnnnnnnnnnnnnnnnnnnnnnnnnnnnnnnnnnnnnnnnnnnnnnnnnnnnnnnnnnnnnnnnnnnnnnnnnnnnnnnnnnnnnnnnnnnnnnnnnnnnnnnnnnnnnnnnnnnnnnnnnnnnnnnnnnnnnnnnnnnnnnnnnnnnnnnngagccagaactcacaattcaccgtggccccggccaccccatccccccaccactctcatgggctcctgaccaagcaccacgtgccattcatcatggcttgcttttagtgtttttggtgtttatcttaaagtacagcaaagaagaaaggaaagtatttcttagacccatgtctctgtccaaacagtcctttccatctggcatttgccgttcatttatatgacttgctgagctcctaaggtcatttgagtttgcaaacagtggtctgtagcactcaggttttctggagttggagagaaaggatggcaggagagaagtcaaagtcggctttgttttaga

SEQ ID NO: 27027 - DNA, 675 bp, Macaca Mulatta
ctcctccggtgcctcccactgacacttgttctctccttccccatctcccccaactaggaaacctgtgggaacagttgaaggatgacagcttggccctcgaccccctggtactggtgacctcatccccgacatcatcttcgatgcagccaccccagccaccaccccacagcttcccccctgggccctgtctgacagagacaggcagtggggcaggtgacttggcatccccgggcagtgggggctccggggcactgggtgacctgcaactcaccaccctctactctgcctttatggagctggagcctacgccccctccggcctctgcaggcccctctgtgtacctcagccccagctccaagcccatggccctggcatgagctgtgcccagcatcatcagctccagcgtttgcctggtctggaagtcctggctggccgcccacatcgggctcaccttaaaggtcaaggaaggaaaatacttctgtcccctgtgccactaagccaacatacgtgttagttggtagctgggggcacagaggacaccacctggggtgctgcccctcacacatttctgccatgtggtggcccagttcctcacccagggcccccaaagagcaagtgtctgggcaagaagaaaatgcactgttcctagctcatactcatccaccctcaagccct

SEQ ID NO: 27028 - DNA, 744 bp, Macaca Mulatta
gggactcttgctcctcatgatttcgcaaatattaaagctaacgtcaaagtagcatcaacagaaaatggaataatttttggtaatatagtttatgatgtctctggagcagcaagtgacagaaattgtgtggttctcagtgatattcacattgacatcatggactatatccagcctgcaacttgcactgatgcagaattccgtcagatgtgggccgaatttgaatgggagaacaaagtgacagttaacaccaatatgattgatttaaatgactacttacagcacatattaaagtcaaccaatatgaaatgcctgactccagaaaaggccctttctggttattgtggctttatggcagccaacctttatgctcgttccatatttggtgaagatgcacttgcaaatgtcagcattgagaagccaattcaccagggaccagatgctgctgttaccggccatataagaattcgtgcaaagagtcagggaatggccttaagtcttggagataaaatcaacttgtcacagaagaaaactagtatataaaaataaaaagtccttgaagctttacagttaatttagttatgggcttactggactccaacatcttttgtactctttcatgcttatatgttatatagaatctgagttcatgctgaatgcatttcagccaataatttatagccctttcccttaaatcaagatgagtttaaaaatataggtttgtcctttttgtcttaacagtttctg

SEQ ID NO: 27029 - DNA, 542 bp, Macaca Mulatta
  misc_feature (1)...(542): n = A,T,C or G
atggctgagggcggcgagctgatgagccggcttctgagcgagaacgcagacctgaagaagcaggtgcgcctcctgaaggagaatcagatgctgcggcggctgctcagccagagctgccaggagggcagtggccacgacctgctcccacccagggcccccgcctaccccgaggccggctcccccgggagtggannnnnnnnnnnnnnnnnnnnnnnnnnnnnnnnnnnnnnnnnnnnnnnnnnnnnnnnnnnnnnnnnnnnacctgctgtgctcacatgcccccctgtccagcgaggacgacacctccccaggctgcgcagccccctcccagtcacccttcaaggccttcctcagtcccccggagctgcacagccaccgaggcaccgacaggaagctgtccccgctcctgagccccttgcaagagtcactggtggacaagaccctgctggagcccagggagatggtccggcctaagaaggtgtgcttctcggagagcagcctgcccaccggggacaggaccaggaggagctactacctcaatg

SEQ ID NO: 27030 - DNA, 327 bp, Macaca Mulatta
ggaccgcagaccagcaacagtagtatgaaactccaaaatgcaaactgaagcagtaaacccacaaagcatcaaaagattcactcacaaacttctgaacacaaactccgtggatgaaagctgtttgttttgtttccttcatgtgtaaacaagatgatatctgaaaccagagagacttggaatgtctgattgacttctatttagcagcttgagtattgcatttccttggccagacaaaagtagctacaaatccacaaaaatttactattccagtaaggcagagtttaaccattgataatacaacttaaacatgtttgctataacatacca

SEQ ID NO: 27031 - DNA, 152 bp, Macaca Mulatta
caggaaagctcttctttagtggtcttagtacagaaacaaatgagaaagctcttgaagcaatatttggcaaatatggacaaatagtgaaagtactcttgatgagagacccggaaaccgtcaaatcaggaggatttgcttttgtcacctatgaa

SEQ ID NO: 27032 - DNA, 204 bp, Macaca Mulatta
ggaagactgtagttcatggaggctccctcattcctcatccctttggaataagtttatttgaaggtcaggtattctttactgattggacaaagatggccgtgctgaaggcaaacaagttcgcagagaccaacccacaagtgtactaccaggcttccctgagaccctatggagtgactgtttaccattccctcagacagccctatg

SEQ ID NO: 27033 - DNA, 605 bp, Macaca Mulatta
  misc_feature (1)...(605): n = A,T,C or G
gtgccacagatggagtactcanaactaaaagatatttgttactttggaaagaagaaagactctattctcaaagtttgctaatcagaaatttttatcagtttcaagtctcaaaaatacaaaataaaaacaaacatttttaatnnnnnnnnnnnnnnnnnnnnnnnnnnnnnnnnnnnnnnnnnnnnnnnnnnnnnnnnnnnnnnnnnnnnnnnnnnnnnnnnnnnnnnnnnnnnnnnnnnnnnnnnnnnnnnnnnnnnnnnnnnnnnnnnnnnnnnnnnnnnnnnnnnnnnnnnnnnnnnnnnnnnnnnnnnnnnnnnnnnnnnnnnnnnnnnnnnnnnnnnnnnnnnnnnnnnnnnnnnnnnnnnnnnnnnnnnnnnnnnnnnnnnnnnnnnnnnnnnnnnnnnnnnnnnnnnnnnnnnnnnnnnnnnnnnnnnnnnnnnnnnnnnnnnnnnnnnnnnnnnnnnnnnnnnnnnnnnnnnnnnnnnnnnnnnnnnnnnnnnnnnnnnnnnnnnnnnnnnnnnnnnnnnnnnnnnnnnnnnnnnnnnnnnnnnnnnnnnnnnnnnnnnnnnnnnnnnnnnnnnnnnnnnnnnnnnnnnnnnnnnnnn

SEQ ID NO: 27034 - DNA, 485 bp, Macaca Mulatta
caccagcttttccctttcaggtatccagatggttcccatcagctggtgtgagacgtagtgccctaagacccacactaaagaattccggaaagtagcccgagtacaacctgaattcttgcagacctaagaagccactttttaccccatggaagggagtaagctcttcctgagtataacaccaagatgctgctgtctattcaaacacctggcgtcggccaacagcctcttccagaaaaatctgccagaaacttaggctatagatggaacacgtttctgtgaacctatcagtggatttcattctcttgagtaataaaacttatcttttcaaggcaccaacaaacaaaactgtgatattggaaatagcctatcccccctgacagtccttataaatacctattttttgttatgataaaacttttttactaaaaggatgttatagttgtcttaagcagagaaagacgtctaaatggtgtcaggacatttca

SEQ ID NO: 27035 - DNA, 2810 bp, Macaca Mulatta
  misc_feature (1)...(2810): n = A,T,C or G
gcacccaggcatgtggaagatgctcatagtggtgatgtgtgtggcccttctgggctgcctgcaggcccaggagctccaggaacatgtctccataatcctgctgggagccactgggggactggctaagaagtacttatggcagggactgttccagctgtacctggatgaagtgggggaggggcacagttttagcttccatggagctgctctgacagcccccaagcaggggcaaagagctcatggccaaagtcctggaatccctctcctgccccaaggacatggcaccaaatcactgnnnnnnnnnnnnnnnnnnnnnnnnnnnnnnnnnnnnnnnnnnnnnnnnnnnnnnnnnnccagctgtacctgaatgaagtggggaggggcccccagttttagctttcatggaagctgttctgacagcccccaagcaagggccaagagctcatggccaaggccctggaatccctctcctgccccaaggacatggcaccaagtcactgtgcagaagaaaaggatcagttcctgcagctgagccggtaccgccaactgaagacggccgaggactatcaggccctgaacaaggacatcgaggcacagctccagcacgcaggcctccgggaggctggcaggatcttctacttctcggtgccacccttcgcctatgcagacattgcccgcaacatcaacagcagctgccggccaggcccgggcgcctggctgcgggttgtccttgagaaaccctttggccatgaccacttctcagctcagcagctggccacagaactcgggagctttttccaggaggaggagatgtaccgggtggaccattacttgggcaagcaggncaggccgtggcccagatcctgcctttccgagaccagaaccgcaaggctttggacagcctctggaaccggcaccacgtggagcgggtggagatcatcatgaaagagaccgtggatgccgaaggnaggccgcaccagcttctatgaggagtatggtgtcattcgcgacgtcctccagaaccatctgacggaggtcctcaccctcgtggccatggagctgcccctcaatgtcagcagtgcggaggctgtgctgcggcacaagcttcaggtcttccaggcgctgcggggcctgcagaggggcagtgccgtcgtgggccagtaccagtcttacagtgagcaggtgcgcagagagctgcagaagccagacagcttccacagcctgacgccgaccttcgcagncagccgttctcgtgcacatcgacaatcttcgctgggagggcgtgcctttcatcttgatgtctggcaaagccttggacgagagagtgggctacgctcggatcttgttcaagaaccaggcctgctgtgtgcagagcgaaaagcactgggctgcggcacagagccagtgcctgcctcggcagctcatcttccacatcggccacggcgacctgggcagccccgccgtgctggtcagcaggaacctgttcaggccctccctgccctccagctggaaggaaatggagggcccacctgggctccgccttttcggcagccctctgtccgattactatgcctacagccccgtgcaggagcgggacgcccactctgtcctcttatcccatatcttccatggccggaaggattccttcatcaccacagagaacttgctggcctcttggggcttctggacccctctgctggagagcctggcccataaggccccacgcctctatcctggaggagctgagaacggccgtctgttggactttgagttcagtagcggccggttgttcttttcccagcagcagccggagcagctagtgccagggccagggccggccccaatgcccagtgacttccaggtcctcagggccaagtaccgagagagcccgctggtctccgcctggtccgaggagctgatctctaagctggctaacgacattgaggccactgctgtgcgggccgtgcggcgctttggccagttccacctggcgctgtcagggggctcgagccccgtggccctgttccagcagctggccacggcgcactacggcttcccctgggcccacacgcacctgtggctggttgacgagcgctgcgtcccgctctcggacccggagtccaacttccagggcctgcaggcccacctgctgcagcacgtccgggtcccctactacaacatccaccccatgcctgtgcacctgcagcagcggctctgcgccgaggaggaccagggcgcccagatctacgccagggagatctcagccctggtggccaatagcagcttcgacctggtgctgctgggcatgggtgccgacgggcacacagcctccctttttcccacagtcgcccactggcctggatggcgagcagctggtcgtgctgaccacgagcccctcccagccacaccgccgcatgagccttagcctgcctctcatcaaccgtgccaagaacgtggcagtcctagtcatgggcaggatgaagcgtgagatcaccgcgctggtgagcccggtgggctatgagcccaagaagtggcccatctcgggtgtcctgccgcactctggccaactggtgtggtacatggactacgacgccttcctggcatgagggtgcctgtgccccttgcccactctgctcctgtgctttccttcacctgtgtcttccctcccttctcagctccaccacctgcccagcgtgccctggctctccagaacctgctgccccacagtcaggccccagagggcaggacaaggccttgtcccgatgcctttgacaggcagctctgtctagtggtgggtagatgcagaaaca

SEQ ID NO: 27036 - DNA, 300 bp, Macaca Mulatta
  misc_feature (1)...(300): n = A,T,C or G
ggtgaccactctggcctgtgtgctgctcactcagaaacaaggacagtgacagcccctcttgagtagatgacacgagctagtccacgttgacagcttaggacggtactagctctgccctggctctcctaggagtggaggacagacacgagagagaaaaaagatgacactgtaggaatccttcttaaaaatattacatgttttattatcctgtccccagagggtggtttatccagaaaccgagaaaaaaaatcaatcagaataaactcnnnnnnnnnnnnnnnnnnnnnnnnnnnnnnnnnc

SEQ ID NO: 27037 - DNA, 625 bp, Macaca Mulatta
  misc_feature (1)...(625): n = A,T,C or G
ggaaatgaaaattaacctaaaaagatggattttcattaggaacatatgtttaatttacacatctagaaaataattttaactttggattctttttccttccagaccaccaaatccccatgatttctagcatctttctttttaaaaacaaggcacagttgaagatcgaaactggactaatgggaagaccagaaaaatttagttgctactgtagatttacatgattaagaggcagctttaattgccatgattatcccncctttttggatgtataagaaccttccggacaacagaacctatttctggaattgcagaagagaacatatttcccttattttgatttaatcacccataaaccatacctatttaatgagtgtattctgtgcaattttttctcagattgtctttaactttgtttttaaaatgaccttcaaaataaactgtcaaaacaccattattttaaagtagtttttgttctatatgacacatattttacatgattgttttatgaatttctctttttcttctgtcttcaaatgctgcagagttttacaacagagagaaaatacagcagtcaagtataatgtaaaaaattcagccaatttttctcagcattgtttctggacct

SEQ ID NO: 27038 - DNA, 147 bp, Macaca Mulatta
gaacgcagtgaaggactatggcgagccagcgcttccctacgccgttccacgggcacgtgggccgcggcgccttcagcgacgtgtacgagcccgcggaggacacgtttctgcttctggacgcgctcgaggcagcagctgccgagctgg

SEQ ID NO: 27039 - DNA, 597 bp, Macaca Mulatta
  misc_feature (1)...(597): n = A,T,C or G
tgtgaagctcaaggagcaggagtgtcgcaacatcgtgtggatcgctgaatgtatcgcccagcgccaccgcgcctatctcgacaactacatccctatcttctagcgtcctggcccgaggctctcaattgcacnnnnnnnnnnnnnnnnnnnnnnnnnnnncgcgtgtgtgtgtgtgtgtggtctgtgacaagcctgtggctcacctgcctgcccggggtgtagtacactgtcatagcggctgcccagttctcctgaccctcttagagactgttcttaggcctgaaaaggggctgggcacccctcaccaaggatggaccaagaccccctccagagcaaggaggccccctcagccctgtgtttacagccgctgatgtgtctaagaagcatgtggtcactttcatgttcctccctaactccctaacctgagaaccctgggggctgggggcagttcgagcctcctctcccttctgtgagtcactcccagagccgtggcccatgggaaggatagagtgtgtgtgtccttggggcctggggggatgttgcttgtcagctccctccctcagccctgcccactctgagacaataaaactgccctct

SEQ ID NO: 27040 - DNA, 536 bp, Macaca Mulatta
ctgaggcgcatgcaggagatgctgcagaggatgaagcagcagatgcaggaccagtgacgctcgtcgcggacacaccgtccgtctccgggacgccctcccacccctggaccccagaccggactgttcccgacccggagacgcggggccacagcccccagctgaccctaatttattctcagcaccaccccctcccaggtcattcgtatctgcttccgaggggcctggactgtagcccccgcccagctggccctctctggccttgggggatcaggagcgaagttgggcggtacttcaaagatccgcctctcttgcccttcccccgcccccagacggtcacaccacccaaactgcaggccctgctctagcaggcaggcaaacctaggcagaagaggattcccagggtcctgggtctgttgcctgccccagtgctgcagaacggacttgggagccctcctttgcctgctcccgcgggtcacccagcaagtgctgagaccccattttctgtcgaggcgggccgggtcttcccttagccccag

SEQ ID NO: 27041 - DNA, 3263 bp, Macaca Mulatta
  misc_feature (1)...(3263): n = A,T,C or G
gcagctgcacacaaacctgtgatttccgtccatcctccatggaccacattcttcaaaggagagagagtgactctgacttgcaatggattccaattctatgcaacagagaaaacaacatggtatcagcactattggagagaaaagttgaccgtaaccccaggaaacaccctcgaggttcgggaatctggactgtacagatgccaggcccagggctccccgcaaagtaaccctgtgcgcttgctcttttcttcagnnnnnnnnnnnnnnnnnnnnnnnnnnnnnnnnnnnnnnnnnnnnnnnnnnnnnnnnnnnnnnnnnnnnnnnnnnnnnnnnnnnnnnnnnnnnnnnnnnnnnnnnnnnnnnnnnnnnnnnnnnnnnnnnnnnnnnnnnnnnnnnnnnnnnnnnnnnnnnnnnnnnnnnnnnnnnnnnnnnnnnnnnnnnnnnnnnnnnnnnnnnnnnnnnnnnnnnnnnnnnnnnnnnnnnnnnnnnnnnnnnnnnnnnnnnnnnnnnnnnnnnnnnnnnnnnnnnnnnnnnnnnnnnnnnnnnnnnnnnnnnnnnnnnnnnnnnnnnnnnnnnnnnnnnnnnnnnnnnnnnnnnnnnnnnnnnnnnnnnnnnnnnnnnnnnnnnnnnnnnnnnnnnnnnnnnnnnnnnnnnnnnnnnnnnnnnnnnnnnnnnnnnnnnnnnnnnnnnnnnnnnnnnnnnnnnnnnnnnnnnnnnnnnnnnnnnnnnnnnnnnnnnnnnnnnnnnnnnnnnnnnnnnnnnnnnnnnnnnnnnnnnnnnnnnnnnnnnnnnnnnnnnnnnnnnnnnnnnnnnnnnnnnnnnnnnnnnnnnnnnnnnnnnnnnnnnnnnnnnnnnnnnnnnnnnnnnnnnnnnnnnnnnnnnnnnnnnnnnnnnnnnnnnnnnnnnnnnnnnnnnnnnnnnnnnnnnnnnnnnnnnnnnnnnnnnnnnnnnnnnnnnnnnnnnnnnnnnnnnnnnnnnnnnnnnnnnnnnnnnnnnnnnnnnnnnnnnnnnnnnnnnnnnnnnnnnnnnnnnnnnnnnnnnnnnnnnnnnnnnnnnnnnnnnnnnnnnnnnnnnnnnnnnnnnnnnnnnnnnnnnnnnnnnnnnnnnnnnnnnnnnnnnnnnnnnnnnnnnnnnnnnnnnnnnnnnnnnnnnnnnnnnnnnnnnnnnnnnnnnnnnnnnnnnnnnnnnnnnnnnnnnnnnnnnnnnnnnnnnnnnnnnnncaggcttcctcccactccaggcccaggagactcctcccattccatctaccctgcccaggtggagcttcagtcgnnnnnnnnnnnngtacaccccaaagagggagatttgatgtactctgagatccagactattcggctgggagaagaaggggaagnnnnnnnnnnnnnnnnnnnnnnnnnnnnnnnnnnnnnnnnnnnnnnnnnnnnnnnnnnnnnnnnnnnnnnnnnnnnnnnnnnnnnnnnnnnnnnnnnnnnnnnnnnnnnnnnnnnnnnnnnnnnnnnnnnnnnnnnnnnnnnnnnnnnnnnnnnnnnnnnnnnnnnnnnnnnnnnnnnnnnnnnnnnnnnnnnnnnnnnnnnnnnnnnnnnnnnnnnnnnnnnnnnnnnnnnnnnnnnnnnnnnnnnnnnnnnnnnnnnnnnnnnnnnnnnnnnnnnnnnnnnnnnnnnnnnnnnnnnnnnnnnnnnnnnnnnnnnnnnnnnnnnnnnnnnnnnnnnnnnnnnnnnnnnnnnnnnnnnnnnnnnnnnnnnnnnnnnnnnnnnnnnnnnnnnnnnnnnnnnnnnnnnnnnnnnnnnnnnnnnnnnnnnnnnnnnnnnnnnnnnnnnnnnnnnnnnnnnnnnnnnnnnnnnnnnnnnnnnnnnnnnnnnnnnnnnnnnnnnnnnnnnnnnnnnnnnnnnnnnnnnnnnnnnnnnnnnnnnnnnnnnnnnnnnnnnnnnnnnnnnnnnnnnnnnnnnnnnnnnnnnnnnnnnnnnnnnnnnnnnnnnnnnnnnnnnnnnnnnnnnnnnnnnnnnnnnnnnnnnnnnnnnnnnnnnnnnnnnnnnnnnnnnnnnnnnnnnnnnnnnnnnnnnnnnnnnnnnnnnnnnnnnnnnnnnnnnnnnnnnnnnnnnnnnnnnnnnnnnnnnnnnnnnnnnnnnnnnnnnnnnnnnnnnnnnnnnnnnnnnnnnnnnnnnnnnnnnnnnnnnnnnnnnnnnnnnnnnnnnnnnnnnnnnnnnnnnnnnnnnnnnnnnnnnnnnnnnnnnnnnnnnnnnnnnnnnnnnnnnnnnnnnnnnnnnnnnnnnnnnnnnnnnnnnnnnnnnnnnnnnnnnnnnnnnnnnnnnnnnnnnnnnnnnnnnnnnnnnnnnnnnnnnnnnnnnnnnnnnnnnnnnnnnnnnnnnnnnnnnnnnnnnnnnnnnnnnnnnnnnnnnnnnnnnnnnnnnnnnnnnnnnnnnnnnnnnnnnnnnnnnnnnnnnnnnnnnnnnnnnnnnnnnnnnnnnnnnnnnnnnnnnnnnnnnnnnnnnnnnnnnnnnnnnnnnnnnnnnnnnnnnnnnnnnnnnnnnnnnnnnnnnnnnnnnnnnnnnnnnnnnnnnnnnnnnnnnnnnnnnnnnnnnnnnnnnnnnnnnnnnnnnnnnnnnnnnnnnnnnnnnnnnnnnnnnnnnnnnnnnnnnnnnnnnnnnnnnnnnnnnnnnnnnnnnnnnnnnnnnnnnnnnnnnnnnnnnnnnnnnnnnnnnnnnnnnnnnnnnnnnnnnnnnnnnnnnnnnnnnnnnnnnnnnnnnnnnnnnnnnnnnnnnnnnnnnnnnnnnnnnnnnnnnnnnnnnnnnnnnnnnnnnnnnnnnnnnnnnnnnnnnnnnnnnnnnnnnnnnnnnnnnnnnnnnnnnnnnnnnnnnnnnnnnnnnnnnnnnnnnnnnnnnnnnnnnnnnnnnnnnnnnnnnnnnnnnnnnnnnnnnnnnnnnnnnnnnnnnnnnnnnnnnnnnnnnnnnnnnnnnnnnnnnnnnnnnnnnnnnnnnnnnnnnnnnnnnnnnnnnnnnnnnnnnnnnnnnnnnnnnnnnnnnnnnnnnnnnnnnnnnnnnnnnnnnnnaccaaaaggaatgcatgggtcttgtttggatcctgactcaaattaagaaaaaaaaattacctatgagatactaagaaaaatgtgtacactaatattaagaaattgttgtgtgttttatatataaatgatagtttattgtagtgatgtttttataaaagcaaaaggatattcacttttatagcttatactgaagtattagattaaagtttattaa

SEQ ID NO: 27042 - DNA, 3773 bp, Macaca Mulatta
  misc_feature (1)...(3773): n = A,T,C or G
atggactacagtcaccaaacgtccctagtcccgtgtggacaagataaatacatttccannnnnnnnnnnnnnnnnnnnnnnnnnnnnnnnnnnnnnnnnnnnnnnnnnnnnnnnnnnnnnnnnnnnnnnnnnggaagaagacgagttcatcgtggagggactcctgaacatctcctggggcctgcgccgccccattcgcctgcagatgcaggatgacaacgagcgcattcggccccctccgtcctcctcctcctggcactccggctgtaacctgggggctcagggnnnnnnnnnnnnnnnnnnnnnnnnnnnnnnnnnnnnnnnnnnnnnnnnnnnnnnnnnnnnnnnnnnnnnnnnnnnnnnnnnnnnnnagacaccaggggcctgaagcccctgcaggaggacaccccacagctgatgttctcacgcagtgatgttggggtgcgtcgccgtggcaatgtgaggacgcctagtgaccagcggcgaatcagacgccaccgcttctccatcaatggccatttctacaaccataagnnnnnnnnnnnnnnnnnnnnnnnnnnnnnnnnnnnnnnnnnnnnnnnnnnnnnnnnnnnnnnnnnnnnnnnnnnnnnnnnnnnnnnnnnnnnnnnnnnnnnnnnnnnnnnnnnnnnnnnnnnnnnnnnnnnnnnnnnnnnnnnnnnnnnnnnnnnnnnnnnnnnnnnnnnnnnnnnnnnnnnnnnnnnnnnnnnnnnnnnnnnnnnnnnnnnnnnnnnnnnnnnnnnnnnnnnnnnnnnnnnnnnnnnnnnnnnnnnnnnnnnnnnnnnnnnnnnnnnnnnnnnnnnnnnnnnnnnnnnnnnnnnnnnnnnnnnnnnnnnnnnnnnnnnnnnnnnnnnnnnnnnnnnnnnnnnnnnnnnnnnnnnnnnnnnnnnnnnnnnnnnnnnnnnnnnnnnnnnnnnnnnnnnnnnnnnnnnnnnnnnnnnnnnnnnnnnnnnnnnnnnnnnnnnnnnnnnnnnnnnnnnnnnnnnnnnnnnnnnnnnnnnnnnnnnnnnnnnnnnnnnnnnnnnnnnnnnnnnnnnnnnnnnnnnnnnnnnnnnnnnnnnnnnnnnnnnnnnnnnnnnnnnnnnnnnnnnnnnnnnnnnnnnnnnnnnnnnnnnnnnnnnnnnnnnnnnnnnnnnnnnnnnnnnnnnnnnnnnnnnnnnnnnnnnnnnnnnnnnnnnnnnnnnnnnnnnnnnnnnnnnnnnnnnnnnnnnnnnnnnnnnnnnnnnnnnnnnnnnnnnnnnnnnnnnnnnnnnnnnnnnnnnnnnnnnnnnnnnnnnnnnnnnnnnnnnnnnnnnnnnnnnnnnnnnnnnnnnnnnnnnnnnnnnnnnnnnnnnnnnnnnnnnnnnnnnnnnnnnnnnnnnnnnnnnnnnnnnnnnnnnnnnnnnnnnnnnnnnnnnnnnnnnnnnnnnnnnnnnnnnnnnnnnnnnnnnnnnnnnnnnnnnnnnnnnnnnnnnnnnnnnnnnnnnnnnnnnnnnnnnnnnnnnnnnnnnnnnnnnnnnnnnnnnnnnnnnnnnnnnnnnnnnnnnnnnnnnnnnnnnnnnnnnnnnnnnnnnnnnnnnnnnnnnnnnnnnnnnnnnnnnnnnnnnnnnnnnnnnnnnnnnnnnnnnnnnnnnnnnnnnnnnnnnnnnnnnnnnnnnnnnnnnnnnnnnnnnnnnnnnnnnnnnnnnnnnnnnnnnnnnnnnnnnnnnnnnnnnnnnnnnnnnnnnnnnnnnnnnnnnnnnnnnnnnnnnnnnnnnnnnnnnnnnnnnnnnnnnnnnnnnnnnnnnnnnnnnnnnnnnnnnnnnnnnnnnnnnnnnnnnnnnnnnnnnnnnnnnnnnnnnnnnnnnnnnnnnnnnnnnnnnnnnnnnnnnnnnnnnnnnnnnnnnnnnnnnnnnnnnnnnnnnnnnnnnnnnnnnnnnnnnnnnnnnnnnnnnnnnnnnnnnnnnnnnnnnnnnnnnnnnnnnnnnnnnnnnnnnnnnnnnnnnnnnnnnnnnnnnnnnnnnnnnnnnnnnnnnnnnnnnnnnnnnnnnnnnnnnnnnnnnnnnnnnnnnnnnnnnnnnnnnnnnnnnnnnnnnnnnnnnnnnnnnnnnnnnnnnnnnnnnnnnnnnnnnnnnnnnnnnnnnnnnnnnnnnnnnnnnnnnnnnnnnnnnnnnnnnnnnnnnnnnnnnnnnnnnnnnnnnnnnnnnnnnnnnnnnnnnnnnnnnnnnnnnnnnnnnnnnnnnnnnnnnnnnnnnnnnnnnnnnnnnnnnnnnnnnnnnnnnnnnnnnnnnnnnnnnnnnnnnnnnnnnnnnnnnnnnnnnnnnnnnnnnnnnnnnnnnnnnnnnnnnnnnnnnnnnnnnnnnnnnnnnnnnnnnnnnnnnnnnnnnnnnnnnnnnnnnnnnnnnnnnnnnnnnnnnnnnnnnnnnnnnnnnnnnnnnnnnnnnnnnnnnnnnnnnnnnnnnnnnnnnnnnnnnnnnnnnnnnnnnnnnnnnnnnnnnnnnnnnnnnnnnnnnnnnnnnnnnnnnnnnnnnnnnnnnnnnnnnnnnnnnnnnnnnnnnnnnnnnnnnnnnnnnnnnnnnnnnnnnnnnnnnnnnnnnnnnnnnnnnnnnnnnnnnnnnnnnnnnnnnnnnnnnnnnnnnnnnnnnnnnnnnnnnnnnnnnnnnnnnnnnnnnnnnnnnnnnnnnnnnnnnnnnnnnnnnnnnnnnnnnnnnnnnnnnnnnnnnnnnnnnnnnnnnnnnnnnnnnnnnnnnnnnnnnnnnnnnnnnnnnnnnnnnnnnnnnnnnnnnnnnnnnnnnnnnnnnnnnnnnnnnnnnnnnnnnnnnnnnnnnnnnnnnnnnnnnnnnnnnnnnnnnnnnnnnnnnnnnnnnnnnnnnnnnnnnnnnnnnnnnnnnnnnnnnnnnnnnnnnnnnnnnnnnnnnnnnnnnnnnnnnnnnnnnnnnnnnnnnnnnnnnnnnnnnnnnnnnnnnnnnnnnnnnnnnnnnnnnnnnnnnnnnnnnnnnnnnnnnnnnnnnnnnnnnnnnnnnnnnnnnnnnnnnnnnnnnnnnnnnnnnnnnnnnnnnnnnnnnnnnnnnnnnnnnnnnnnnnnnnnnnnnnnnnnnnnnnnnnnnnnnnnnnnnnnnnnnctttgatttgcactagcactacaatagtgttaaatgtggaaatactgcaacatgtccagttggccagataactttccaagggagcaatactaaggcagactcacctttttaaagatgggaggtcaggaggtggaagtgagaggagatcccattttacacaacacacttccacataatgcagagcacacttttccattttgtcctgccctgtttagaggtcatttctcacatcctaagaacctgatcagaaattttggacaggttctttgaaatagcagcagttgaaaaagagacgctttgccacagtgtggagcagattttctcactggtatcacatgctcttgcagttttgaacttttcaaccgatttgtgggagtttacgtaattgtgtgcaatgaacctgaaattgcgtaaagaacaaaagaccaatttattgggttggnnnnnnnnccaacttgtgaaaagcagtttagctgcatctnnnnnnnnnnnnnnnnnnnnnnnnaggggcttatgttacaaggtgatcaagtgaaggaaaaacctgagcccatctggctgggatggtggaattaagcacaaggtcatattctctgtgatcacatgagagggaaggtgatgacttaaatggcaaggaggttatcttggggagaggctgagaaaacacaaaagata

SEQ ID NO: 27043 - DNA, 312 bp, Macaca Mulatta
gtgatgaaagtagtggagaaggaagtggaagtggctgtgagtatcagcagtgcccttcagagtttgactataatgccactgaccacgctgggaagagtgccaatgagaaagccgacagtgcaggtgtccgtcctggagcacaggcctacctcctcactgccttctgcatcttgttcctggttatgcagagagagtggagataattctcaaactctgagaaaaagtgttcatcatcaaaaagttaaaaggcaccagttatcacttttctaccatcctagtgactttgctttttaaatgagtgaacaacaatgt

SEQ ID NO: 27044 - DNA, 854 bp, Macaca Mulatta
  misc_feature (1)...(854): n = A,T,C or G
aggccacacagctggactccgccttcatccggaaggagccctttggcctggtcctcatcattgcgccctggaactatcccctgaacctgacgctggtgcccctcgtgggtgccctcgctgcaggnctgcagggaactgcgtggtgctgaagccatcagagattagcaagagcatggagaaggtcctggccgaagtgctgccccgatacctggacnnnnnnnnnnnnnnnnnnnnnnnnnnnnnnnnnnnnnnnnnnnnnnnnnnnnnnnnnnnnnnnnnnnnnnnnnnnnnnnnnnnnnnnnnnnnnnnnnnnnnnnnnnnnnnnnnnnnnnnnnnnnnnnnnnnnnnnnnnnnnnnnnnnnnnnnnnnnnnnnnnnnnnnnnnnnnnnnnnnnnnnnnnnnnnnnnnnnnnnnnnnnnnnnnnnnnnnnnnnnnnnnnnnnnnnnnnnnnnnnnnnnnnnnnnnnnnnnnnnnnnnnnnnnnnnnnnnnnnnnnnnnnnnnnnnnnnnnnnnnnnnnnnnnnnnnnnnnnnnnnnnnnnnnnnnnnnnnnnnnnnnnnnnnnnnnnnnnnnnnnnnnnnnnnnnnnnnnnnnnnnnnnnnnnnnnnnnnnnnnnnnnnnnnnnnnnnnnnnnnnnnnnnnnnnnnnnnnnnnnnnnnnnnnnnnnnnnnnnnnnnnnnnnngcccccacagtgctggtggacgtgcaggagacggagccggtgatgcaggaggagatcttcgggcccatcctgcccatcgtgaacgtgcggagtgtggacgaggccatcgagttcatcaacaggcgggagaagcccctggccctgtacgccttctccaacagcagccaggtgg

SEQ ID NO: 27045 - DNA, 785 bp, Macaca Mulatta
  misc_feature (1)...(785): n = A,T,C or G
gggctggtgtttgcctgcagcaagatggcggcggtctcaatgtcagtggcgctgaggcaggcgttgtggcgaagggtagtggctgtagctgccctttccgtttccagggttccgaccaggtcattgagcacttccacatggagattggcacaggaccagactcaagacacacaactcataacagttgatgaaaaattggatatcactactttaactggcgttccagaagagcatataaaaactagaaaagtcaggatctttgttcctgctcgcaataacatgcagtctggagtaaacaacacaaagaaatggaagatggagtttgataccagggagcgatgggaaaatcctttgatgggttgggcatcaacggctgatcccttatccaacatggttctaaccttccgtactaaagaagatgcagtttcctttgctgaaaaaaatggatggagctatgacgttgaagagaggaaggttccaaaacccaagtccaagtcttatggtgcaaacttttcttggaacaaaagaacaagagtatccacaaaataggttggcactgactatatctgtgcttgactgtgaataaagtcagctgtgcagtatttatagtccatatacatcgcttaatctcctaataaatttgacctttaaactataaaaaannnnnnnnnnnnnnnnnnnnnnnncttgtcgggccgccntcggcccctcgaagaagcttttcatagaccaattcgttttgggcgcggcggggcccccaagtagggttaagtgaaaacaatggc

SEQ ID NO: 27046 - DNA, 2263 bp, Macaca Mulatta
  misc_feature (1)...(2263): n = A,T,C or G
gcgcgcgcggcgcagcagctccagattcactgctctcccctgcagctccccgcgcccccgtcgctgtcgccgcctcggtgtcccccagctcccgtcgcgctcttaggacagcgccgccaccgccgcctggccctgcctgcctcctgcgccgcgcagccctcgcgagcgccccggatggcgctttacccccaggannnnnnnnnnnnnnnnnnnnnnnnnnnnnnnnnnnnnnnnnnnnnnnnnnnnnnnnnnnnnnnnnnnnnnnnnnnnnnnnnnnnnnnnnnnnnnnnnnnnnnnnnnnnnnnnnnnnnnnnnnnnnnnnnnnnnnnnnnnnnnnnnnnnnnnnnnnnnnnnnnnnnnnnnnnnnnnnnnnnnnnnnnnnnnnnnnnnnnnnnnnnnnnnnnnnnnnnnnnnnnnnnnnnnnnnnnnnnnnnnnnnnnnnnnnnnnnnnnnnnnnnnnnnnnnnnnnnnnnnnnnnnnnnnnnnnnnnnnnnnnnnnnnnnnnnnnnnnnnnnnnnnnnnnnnnnnnnnnnnnnnnnnnnnnnnnnnnnnnnnnnnnnnnnnnnnnnnnnnnnnnnnnnnnnnnnnnnnnnnnnnnnnnnnnnnnnnnnnnnnnnnnnnnnnnnnnnnnnnnnnnnnnnnnnnnnnnnnnnnnnnnnnnnnnnnnnnnnnnnnnnnnnnnnnnnnnnnnnnnnnnnnnnnnnnnnnnnnnnnnnnnnnnnnnnnnnnnnnnnnnnnnnnnnnnnnnnnnnnnnnnnnnnnnnnnnnnnnnnnnnnnnnnnnnnnnnnnnnnnnnnnnnnnnnnnnnnnnnnnnnnnnnnnnnnnnnnnnnnnnnnnnnnnnnnnnnnnnnnnnnnnnnnnnnnnnnnnnnnnnnnnnnnnnnnnnnnnnnnnnnnnnnnnnnnnnnnnnnnnnnnnnnnnnnnnnnnnnnnnnnnnnnnnnnnnnnnnnnnnnnnnnnnnnnnnnnnnnnnnnnnnnnnnnnnnnnnnnnnnnnnnnnnnnnnnnnnnnnnnnnnnnnnnnnnnnnnnnnnnnnnnnnnnnnnnnnnnnnnnnnnnnnnnnnnnnnnnnnnnnnnnnnnnnnnnnnnnnnnnnnnnnnnnnnnnnnnnnnnnnnnnnnnnnnnnnnnnnnnnnnnnnnnnnnnnnnnnnnnnnnnnnnnnnnnnnnnnnnnnnnnnnnnnnnnnnnnnnnnnnnnnnnnnnnnnnnnnnnnnnnnnnnnnnnnnnnnnnnnnnnnnnnnnnnnnnnnnnnnnnnnnnnnnnnnnnnnnnnnnnnnnnnnnnnnnnnnnnnnnnnnnnnnnnnnnnnnnnnnnnnnnnnnnnnnnnnnnnnnnnnnnnnnnnnnnnnnnnnnnnnnnnnnnnnnnnnnnnnnnnnnnnnnnnnnnnnnnnnnnnnnnnnnnnnnnnnnnnnnnnnnnnnnnnnnnnnnnnnnnnnnnnnnnnnnnnnnnnnnnnnnnnnnnnnnnnnnnnnnnnnnnnnnnnnnnnnnnnnnnnnnnnnnnnnnnnnnnnnnnnnnnnnnnnnnnnnnnnnnnnnnnnnnnnnnnnnnatttggttttacattatcctgtatatacctaattatgtgcactgggagagtaatttattcttcattatcatttgtaaacattgttttttcacatttttgtagttgtctataatgtaagcttgtggtttgattattgtttctaccctgatcagctgtttaatctatttgggaaatgaagatgcgcatcttaaagaatgaaaaattttcactgagtattataatgtctagttccaactttgcatactataacaaaggaagaacatgttgctattgaattctaacctctttgactctgaagttgaacgaagtgtttaactgtctctatttgatctattttttacctgtttaccacatttgtgaaggtgaaattgttcatggagtgaattagaaatatacgaagcagaactgttctattcagaaagctattagacttctcatttattttcattaaggtgatttgccactacttattcgcatgatcttaaattattcaagtatttttaaatatccaatttgttgtgattttcagcacctgggaagtaataccaataatattttagaaaatcgaagacagttctctttctgctactgataacagtcattgtcataataaaacaaatgatttcctcaaataacaaagaaaaatgatacctataaatatatttataaatggtgtcatttatgaaaaatgtttaattacttaccaatttaaga

SEQ ID NO: 27047 - DNA, 3429 bp, Macaca Mulatta
  misc_feature (1)...(3429): n = A,T,C or G
gctactacatgctggagaacagacccaggaacatctacggcatggtctgctactcctgcctcctggcgccccccaacaccaaggaatgtgnnnnnnnnnnnnnnnnnnnnnnnnnnnnnnnnnnnnnnnnnnnnnnnnnnnnnnnnnnnnnnnnnnnnnnnnnnnnnnnnnnnnnnnnnnnnnnnnnnnnnnnnnnnnnnnnnnnnnnnnnnnnnnnnnnnnnnnnnnnnnnnnnnnnnnnnnnnnnnnnnnnnnnnnnnnnnnnnnnnnnnnnnnnnnnnnnnnnnnnnnnnnnnnnnnnnnnnnnnnnnnnnnnnnnnnnnnnnnnnnnnnnnnnnnnnnnnnnnnnnnnnnnnnnnnnnnnnnnnnnnnnnnnnnnnnnnnnnnnnnnnnnnnnnnnnnnnnnnnnnnnnnnnnnnnnnnnnnnnnnnnnnnnnnnnnnnnnnnnnnnnnnnnnnnnnnnnnnnnnnnnnnnnnnnnnnnnnnnnnnnnnnnnnnnnnnnnnnnnnnnnnnnnnnnnnnnnnnnnnnnnnnnnnnnnnnnnnnnnnnnnnnnnnnnnnnnnnnnnnnnnnnnnnnnnnnnnnnnnnnnnnnnnnnnnnnnnnnnnnnnnnnnnnnnnnnnnnnnnnnnnnnnnnnnnnnnnnnnnnnnnnnnnnnnnnnnnnnnnnnnnnnnnnnnnnnnnnnnnnnnnnnnnnnnnnnnnnnnnnnnnnnnnnnnnnnnnnnnnnnnnnnnnnnnnnnnnnnnnnnnnnnnnnnnnnnnnnnnnnnnnnnnnnnnnnnnnnnnnnnnnnnnnnnnnnnnnnnnnnnnnnnnnnnnnnnnnnnnnnnnnnnnnnnnnnnnnnnnnnnnnnnnnnnnnnnnnnnnnnnnnnnnnnnnnnnnnnnnnnnnnnnnnnnnnnnnnnnnnnnnnnnnnnnnnnnnnnnnnnnnnnnnnnnnnnnnnnnnnnnnnnnnnnnnnnnnnnnnnnnnnnnnnnnnnnnnnnnnnnnnnnnnnnnnnnnnnnnnnnnnnnnnnnnnnnnnnnnnnnnnnnnnnnnnnnnnnnnnnnnnnnnnnnnnnnnnnnnnnnnnnnnnnnnnnnnnnnnnnnnnnnnnnnnnnnnnnnnnnnnnnnnnnnnnnnnnnnnnnnnnnnnnnnnnnnnnnnnnnnnnnnnnnnnnnnnnnnnnnnnnnnnnnnnnnnnnnnnnnnnnnnnnnnnnnnnnnnnnnnnnnnnnnnnnnnnnnnnnnnnnnnnnnnnnnnnnnnnnnnnnnnnnnnnnnnnnnnnnnnnnnnnnnnnnnnnnnnnnnnnnnnnnnnnnnnnnnnnnnnnnnnnnnnnnnnnnnnnnnnnnnnnnnnnnnnnnnnnnnnnnnnnnnnnnnnnnnnnnnnnnnnnnnnnnnnnnnnnnnnnnnnnnnnnnnnnnnnnnnnnnnnnnnnnnnnnnnnnnnnnnnnnnnnnnnnnnnnnnnnnnnnnnnnnnnnnnnnnnnnnnnnnnnnnnnnnnnnnnnnnnnnnnnnnnnnnnnnnnnnnnnnnnnnnnnnnnnnnnnnnnnnnnnnnnnnnnnnnnnnnnnnnnnnnnnnnnnnnnnnnnnnnnnnnnnnnnnnnnnnnnnnnnnnnnnnnnnnnnnnnnnnnnnnnnnnnnnnnnnnnnnnnnnnnnnnnnnnnnnnnnnnnnnnnnnnnnnnnnnnnnnnnnnnnnnnnnnnnnnnnnnnnnnnnnnnnnnnnnnnnnnnnnnnnnnnnnnnnnnnnnnnnnnnnnnnnnnnnnnnnnnnnnnnnnnnnnnnnnnnnnnnnnnnnnnnnnnnnnnnnnnnnnnnnnnnnnnnnnnnnnnnnnnnnnnnnnnnnnnnnnnnnnnnnnnnnnnnnnnnnnnnnnnnnnnnnnnnnnnnnnnnnnnnnnnnnnnnnnnnnnnnnnnnnnnnnnnnnnnnnnnnnnnnnnnnnnnnnnnnnnnnnnnnnnnnnnnnnnnnnnnnnnnnnnnnnnnnnnnnnnnnnnnnnnnnnnnnnnnnnnnnnnnnnnnnnnnnnnnnnnnnnnnnnnnnnnnnnnnnnnnnnnnnnnnnnnnnnnnnnnnnnnnnnnnnnnnnnnnnnnnnnnnnnnnnnnnnnnnnnnnnnnnnnnnnnnnnnnnnnnnnnnnnnnnnnnnnnnnnnnnnnnnnnnnnnnnnnnnnnnnnnnnnnnnnnnnnnnnnnnnnnnnnnnnnnnnnnnnnnnnnnnnnnnnnnnnnnnnnnnnnnnnnnnnnnnnnnnnnnnnnnnnnnnnnnnnnnnnnnnnnnnnnnnnnnnnnnnnnnnnnnnnnnnnnnnnnnnnnnnnnnnnnnnnnnnnnnnnnnnnnnnnnnnnnnnnnnnnnnnnnnnnnnnnnnnnnnnnnnnnnnnnnnnnnnnnnnnnnnnnnnnnnnnnnnnnnnnnnnnnnnnnnnnnnnnnnnnnnnnnnnnnnnnnnnnnnnnnnnnnnnnnnnnnnnnnnnnnnnnnnnnnnnnnnnnnnnnnnnnnnnnnnnnnnnnnnnnnnnnnnnnnnnnnnnnnnnnnnnnnnnnnnnnnnnnnnnnnnnnnnnnnnnnctgtgtttattactaaattaaaccaaagtttcttgacttataaaagcgagggttgtaaaaatgacaaagttgcatgactgaaaaaatgctttggggggaaaaatcagtcatatctttaaacaccaaataagcaatttcccaccaaacgaatgtagtacatactgtgagaggatcataatgaggtcctgaatatttaatatcatcatttactgtgtctgtttgctgctgtttttcagaacctatttggtttatcttgcaagctaaatactccacggcagagcttaattatccttttaattcctctttgaaatcctgtggtgcccccttccccctgcattgtgataatgatgatgagtctccctttaattagactgcaaatgtcacttgtgatgagtgtgccgttccaggataacagcttgtaccctcctcagaatgttttcagtgaaggagtagggtggctgttctctgctcctggtgctttggcctcatttcacgctattggaattctgggactgtaaggccagccagtgtcagctcatgttccgctggctctccacctgccatttttagggagctattccttatatagttacacattctcttgtcatttacttatttggaaacatgggatttactctgacaagctttagcctttgttatgggattcagaacaatgagatcataataattctcactgaacaaagctgggactccatcctgccatttttgtgtggagatattactttgcaatactttaaaacatttagaaaacaccccagggtaggtctgtggcccttagacagtgaagtcttaattgtcaatatttttgtctaactctgtatatatataacttattatattttataatctcaataaacacactaataaga

SEQ ID NO: 27048 - DNA, 207 bp, Macaca Mulatta
  misc_feature (1)...(207): n = A,T,C or G
agatcaataagatggagtggtggagccgcttggtgtccagtgaccctgagatcaataccaagaagattaaccctgagaattccaagnagctgtcagacctggacagtgagactcgcagcatggtggaaaagatgatgtatgaccagagacagaagtccatggggctgccaacctcagagaacagaagaaacaggagatctgaagaag

SEQ ID NO: 27049 - DNA, 3191 bp, Macaca Mulatta
  misc_feature (1)...(3191): n = A,T,C or G
cttggtgttggatgagcagttaaatgaattccattgcctctgggatgacagnnnnnnnnnnnnnnnnnnnnnnnnnnnnnnnnnnnnnnnnnnnnnnnnnnnnnnnnnnnnnnnnnnnnnnnnnnnnnnnnnnnnnnnnnnnnnnnnnnnnnnnnnnnnnnnnnnnnnnnnnnnnnnnnnnnnnnnnnnnnnnnnnnnnnnnnnnnnnnnnnnnnnnnnnnnnnnnnnnnnnnnnnnnnnnnnnnnnnnnnnnnnnnnnnnnnnnnnnnnnnnnnnnnnnnnnnnnnnnnnnnnnnnnnnnnnnnnnnnnnnnnnnnnnnnnnnnnnnnnnnnnnnnnnnnnnnnnnnnnnnnnnnnnnnnnnnnnnnnnnnnnnnnnnnnnnnnnnnnnnnnnnnnnnnnnnnnnnnnnnnnnnnnnnnnnnnnnnnnnnnnnnnnnnnnnnnnnnnnnnnnnnnnnnnnnnnnnnnnnnnnnnnnnnnnnnnnnnnnnnnnnnnnnnnnnnnnnnnnnnnnnnnnnnnnnnnnnnnnnnnnnnnnnnnnnnnnnnnnnnnnnnnnnnnnnnnnnnnnnnnnnnnnnnnnnnnnnnnnnnnnnnnnnnnnnnnnnnnnnnnnnnnnnnnnnnnnnnnnnnnnnnnnnnnnnnnnnnnnnnnnnnnnnnnnnnnnnnnnnnnnnnnnnnnnnnnnnnnnnnnnnnnnnnnnnnnnnnnnnnnnnnnnnnnnnnnnnnnnnnnnnnnnnnnnnnnnnnnnnnnnnnnnnnnnnnnnnnnnnnnnnnnnnnnnnnnnnnnnnnnnnnnnnnnnnnnnnnnnnnnnnnnnnnnnnnnnnnnnnnnnnnnnnnnnnnnnnnnnnnnnnnnnnnnnnnnnnnnnnnnnnnnnnnnnnnnnnnnnnnnnnnnnnnnnnnnnnnnnnnnnnnnnnnnnnnnnnnnnnnnnnnnnnnnnnnnnnnnnnnnnnnnnnnnnnnnnnnnnnnnnnnnnnnnnnnnnnnnnnnnnnnnnnnnnnnnnnnnnnnnnnnnnnnnnnnnnnnnnnnnnnnnnnnnnnnnnnnnnnnnnnnnnnnnnnnnnnnnnnnnnnnnnnnnnnnnnnnnnnnnnnnnnnnnnnnnnnnnnnnnnnnnnnnnnnnnnnnnnnnnnnnnnnnnnnnnnnnnnnnnnnnnnnnnnnnnnnnnnnnnnnnnnnnnnnnnnnnnnnnnnnnnnnnnnnnnnnnnnnnnnnnnnnnnnnnnnnnnnnnnnnnnnnnnnnnnnnnnnnnnnnnnnnnnnnnnnnnnnnnnnnnnnnnnnnnnnnnnnnnnnnnnnnnnnnnnnnnnnnnnnnnnnnnnnnnnnnnnnnnnnnnnnnnnnnnnnnnnnnnnnnnnnnnnnnnnnnnnnnnnnnnnnnnnnnnnnnnnnnnnnnnnnnnnnnnnnnnnnnnnnnnnnnnnnnnnnnnnnnnnnnnnnnnnnnnnnnnnnnnnnnnnnnnnnnnnnnnnnnnnnnnnnnnnnnnnnnnnnnnnnnnnnnnnnnnnnnnnnnnnnnnnnnnnnnnnnnnnnnnnnnnnnnnnnnnnnnnnnnnnnnnnnnnnnnnnnnnnnnnnnnnnnnnnnnnnnnnnnnnnnnnnnnnnnnnnnnnnnnnnnnnnnnnnnnnnnnnnnnnnnnnnnnnnnnnnnnnnnnnnnnnnnnnnnnnnnnnnnnnnnnnnnnnnnnnnnnnnnnnnnnnnnnnnnnnnnnnnnnnnnnnnnnnnnnnnnnnnnnnnnnnnnnnnnnnnnnnnnnnnnnnnnnnnnnnnnnnnnnnnnnnnnnnnnnnnnnnnnnnnnnnnnnnnnnnnnnnnnnnnnnnnnnnnnnnnnnnnnnnnnnnnnnnnnnnnnnnnnnnnnnnnnnnnnnnnnnnnnnnnnnnnnnnnnnnnnnnnnnnnnnnnnnnnnnnnnnnnnnnnnnnnnnnnnnnnnnnnnnnnnnnnnnnnnnnnnnnnnnnnnnnnnnnnnnnnnnnnnnnnnnnnnnnnnnnnnnnnnnnnnnnnnnnnnnnnnnnnnnnnnnnnnnnnnnnnnnnnnnnnnnnnnnnnnnnnnnnnnnnnnnnnnnnnnnnnnnnnnnnnnnngggtggctataacctgacatccatctcagagtccatggctgcctgcactcgctccctccttggagacccgccacccctgctgaccctgccacggccccctctatcaggggccctggcttcaatcactgagaccatccaagtccatcgcagatactggcgcagcttacgggtcatganaggtagaagacagagagggaccctccagttctaagttggtcaccaagaaggcaccccaaccagccaaacctaggttagctgagcggatgaccacacgagaaaagaaggttctggaagcaggcatgggaaagatcacctcggcatcatctggggaagagtccactccaggccagactaagtcagagacagctgtggtggccctcactcaggaccagtcctcagaggcagccacagggggagccacactggcccagaccatctctgaggcagccgttgggggagccatgctgggccagaccacctcagaggaggctgtcgggggagccactccggaccagaccacctcagagaagactgtgggaggagccactctggaccagaccacctcagaggatgctgttgggggagccacgctgggccagactacctcagaggaggctgtaggaggagctacactggcccagaccacctcggaggcagccatggagggagccacannnnnnnnnnnnnnnnnnnnnnnnnnnnnnnnnnnnnnnnnnnnnnnnnnnnnnnnnnnnnnnnnnnnnnnnnnnnnnnnnnnnnnnnnnnnnnnnnnnnnnnnnnnnnnnnnnnnnnnnnnnnnnnnnnnnnnnnnnnnnnnnnnnnnnnnnnnnnnnnnnnnnnnnnnnnnnnnnnnnnnnnnnnnnnnnnnnnnnnnnnnnnnnnnnnnnnnnnnnnnnnnnnnnnnnnnnnnnnnnnnnnnnnnnnnnnnnnnnnnnnnnnnnnnnnnnnnnnnnnnnnnnnnnnnncaggccatattttatgctgtgacaccactgccctggtgtccccatttggtggcagtatgccccatacctgcagcaggcctagacgtgacccaaccttgtggggactgtggaacaatccaagagaattgggtgtgtctctcttgctatcagg

SEQ ID NO: 27050 - DNA, 657 bp, Macaca Mulatta
cagtgaggaagatatatcatcatcatcatccccactctatcgatgaagaaacctgatgaaccttctagcaccaggtttcacctagaaaggacagaggggcctggccttccctcccacaatgtgccaagtggagtttgagctggcccgcactgccctcaagcagctgaagggtactgtgtgcgatcaggagaaaactgctggtgtatagcttctacaaacagcccacccagagcgactgcaacattcctgccccttcagcctcagatgtgaaagccaaggccaagtaggaggcatggaatgtgaacaaagggatgtttaagatggacaccatgaggatctatgttgccaaagtggaaaagctgaagaagaatgaggctggctaaggacacattagcagacacaaggaagcagcacggctcctctagtacagaatgctctttaaaaactttggtgactgaaatgtcctgaaacaatagcaagtttagctgagacatcaataaatcacttaaactgcatgacagtgactgtctactgctggaaaagagaaacacagggactgtgagtgctcgggaggtgtccaaatgtacaaactggttttttgtatgattttgagtggagttcccagctttcctattttaagagttaggtaggcattta

SEQ ID NO: 27051 - DNA, 3092 bp, Macaca Mulatta
  misc_feature (1)...(3092): n = A,T,C or G
tgcagagaaattggtggaatgccttctcacatcagacaaggagaactggcccaaaactttgaaacttgctttggagagagagaggaacaagttcagtgaactgtggactgtagagaaaggtannnnnnnnnnnnnnnnnnnnnnnnnnnnnnnnnnnnnnnnnnnnnnnnnnnnnnnnnnnnnnnnnnnnnnnnnnnnnnnnnnnnnnnnnnnnnnnnnnnnnnnnnnnnnnnnnnnnnnnnnnnnnnnnnnnnnnnnnnnnnnnnnnnnnnnnnnnnnnnnnnnnnnnnnnnnnnnnnnnnnnnnnnnnnnnnnnnnnnnnnnnnnnnnnnnnnnnnnnnnnnnaggttgtggaaaaaccctggttgcagtccttatatgtgaacatcatcttaaaaaattcccaccaggacaaaaggggaaagttgtcttttttgcaaatcagatcccagtatatgaacagcaggaatctgtattctcaaaatactttgaaagacttgggtnnnnnnnnnnnnnnnnnnnnnnnnnnnnnnnnnnnnnnnnnnnnnnnnnnnnnnnnnnnnnnnnnnnnnnnnnnnnnnnnnnnnnnnnnnnnnnnnnnnnnnnnnnnnnnnnnnnnnnnnnnnnnnnnnnnnnnnnnnnnnnnnnnnnnnnnnnnnnnnnnnnnnnnnnnnnnnnnnnnnnnnnnnnnnnnnnnnnnnnnnnnnnnnnnnnnnnnnnnnnnnnnnnnnnnnnnnnnnnnnnnnnnnnnnnnnnnnnnnnnnnnnnnnnnnnnnnnnnnnnnnnnnnnnnnnnnnnnnnnnnnnnnnnnnnnnnnnnnnnnnnnnnnnnnnnnnnnnnnnnnnnnnnnnnnnnnnnnnnnnnnnnnnnnnnnnnnnnnnnnnnnnnnnnnnnnnnnnnnnnnnnnnnnnnnnnnnnnnnnnnnnnnnnnnnnnnnnnnnnnnnnnnnnnnnnnnnnnnnnnnnnnnnnnnnnnnnnnnnnnnnnnnnnnnnnnnnnnnnnnnnnnnnnnnnnnnnnnnnnnnnnnnnnnnnnnnnnnnnnnnnnnnnnnnnnnnnnnnnnnnnnnnnnnnnnnnnnnnnnnnnnnnnnnnnnnnnnnnnnnnnnnnnnnnnnnnnnnnnnnnnnnnnnnnnnnnnnnnnnnnnnnnnnnnnnnnnnnnnnnnnnnnnnnnnnnnnnnnnnnngaaatataatgatgccctcattatcagtgagcacgcacgagtgaaagatgctttggattacctgaaagacttcttcagcaatgtccgagcagcaggatttgatgagactgagcaagatcttactcagagatttgaannnnnnnnnnnnnnnnnnnnnnnnnnnnnnnnnnnnnnnnnnnnnnnnnnnnnnnnnnnnnnnnnnnnnnnnnnnnnnnnnnnnnnnnnnnnnnnnnnnnnnnnnnnnnnnnnnnnnnnnnnnnnnnnnnnnnnnnnnnnnnnnnnnnngctttaaaaaattggattgaaggaaatcctaaactccattttctaaaacctggcatattgactggacgtggcaaaacaaatcagaacacagnnnnnnnnnnnnnnnnnnnnnnnnnnnnnnnnnnnnnnnnnnnnnnnnnnnnnnnnnnnnnnnnnnnnnnnnnnnnnnnnnnnnnnnnnnnnnnnnnnnnnnnnnnnnnnnnnnnnnnnnnnnnnnnnnnnnnnnnnnnnnnnnnnnnnnnnnnnnnnnnnnnnnnnnnnnnnnnnnnnnnnnnnnnnnnnnnnnnnnnnnnnnnnnnnnnnnnnnnnnnnnnnnnnnnnnnnnnnnnnnnnnnnnnnnnnnnnnnnnnnnnnnnnnnnnnnnnnnnnnnnnnnnnnnnnnnnnnnnnnnnnnnnnnnnnnnnnnnnnnnnnnnnnnnnnnnnnnnnnnnnnnnnnnnnnnnnnnnnnnnnnnnnnnnnnnnnnnnnnnnnnnnnnnnnnnnnnnnnnnnnnnnnnnnnnnnnnnnnnnnnnnnnnnnnnnnnnnnnnnnnnnnnnnnnnnnnnnnnnnnnnnnnnnnnnnnnnnnnnnnnnnnnnnnnnnnnnnnnnnnnnnnnnnnnnnnnnnnnnnnnnnnnnnnnnnnnnnnnnnnnnnnnnnnnnnnnnnnnnnnnnnnnnnnnnnnnnnnnnnnnnnnnnnnnnnnnnnnnnnnnnnnnnnnnnnnnnnnnnnnnnnnnnnnnnnnnnnnnnnnnnnnnnnnnnnnnnnnnnnnnnnnnnnnnnnnnnnnnnnnnnnnnnnnnnnnnnnnnnnnnnnnnnnnnnnnnnnnnnnnnnnnnnnnnnnnnnnnnnnnnnnnnnnnnnnnnnnnnnnnnnnnnnnnnnnnnnnnnnnnnnnnnnnnnnnnnnnnnnnnnnnnnnnnnnnnnnnnnnnnnnnnnnnnnnnnnnnnnnnnnnnnnnnnnnnnnnnnnnnnnnnnnnnnnnnnnnnnnnnnnnnnnnnnnnnnnnnnnnnnnnnnnnnnnnnnnnnnnnnnnnnnnnnnnnnnnnnnnnnnnnnnnnnnnnnnnnnnnnnnnnnnnnnnnnnnnnnnnnnnnnnnnnnnnnnnnnnnnnnnnnnnnnnnnnnnnnnnnnnnnnnnnnnnnnnnnnnnnnnnnnnnnnnnnnnnnnnnnnnnnnnnnnnnnnnnnnnnnnnnnnnnnnnnnnnnnnnnnnnnnnnnnnnnnnnnnnnnnnnnnnnnnnnnnnnnnnnnnnnnnnnnnnnnnnnnnnnnnnnnnnnnnnnnnnnnnnnnnnnnnnnnnnnnnnnnnnnnnnnnnnnnnnnnnnnnnnnnnnnnnnnnnnnnnnnnnnnnnnnnnnnnnnnnnnnnnnnnncttgaaactgtccctgggctcttctctcttctagttctagtctagtcttttttattgagtcctcctctttgctgatcnnnnnnnnnnnnnnnnnnnnnnnnnnnnnnnnnnnnnnnnnnnnnnnnnnnnnnnnnnnnnnnnnnnnnnnnnnnnnnnnnnnnnnnnnnnnnnnnnnnnnnnnnnnnnnnnnnnnnnnnnnnnnnnnnnnnnnnnnnnnnnnnnnnnnnnnnnnnnnncatttttatgctcactactaaaagctgtccactctagag

SEQ ID NO: 27052 - DNA, 2008 bp, Macaca Mulatta
  misc_feature (1)...(2008): n = A,T,C or G
ctggttctgcgccggatccgggagaggggcggtcgccattgtgcttcgctgcggactgcttttcctcagtcacaggcctagaactccaaggaggaaggcnnnnnnnnnnnnnnnnnnnnnnnnnnnnnnnnnnnnnnnnnnnnnnnnnnnnnnnnnnnnnnnnnnnnnnnnnnnnnnnnnnnnnnnnnnnnnnnnnnnnnnnnnnnnnnnnnnnnnnnnnnnnnnnnnnnnnnnnnnnnnnnnnnnnnnnnnnnnnnnnnnnnnnnnnnnnnnnnnnnnnnnnnnnnnnnnnnnnnnnnnnnnnnnnnnnnnnnnnnnnnnnnnnnnnnnnnnnnnnnnnnnnnnnnnnnnnnnnnnnnnnnnnnnnnnnnnnnnnnnnnnnnnnnnnnnnnnnnnnnnnnnnnnnnnnnnnnnnnnnnnnnnnnnnnnnnnnnnnnnnnnnnnnnnnnnnnnnnnnnnnnnnnnnnnnnnnnnnnnnnnnnnnnnnnnnnnnnnnnnnnnnnnnnnnnnnnnnnnnnnnnnnnnnnnnnnnnnnnnnnnnnnnnnnnnnnnnnnnnnnnnnnnnnnnnnnnnnnnnnnnnnnnnnnnnnnnnnnnnnnnnnnnnnnnnnnnnnnnnnnnnnnnnnnnnnnnnnnnnnnnnnnnnnnnnnnnnnnnnnnnnnnnnnnnnnnnnnnnnnnnnnnnnnnnnnnnnnnnnnnnnnnnnnnnnnnnnnnnnnnnnnnnnnnnnnnnnnnnnnnnnnnnnnnnnnnnnnnnnnnnnnnnnnnnnnnnnnnnnnnnnnnnnnnnnnnnnnnnnnnnnnnnnnnnnnnnnnnnnnnnnnnnnnnnnnnnnnnnnnnnnnnnnnnnnnnnnnnnnnnnnnnnnnnncccaatcataagcaattcagaaagggttgtttcatctcaaagaccatttcaagaatcttctgacaatgaaggtaggcggacaaccaggagattgctgtcacgcatagcttctagcatgtcatctacttttttttcacgaagatctagtcaggattccttgaatacaagatcattgaattctgaaaattcttacgtttctccaagaattttgacagcttcacagtcccgtagtaatgtaccatcaacttctgaagttcccgataatagggcatctgaagcttctcagggatttcgatttcttaggcgaagatggggtttgtcatctcttagccacaatcatagctctgagtcagattcagaaaattttaaccaagaatctgaaggtagaaatacaggaccatggttatcttcctcacttagaaatagatgcacacctttgttctctagaaggaggcgagagggaagagatgaatcttcaaggatatctacctctgatacatcatctagatctcatatttttagaagagaatcaaatgaagtggttcaccttgaagcacagaatgatcctcttggagctgctgccaacagaccacaagcatctgcagcatcaagcagtgccacaacaggtggctctacatcagattcggctcaaggtggaagaaaacaggaatagcagggattcttcctggttccttattccggtttgcagtcccnnnnnnnnnnnnnnnnnnnnnnnnnnnnnnnnnnnnnnnnnnnnnnnnnnnnnnnnnnnnnnnnnnnnnnnnnnnnnnnnnnnnnnnnnnnnnnnnnnnnnnnnnnnnnnnnnnnnnnnnnnnnnnnnnnnnnnnnnnnnnnnnnnnnnnnnnnnnnnnnnnnnnnnnnnnnnnnnnnnnnnnnnnnnnnnnnnnnnnnnnnnnnnnnnnnnnnnnnnnnnnnnnnnnnnnnnnnnnnnnnnnnnnnnnnnnnnnnnnnnnnnnnnnnnnnnnnnnnnnnnnnnnnnnnnnnnnnnnnnnnnnnnnnnnnnnnnnnggttcttcattagaagctgtaaccacctgtgaactatgtaaagagaagctggagcttaacctggaggattttgatattcatgaactacatagagctcatgcaaatgaacaa

SEQ ID NO: 27053 - DNA, 2154 bp, Macaca Mulatta
  misc_feature (1)...(2154): n = A,T,C or G
tattgtctactgaaagctgccgctgaagctgccgnnnnnnnnnnnnnnnnnnnnnnnnnnnnnnnnnnnnnnnnnnnngagaccatggcgagcccagggaaagacgattatcgaatgaagagctataagaacgatgctctaaaccctgaagaaatgagacgaagaagagagaaagagggnnnnnnnnnnnnnnnnnnnnnnnnnnnnnnnnnnnnnnnnnnnnnnnnnnnnnnnnnnnnnnnnnnnnnnnnnnnnnnnnnnnnnnnnnnnnnnnnnnnnnnnnnnnnnnnnnnnnnnnnnnnnnggagagtgtgatcacaagagagatggtggagatgctcttttctgatgattctgacctgcagttagcaaccacacagaaattccggaaactgctctccaaannnnnnnnnnnnnnnnnnnnnnnnnnnnnnnnnnnnnnnnnnnnnnnnnnnnnnnnnnnnnnnnnnnnnnnnnnnnnnnnnnnnnnnnnnnnnnnnnnnnnnnnnnnnnnnnnnnnnnnnnnnnnnnnnnnnnnnnnnnnnnnnnnnnnnnnnnnnnnnnnnnnnnnnnnnnnnnnnnnnnnnnnnnnnnnnnnnnnnnnnnnnnnnnnnnnnnnnnnnnnnnnnnnnnnnnnnnnnnnnnnnnnnnnnnnnnnnnnnnnnnnnnnnnnnnnnnnnnnnnnnnnnnnnnnnnnnnnnnnnnnnnnnnnnnnnnnnnnnnnnnnnnnnnnnnnnnnnnnnnnnnnnnnnnnnnnnnnnnnnnnnnnnnnnnnnnnnnnnnnnnnnnnnnnnnnnnnnnnnnnnnnnnnnnnnnnnnnnnnnnnnnnnnnnnnnnnnnnnnnnnnnnnnnnnnnnnnnnnnnnnnnnnnnnnnnnnnnnnnnnnnnnnnnnnnnnnnnnnnnnnnnnnnnnnnnnnnnnnnnnnnnnnnnnnnnnnnnnnnnnnnnnnnnnnnnnnnnnnnnnnnnnnnnnnnnnnnnnnnnnnnnnnnnnnnnnnnnnnnnnnnnnnnnnnnnnnnnnnnnnnnnnnnnnnnnnnnnnnnnnnnnnnnnnnnnnnnnnnnnnnnnnnnnnnnnnnnnnnnnnnnnnnnnnnnnnnnnnnnnnnnnnnnnnnnnnnnnnnnnnnnnnnnnnnnnnnnnnnnnnnnnnnnnnnnnnnnnnnnnnnnnnnnnnnnnnnnnnnnnnnnnnnnnnnnnnnnnnnnnnnnnnnnnnnnnnnnnnnnnnnnnnnnnnnnnnnnnnnnnnnnnnnnnnnnnnnnnnnnnnnnnnnnnnnnnnnnnnnnnnnnnnnnnnnnnnnnnnnnnnnnnnnnnnnnnnnnnnnnnnnnnnnnnnnnnnnnnnnnnnnnnnnnnnnnnnnnnnnnnnnnnnnnnnnnnnnnnnnnnnnnnnnnnnnnnnnnnnnnnnnnnnnnnnnnnnnnnnnnnnnnnnnnnnnnnnnnnnnnnnnnnnnnnnnnnnnnnnnnnnnnnnnnnnnnnnnnnnnnnnnnnnnnnnnnggcttggataaaattgagtttctccagagccatgagaaccaagaaatctaccagaaggccttcgacctcattgagcactactttggtgtagaagacgatgatagcagcctggctccccaagtggatgaaacgcaacagcagttcatcttccagcagcctgaggcccccatggagggcttccagctataatatctgcctccggggaggggaggggatgggaagcaccaccagccagcggaagagcagcccctggtgggcgggaaaccagtgtccccaccatcagccaccacacacctctgctgccctggagactgtgctcttgacctgctccacccccttccctggagggagcaccctctggacagacagaaccatctgaggctcacctttgggttttgtgacaagaaggggacgtgttgggtttttcttccttacactatattttggctgcacacatgtctttaacccaggagcccaggggtagacaaaggaggactaaggtaatcaatttgcaccnnnnnnnnnnnnnnnnnnnnnnnnnnnnnnttcagtggtgacttccttccctttatcttttttcattcttcccagtcctctgccctgatctgtgtaactcttatcttgggtacttgagcagacggtatattccagaggtggga

SEQ ID NO: 27054 - DNA, 82 bp, Macaca Mulatta
attgttttaaacccagcctatttccggaatcatcttcgtcaagccacagtgtttagatgtctggagagatattcagaggctg

SEQ ID NO: 27055 - DNA, 1614 bp, Macaca Mulatta
  misc_feature (1)...(1614): n = A,T,C or G
tggcggccgccgcgctcccggcatgggtgtctctgcggtcgagagcaaggactctgcgtgcattctccaccgccgtgtccccggtcactccggtctcgacacgtggcctgcnnnnnnnnnnnnnnnnnnnnnnnnnnnnnnnnnnnnnnnnnnnnnnnnnnnnnnnnnnnnnnnnnnnnnnnnnnnnnnnnnnnnnnnnnnnnnnnnnnnnnnnnnnnnnnnnnnnnnnnnnnnnnnnnnnnnnnnnnnnnnnnnnnnnnnnnnnnnnnnnnnnnnnnnnnnnnnnnnnnnnnnnnnnnnnnnnnnnnnnnnnnnnnnnnnnnnnnnnnnnnnnnnnnnnnnnnnnnnnnnnnnnnnnnnnnnnnnnnnnnnnnnnnnnnnnnnnnnnnnnnnnnnnnnnnnnnnnnnnnnnnnnnnnnnnnnnnnnnnnnnnnnnnnnnnnnnnnnnnnnnnnnnnnnnnnnnnnnnnnnnnnnnnnnnnnnnnnnnnnnnnnnnnnnnnnnnnnnnnnnnnnnnnnnnnnnnnnnnnnnnnnnnnnnnnnnnnnnnnnnnnnnnnnnnnnnnnnnnnnnnnnnnnnnnnnnnnnnnnnnnnnnnnnnnnnnnnnnnnnnnnnnnnnnnnnnnnnnnnnnnnnnnnnnnnnnnnnnnnnnnnnnnnnnnnnnnnnnnnnnnnnnnnnnnnnnnnnnnnnnnnnnnnnnnnnnnactgaagaatgggagaaaagtaagactgaagcagacatggaagagtatatatagggaaaacagttcatcagaaagaaatatcctggaaacgcttctccagatgaaagctgctgagaaaaatacggaaataaataaagaagagctccttggtactaaagaagttgaagagtacaaaaagtctgttgttagtcttaaaaatgaggaggaaaatgaagatttgctttctcagtacaaagaatctgtgaagagactattaaatgtgacatgaattatggagtagaaaagcctgcttgatttattaattttataatatatgtaatcagtatctaatttgatacaaagttgaaaatgttaaatcattgtttttcctcagagttaaaattatttccctcatactaatgcttaatggcaatgattactccagagnnnnnnnnnnnnnncactggggcaatagactaggagatctctgatttcttcttggtctaaagtgttttgatcttatttctacataatagctttggtattcatatatatacatgcttttaattgtgattttgccaccttccccatttctttccccacaagctggcgttcagtagttgcttttgaataatggttttggttacctcggaaggtaggcccagaacccatttccttgacttgcggttccagggtctgttcacatgactgctgtctggctgatgcatttttcacgtttgtcagttctggttagaaacaggtcctcaggagtactctctaacctgatattgtctaaaaagatatgttgactcaactttgtttagtgtcctactttctagattgtggggctcattttgccagggccaagctaccagaaaagcagaagtggagattacctggtgtgtatcctcctggatgccccagtcagagc

SEQ ID NO: 27056 - DNA, 683 bp, Macaca Mulatta
atttaccttgtcgcgtctgttttttgctttcttaatggtagtagggttgcgcattctttctttataccaatattaatgttttcttctctgtgtcaggatgttccaaatcacggatttcgtgtaggaatgaaattagaagcagtagatctcatggagccacgtttaatatgtgtagccacagtaactcgaattattcatcgtctcttgaggatacattttgatggatgggaagaagagtatgatcagtgggtagactgtgagtcccctgacctctatcctgtagggtggtgtcagttaactggatatcaactacagcctccagcatcacagtgtaagttggtatacagaaaaggtgtccttttgtaaaaatcagcaattctccagaggactatctcacataagtcatcttttgagctcacaggacaagaatatacctatgtctgattggttgccaggtaagacattaagactcaacaacaatatcacagaatcagaccatgtgtaccatggcagtgtgaatccaatagtcagttacataatgactatagaaacacaacagtcaccaaattaaactagacttactattttagtgagttaaaaattacagactaaaagtttattggtatgtaataaatggttttgagtaaatagtggaatctgtctcgttttgaggctgtggtttt

SEQ ID NO: 27057 - DNA, 2664 bp, Macaca Mulatta
  misc_feature (1)...(2664): n = A,T,C or G
agcctgtctggctaccttgcctcggagccactacactgctcgctgcagacacagactgcaccatgaagccagccctcctgccctgggccctgctgctgctggcgacagcccnnnnnnnnnnnnnnnnnnnnnnnnnnnnnnnnnnnnnnnnnnnnnnnnnnnnnnnnnnnnnnnnnnnnnnnnnnnnnnnnnnnnnnnnnnnnnnnnnnnnnnnnnnnnnnnnnnnnnnnnnnnnnnnnnnnnnnnnnnnnnnnnnnnnnnnnnnnnnnnnnnnnnnnnnnnnnnnnnnnnnnnnnnnnnnnnnnnnnnnnnnnnnnnnnnnnnnnnnnnnnnnnnnnnnnnnnnnnnnnnnnnnnnnnnnnnnnnnnnnnnnnnnnnnnnnnnnnnnnnnnnnnnnnnnnnnnnnnnnnnnnnnnnnnnnnnnnnnnnnnnnnnnnnnnnnnnnnnnnnnnnnnnnnnnnnnnnnnnnnnnnnnnnnnnnnnnnnnnnnnnnnnnnnnnnnnnnnnnnnnnnnnnnnnnnnnnnnnnnnnnnnnnnnnnnnnnnnnnnnnnnnnnnnnnnnnnnnnnnnnnnnnnnnnnnnnnnnnnnnnnnnnnnnnnnnnnnnnnnnnnnnnnnnnnnnnnnnnnnnnnnnnnnnnnnnnnnnnnnnnnnnnnnnnnnnnnnnnnnnnnnnnnnnnnnnnnnnnnnnnnnnnnnnnnnnnnnnnnnnnnnnnnnnnnnnnnnnnnnnnnnnnnnnnnnnnnnnnnnnnnnnnnnnnnnnnnnnnnnnnnnnnnnnnnnnnnnnnnnnnnnnnnnnnnnnnnnnnnnnnnnnnnnnnnnnnnnnnnnnnnnnnnnnnnnnnnnnnnnnnnnnnnnnnnnnnnnnnnnnnnnnnnnnnnnnnnnnnnnnnnnnnnnnnnnnnnnnnnnnnnnnnnnnnnnnnnnnnnnnnnnnnnnnnnnnnnnnnnnnnnnnnnnnnnnnnnnnnnnnnnnnnnnnnnnnnnnnnnnnnnnnnnnnnnnnnnnnnnnnnnnnnnnnnnnnnnnnnnnnnnnnnnnnnnnnnnnnnnnnnnnnnnnnnnnnnnnnnnnnnnnnnnnnnnnnnnnnnnnnnnnnnnnnnnnnnnnnnnnnnnnnnnnnnnnnnnnnnnnnnnnnnnnnnnnnnnnnnnnnnnnnnnnnnnnnnnnnnnnnnnnnnnnnnnnnnnnnnnnnnnnnnnnnnnnnnnnnnnnnnnnnnnnnnnnnnnnnnnnnnnnnnnnnnnnnnnnnnnnnnnnnnnnnnnnnnnnnnnnnnnnnnnnnnnnnnnnnnnnnnnnnnnnnnnnnnnnnnnnnnnnnnnnnnnnnnnnnnnnnnnnnnnnnnnnnnnnnnnnnnnnnnnnnnnnnnnnnnnnnnnnnnnnnnnnnnnnnnnnnnnnnnnnnnnnnnnnnnnnnnnnnnnnnnnnnnnnnnnnnnnnnnnnnnnnnnnnnnnnnnnnnnnnnnnnnnnnnnnnnnnnnnnnnnnnnnnnnnnnnnnnnnnnnnnnnnnnnnnnnnnnnnnnnnnnnnnnnnnnnnnnnnnnnnnnnnnnnnnnnnnnnnnnnnnnnnnnnnnnnnnnnnnnnnnnnnnnnnnnnnnnnnnnnnnnnnnnnnnnnnnnnnnnnnnnnnnnnnnnnnnnnnnnnnnnnnnnnnnnnnnnnnnnnnnnnnnnnnnnnnnnnnnnnnnnnnnnnnnnnnnnnnnnnnnnnaggaatgttcctgtcggtggctgccagggacacggtctccatcatgctggcatcaggggccggcctggaggtcagcgtgcagggcccgttcctgagtgtgtccgtcctgctgcctgagaagttcctcacccacacccacggcctccttggaacactgaacaatgaccccaccgacgacttcaccctgcgcagcgggcgcgtcctgcccccgggcagcagtcaccgggagctgttcctgtttggggnnnnnnnnnnnnnnnnnnnnnnnnnnnnnnnnnnnnnnnnnnnnnnnnnnnnnnnnnnnnnnnnnnnnnnnnnnnnnnnnnnnnnnnnnnnnnnnnnnnnnnnnnnnnnnnnnnnnnnnnnnnnnnnnnnnnnnnnnnnnnnnnnnnnnnnnnnnnnnnnnnnnnnnnnnnnnnnnnnnnnnnnnnnnnnnnnnnnnnnnnnnnnnnnnnnnnnnnnnnnnnnnnnnnnnnnnnnnnnnnnnnnnnnnnnnnnnnnnnnnnnnnnnnnnnnnnnccagtagtgtcctgtggctggctggccccacctcccaacggacaaaaggagggcaacaggtacctggcaggttccaccatctacttccactgtgacaacggctacagcctggccagggcagagaccagcacctgccaggctgatggcacctggtcctcacccaccccggagtgccagccagnnnnnnnnnnnnnnnnnnnnnnnnnnnnnnnnnnnnnnnnnnnnnnnnnnnnnnnnnnnnnnnnnnnnnnnnnnnnnnnnnnnnnnnnnnnnnnnnnnnnnnngcacatctggggcacacagccctgatgggagcgtctcgtctgtgagcaccaggccaagactcctgagaacaggcaccccagtcctgctactcccgcatccccaggaccagacacctgggacccagacacttgatacctgggcctttaaccccctactct

SEQ ID NO: 27058 - DNA, 396 bp, Macaca Mulatta
ctaatttagaacattaattcccagagggaatacaacaaactttaatactgtgtatttataatccttaggggaaatataccttcagaagaattgcactataagcagtcatgggactttggacttgatgaggtaaagcacagtctcacattatgttctcaattaagtcagtttgtattaccatatcgtattactgtatttagcgttcactttgatttaaggttagcatttattcattaattttttgggatggactctttgtcttacacttttttattctgaggaaattatattttagatctagaaataaaaacacgttttcagagactgttacatgctttatttgagacaaaacaatcttgaggacattttaaacacattttttaagtattacaaaat

SEQ ID NO: 27059 - DNA, 2900 bp, Macaca Mulatta
  misc_feature (1)...(2900): n = A,T,C or G
tggggccggcgccaactggagagcagctgtgcggagcgattggagagccagaggtgnnnnnnnnnnnnnnnnnnnnnnnnnnnnnnnnnnnnnnnnnnnnnnnnnnnnnnnnnnnnnnnnnnnnnnnnnnnnnnnnnnnnnnnnnnnnnnnnnnnnnnnnnnnnnnnnnnnnnnnnnnnnnnnnnnnnnnnnnnnnnnnnnnnnnnnnnnnnnnnnnnnnnnnnnnnnnnnnnnnnnnnnnnnnnnnnnnnnnnnnnnnnnnnnnnnnnnnnnnnnnnnnnnnnnnnnnnnnnnnnnnnnnnnnnnnnnnnnnnnnnnnnnnnnnnnnnnnnnnnnnnnnnnnnnnnnnnnnnnnnnnnnnnnnnnnnnnnnnnnnnnnnnnnnnnnnnnnnnnnnnnnnnnnnnnnnnnnnnnnnnnnnnnnnnnnnnnnnnnnnnnnnnnnnnnnnnnnnnnnnnnnnnnnnnnnnnnnnnnnnnnnnnnnnnnnnnnnnnnnnnnnnnnnnnnnnnnnnnnnnnnnnnnnnnnnnnnnnnnnnnnnnnnnnnnnnnnnnnnnnnnnnntcctacaggacaaggatgggctgaaccagcgctacttccgcaagcgtgccctctacctggcccacttggctcaccacctggcccaggaccccctctttggcagtgtttgcttctcctacacaaatggctgccacctgaaaccctcactgttgctgcggccgcgtgnnnnnnnnnnnnnnnnnnnnnnnnnnnnnnnnnnnnnnnnnnnnnnnnnnnnnnnnnnnnnnnnnnnnnnnnnnnnnnnnnnnnnnnnnnnnnnnnnnnnnnnnnnnnnnnnnnnnnnnnnnnnnnnnnnnnnnnnnnnnnnnnnnnnnnnnnnnnnnnnnnnnnnnnnnnnnnnnnnnnnnnnnnnnnnnnnnnnnnnnnnnnnnnnnnnnnnnnnnnnnnnnnnnnnnnnnnnnnnnnnnnnnnnnnnnnnnnnnnnnnnnnnnnnnnnnnnnnnnnnnnnnnnnnnnnnnnnnnnnnnnnnnnnnnnnnnnnnnnnnnnnnnnnnnnnnnnnnnnnnnnnnnnnnnnnnnnnnnnnnnnnnnnnnnnnnnnnnnnnnnnnnnnnnnnnnnnnnnnnnnnnnnnnnnnnnnnnnnnnnnnnnnnnnnnnnnnnnnnnnnnnnnnnnnnnnnnnnnnnnnnnnnnnnnnnnnnnnnnnnnnnnnnnnnnnnnnnnnnnnnnnnnnnnnnnnnnnnnnnnnnnnnnnnnnnnnnnnnnnnnnnnnnnnnnnnnnnnnnnnnnnnnnnnnnnnnnnnnnnnnnnnnnnnnnnnnnnnnnnnnnnnnnnnnnnnnnnnnnnnnnnnnnnnnnnnnnnnnnnnnnnnnnnnnnnnnnnnnnnnnnnnnnnnnnnnnnnnnnnnnnnnnnnnnnnnnnnnnnnnnnnnnnnnnnnnnnnnnnnnnnnnnnnnnnnnnnnnnnnnnnnnnnnnnnnnnnnnnnnnnnnnnnnnnnnnnnnnnnnnnnnnnnnnnnnnnnnnnnnnnnnnnnnnnnnnnnnnnnnnnnnnnnnnnnnnnnnnnnnnnnnnnnnnnnnnnnnnnnnnnnnnnnnnnnnnnnnnnnnnnnnnnnnnnnnnnnnnnnnnnnnnnnnnnnnnnnnnnnnnnnnnnnnnnnnnnnnnnnnnnnnnnnnnnnnnnnnnnnnnnnnnnnnnnnnnnnnnnnnnnnnnnnnnnnnnnnnnnnnnnnnnnnnnnnnnnnnnnnnnnnnnnnnnnnnnnnnnnnnnnnnnnnnnnnnnnnnnnnnnnnnnnnnnnnnnnnnnnnnnnnnnnnnnnnnnnnnnnnnnnnnnnnnnnnnnnnnnnnnnnnnnnnnnnnnnnnnnnnnnnnnnnnnnnnnnnnnnnnnnnnnnnnnnnnnnnnnnnnnnnnnnnnnnnnnnnnnnnnnnnnnnnnnnnnnnnnnnnnnnnnnnnnnnnnnnnnnnnnnnnnnnnnnnnnnnnnnnnnnnnnnnnnnnnnnnnnnnnnnnnnnnnnnnnnnnnnnnnnnnnnnnnnnnnnnnnnnnnnnnnnnnnnnnnnnnnnnnnnnnnnnnnnnnnnnnnnnnnnnnnnnnnnnnnnnnnnnnnnnnnnnnnnnnnnnnnnnnnnnnnnnnnnnnnnnnnnnnnnnnnnnnnnnnnnnnnnnnnnnnnnnnnnnnnnnnnnnnnnnnnnnnnnnnnnnnnnnnnnnnnnnnnnnnnnnnnnnnnnnnnnnnnnnnnnnnnnnnnnnnnnnnnnnnnnnnnnnnnnnnnnnnnnnnnnnnnnnnnnnnnnnnnnnnnnnnnnnnnnnnnnnnnnnnnnnnnnnnnnnnnnnnnnnnnnnnnnnnnnnnnnnnnnnnnnnnnnnnnnnnnnnnnnnnnnnnnnnnnnnnnnnnnnnnnnnnnnnnnnnnnnnnnnnnnnnnnnnnnnnnnnnnnnnnnnnnnnnnnnnnnnnnnnnnnnnnnnnnnnnnnnnnnnnnnnnnnnnnnnnnnnnnnnnnnnnnnnnnnnnnnnnnnnnnnnnnnnnnnnnactgcagcagcagcacccagccttctctggtgtggcacggctggccaagcggtgggtgcgtgcccagcttcttggtgaggatttcactgatgagagcctgtatctggtggccgctgcccttttcctgcaccctgagcccttcacccctccnagttccccccaggttggcttccttcgattcctttacttggtatcaacgtttgattggaagaataaccccctcattgtcnnnnnnnnnnnnnnnnnnnnngtggaggagcaggtggagatccgcagtggcttcctggcagctcggacacaacttcccgtcatggtcattgttaccccccaagaccgaaagcactctgtgtggacacaggatggaccctcagccca

SEQ ID NO: 27060 - DNA, 456 bp, Macaca Mulatta
ttaaaataaaagctatttttaaataaaagacgtcgttctgagctgaggaggggacctgtggacatcggacgtcagaggtgggccctcccctggacttagagagaggcacagacgttccaggggctgccctgagccctagaggggtggggctggggaagacaggcagagccccctctccgggagccataaccaaaccttcctcagtctgctatttatcacatgttcttaacaactgttaggtgtctggtatggttggtaaagaaatcttaattttatttatttttgaataaggactgcgttcatttcattcacatggttcaaaattcggaaggtaccggaggatatgtgttgaaaagtctccctgcccctgtcctccggccaccagctctcctctctgcaagcagcctaaggcaccagtttcctgtgatgtcccattctctatgaatgatcaggcag

SEQ ID NO: 27061 - DNA, 2590 bp, Macaca Mulatta
  misc_feature (1)...(2590): n = A,T,C or G
cagttaatggaactcccagcagccaactttctactcctaaatctacgaaatcctccagttcctctccaactagtccaggaagtttcagaggattaaagnnnnnnnnnnnnnnnnnnnnnnnnnnnnnnnnnnnnnnnnnnnnnnnnnnnnnnnnnnnnnnnnnnnnnnnnnnnnnnnnnnnnnnnnnnnnnnnnnnnnnnnnnnnnnnnnnnnnnnnnnnnnnnnnnnnnnnnnnnnnnnnnnnnnnnnnnnnnnnnnnnnnnnnnnnnnnnnnnnnnnnnnnnnnnnnnnnnnnnnnnnnnnnnnnnnnnnnnnnnnnnnnnnnnnnnnnnnnnnnnnnnnnnnnnnnnnnnnnnnnnnnnnnnnnnnnnnnnnnnnnnnnnnnnnnnnnnnnnnnnnnnnnnnnnnnnnnnnnnnnnnnnnnnnnnnnnnnnnnnnnnnnnnnnnnnnnnnnnnnnnnnnnnnnnnnnnnnnnnnnnnnnnnnnnnnnnnnnnnnnnnnnnnnnnnnnnnnnnnnnnnnnnnnnnnnnnnnnnnnnnnnnnnnnnnnnnnnnnnnnnnnnnnnnnnnnnnnnnnnnnnnnnnnnnnnnnnnnnnnnnnnnnnnnnnnnnnnnnnnnnnnnnnnnnnnnnnnnnnnnnnnnnnnnnnnnnnnnnnnnnnnnnnnnnnnnnnnnnnnnnnnnnnnnnnnnnnnnnnnnnnnnnnnnnnnnnnnnnnnnnnnnnnnnnnnnnnnnnnnnnnnnnnnnnnnnnnnnnnnnnnnnnnnnnnnnnnnnnnnnnnnnnnnnnnnnnnnnnnnnnnnnnnnnnnnnnnnnnnnnnnnnnnnnnnnnnnnnnnnnnnnnnnnnnnnnnnnnnnnnnnnnnnnnnnnnnnnnnnnnnnnnnnnnnnnnnnnnnnnnnnnnnnnnnnnnnnnnnnnnnnnnnnnnnnnnnnnnnnnnnnnnnnnnnnnnnnnnnnnnnnnnnnnnnnnnnnnnnnnnnnnnnnnnnnnnnnnnngatgatgcctcccaggagaataacatgcaagctgaggtaacaggtaaactaaaacagcactttaataatgcgctccccaaacagagcaccactaccaccgggggtctccgtcatcatgnnnnnnnnnnnnnnnnnnnnnnnnnnnnnnnnnnnnnnnnnnnnnnnnnnnnnnnnnnnnnnnnnnnnnnnnnnnnnnnnnngaacacggctctagataaggaggggcagattttctgcagcaagcactgtccagacggcggcaggcctggaatggagcccatctctccaggtcctccctcagtggaggagacccctgtgcctggggaagcannnnnnnnnnnnnnnnnnnnnnnnnnnnnnnnnnnnnnnnntcctcccgctgccacgggtggtgagcgggcaggaacctggcgccgccaccgagactgagcctcctgcaaacgggcaaagccgcccgctgccacccaggaagccagccctctgctcagcctcgccggcctccctgctggaagcctccctgtcctcaccgcctgcgcctgagttcnnnnnnnnnnnnnnnnnnnnnnnnnnnnnnnnnnnnnnnnnnnnnnnnnnnnnnnnggtgctctgggctctaccttctggttcctggagacatcaaaggctgcatccgtgctgccacagctgtttggagagactcgttccagatcatccccagtcattttcagtttgttggacattttacagcttcaccaggaaaatgtgcaactttattccagcgttcgatgcatttttatagaaacactttggangaaacactttggatgaaccaaggccttttccttatttaaatagactcagaacgctccnnnnnnnnnnnnnnnnnnnnnnnnnnnnnnnnnnnnnnnnnnaaagacttaaaattgcatttgtccttttgtggatgtcctgtgnnnnnnnnnnnnnnnnnnnagaggagtggctttctaatggaaggagtgagcgcctgagaggacggtttggtctttggacgtggattgcaggctttgagaagcgctcagatgcccgatgctgcgtgctcagccatttggcttggggcgctgggctcaccggagacaatgctgggtattcatttgtacagatgatgggagaagccacttcttccctgggcattatgggtttcccccagctcttcccacacgtgtgttaggaaatgcctgtgaacctgccctctgggtgttttaatgagaggcttggcacacgcggcacccagcggctgcttctccgcaagccagcgacttgcagagcagaacaagctccgcacctgagccccggtgcctgcttcctcatctgcgtttcatctggagcagggcaggtaaccacaggaggcggcgcgccccaggcagccaggactgggcgggaaggtgctccctggatatactctgtgaaccttctggaaggctgctggcagtttttcctttttgtccaccaccctgctctttttaataaatgtaataatccgtgtatttgttttacctgctcatcttcaaaatgggggggccctatagttcgttctcattgttagatttttgccttttacaagtgtacccaacctg

SEQ ID NO: 27062 - DNA, 699 bp, Macaca Mulatta
  misc_feature (1)...(699): n = A,T,C or G
tcggtcgctgcagccactctcccatgccgcgtatttcgccgtctggggcctcnggtcccgagtcccgcatccatctgttgcggaacttgctcacagggctggtgcggcacgaacgcatcgaggcaccatgggcgcgtgtggacgagatgaggggctacgcggagaagctcatcgactatgggaagctgggagacaccaacgaacgagccatgcgcatggctgacttctggctcacagagaaagacttgatcccaaagctgtttcaagttctggcccctcgatacaaagatcaaaatgggggctacacaagaatgctgcagatcccaaatcggagtttggatcgggccaaaatggcagtgatcgagtataaagggaactgcctcccacccctgcctctgcctcgcagagacagccaccttacactcctaaaccagctgctgcagggtttgcggcaggacctcagccagagccaggaagcaagcaaccacagctcccacacagctcaaacaccaaggatttaactggatctgaagagtctgcagcccttaatcagtgcccatgatcacaggcctttggagcgcttttactctctgagaagaactggagctagagatgtcaaatggacagtcttaatgggattgagaaccttctgggagccagatgaacctctttttgcacaatagataaaagtctttatat

SEQ ID NO: 27063 - DNA, 471 bp, Macaca Mulatta
taaaaaataaggtgttcttgttcgttttcttctagaaactttagaaagagtgtgatgcccctttgcctttgcattcttagccagtgtcacccacacagccagccgcagcgcactctcatgctgtggcccctccccagaccgccagcgccctgcagccgccaggtctacagtgtgcattaggattattgctggtcttcctagggaggtaaaaggatcaaagagagagaaggaataaatgctaaattggaagaaaaccccaatataattatgtaaaatgtcactacattgattttccgagaggcatcataggaacatgtaaaaaacagccctttaaatattgcagtcagccaaggaaattagatgagaattgtggctattaagagaattcactgagagttactctctaggtttttagccaacaaccactaaaagctgctgcttttccagggtaggggaaggaatgactacata

SEQ ID NO: 27064 - DNA, 3367 bp, Macaca Mulatta
  misc_feature (1)...(3367): n = A,T,C or G
gctacggaggttctgatgtcacttctggaaaagagctgagtgacagctgcgaaggcgcctttggagggggcaggctggagggcagggcagcccggaaacaccaccgcaggtccacgcgcgcacgctcccggcaggagagggccagccggccccggcttaccatcttgaacgtgntgcaacactggggacaagatggtggagtgccagctggagacgcacaaccacaagatggtgaccttcaagttcgacttggatggggacgcacctgatgagattgccacgtatatggtgnnnnnnnnnnnnnnnnnnnnnnnnnnnnnnnnnnnnnnnnnnnnnnnnnnnnnnnnnnnnnnnnnnnnnnnnnnnnnnnnnnnnnnnnnnnnnnnnnnnnnnnnnnnnnnnnnnnnnnnnnnnnnnnnnnnnnnnnnnnnnnnnnnnnnnnnnnnnnnnnnnnnnnaggagagccggcaatcccaaaccaacgcccccgtgtatcagcagaacnnntgcacactgggaagaggtggttcatcatctgtccggtggctgagcaccccgcccccgaggcccctgaatcttcgcccccacttcctctcagctccatgcctccagaagccagccaannnnnnnnnnnnnnnnnnnnnnnnnnnnnnnnnnnnnnnnnnnnnnnnnnnnnnnnnnnnnnnnnnnnnnnnnnnnnnnnnnnnnnnnnnnnnnnnnnnnnnnnnnnnnnnnnnnnnnnnnnnnnnnnnnnnnnnnnnnnnnnnnnnnnnnnnnnnnnnnnnnnnnnnnnnnnnnnnnnnnnnnnnnnnnnnnnnnnnnnnnnnnnnnnnnnnnnnnnnnnnnnnnnnnnnnnnnnnnnnnnnnnnnnnnnnnnnnnnnnnnnnnnnnnnnnnnnnnnnnnnnnnnnnnnnnnnnnnnnnnnnnnnnnnnnnnnnnnnnnnnnnnnnnnnnnnnnnnnnnnnnnnnnnnnnnnnnnnnnnnnnnnnnnnnnnnnnnnnnnnnnnnnnnnnnnnnnnnnnnnnnnnnnnnnnnnnnncccacagcggggccccacagcccgctttgggtcagcccactcccctgcttcctgcctcagtggggtctgtcagcctggccacttctcagctcccaagcccacccctgggacccaccgtccccccacagccaccctcggccctggagtcggatggggaagggccgccccccagggtgggctttgtggacagcaccatcaagagcctggacgagaagctgcggactctgctctaccaggagcatgtgcccacctcctcagcctcagccgggacccctgtggaggtgggcgacagagacttcaccctggagcccctgagaggggaccagccccgctcagaggtttgcgggggggacctggccctgcccccagcgcctaatgaggcggttgcaaggcgtgcccagctgccccagcccttggtnnnnnnnnnnnnnnnnnnnnnnnnnnnnnnnnnnngatggagcagggcacatcttcgtcaatgacagnnnnnnnnnnnnnnnnnnnnnnnnnnnnnnnnnnnnnnnnnnnnnnnnnnnnnnnnnnnnnnnnnnnnnnnnnnnnnnnnnnnnnnnnnnnnnnnnnnnnnnnnnnnnnnnnnnnnnnnnnnnnnnnnnnnnnnnnnnnnnnnnnnnnnnnnnnnnnnnnnnnnnnnnnnnnnnnnnnnnnnnnnnnnnnnnnnnnnnnnnnnnnnnnnnnnnnnnnnnnnnnnnnnnnnnnnnnnnnnnnnnnnnnnnnnnnnnnnnnnnnnnnnnnnnnnnnnnnnnnnnnnnnnnnnnnnnnnnnnnnnnnnnnnnnnnnnnnnnnnnnnnnnnnnnnnnnnnnnnnnnnnnnnnnnnnnnnnnnnnnnnnnnnnnnnnnnnnnnnnnnnnnnnnnnnnnnnnnnnnnnnnnnnnnnnnnnnnnnnnnnnnnnnnnnnnnnnnnnnnnnnnnnnnnnnnnnnnnnnnnnnnnnnnnnnnnnnnnnnnnnnnnnnnnnnnnnnnnnnnnnnnnnnnnnnnnnnnnnnnnnnnnnnnnnnnnnnnnnnnnnnnnnnnnnnnnnnnnnnnnnnnnnnnnnnnnnnnnnnnnnnnnnnnnnnnnnnnnnnnnnnnnnnnnnnnnnnnnnnnnnnnnnnnnnnnnnnnnnnnnnnnnnnnnnnnnnnnnnnnnnnnnnnnnnnnnnnnnnnnnnnnnnnnnnnnnnnnnnnnnnnnnnnnnnnnnnnnnnnnnnnnnnnnnnnnnnnnnnnnnnnnnnnnnnnnnnnnnnnnnnnnnnnnnnnnnnnnnnnnnnnnnnnnnnnnnnnnnnnnnnnnnnnnnnnnnnnnnnnnnnnnnnnnnnnnnnnnnnnnnnnnnnnnnnnnnnnnnnnnnnnnnnnnnnnnnnnnnnnnnnnnnnnnnnnnnnnnnnnnnnnnnnnnnnnnnnnnnnnnnnnnnnnnnnnnnnnnnnnnnnnnnnnnnnnnnnnnnnnnnnnnnnnnnnnnnnnnnnnnnnnnnnnnnnnnnnnnnnnnnnnnnnnnnnnnnnnnnnnnnnnnnnnnnnnnnnnnnnnnnnnnnnnnnnnnnnnnnnnnnnnnnnnnnnnnnnnnnnnnnnnnnnnnnnnnnnnnnnnnnnnnnnnnnnnnnnnnnnnnnnnnnnnnnnnnnnnnnnnnnnnnnnnnnnnnnnnnnnnnnnnnnnnnnnnnnnnnnnnnnnnnnnnnnnnnnnnnnnnnnnnnnnnnnnnnnnnnnnnnnnnnnnnnnnnnnnnnnnnnnnnnnnnnnnnnnnnnnnnnnnnnnnnnnnnnnnnnnnnnnnnnnnnnnnnnnnnnnnnnnnnnnnnnnnnnnnnnnnnnnnnnnnnnnnnnnnnnnnnnnnnnnnnnnnnnnnnnnnnnnnnnnnnnnnnnnnnnnnnnnnnnnnnnnnnnnnnnnnnnnnnnnnnnnnnnnnnnnnnnnnnnnnnnnnnnnnnnnnnnnnnnnnnnnnnnnnnnnnnnnnnnnnnnnnnnnnnnnnnnnnnnnnnnnnnnnnnnnnnnnnnnnnnnnnnnnnnnnnnnnnnnnnnnnnnnnnnnnnnnnnnnnnnnnnnnnnnnnnnnnnnnnnnnnnnnnnnnnnnnnnnnnnnnnnnnnnnnnnnnnnnnnnnnnnnnnnnnnnnnnnnnnnnnnnnnnnnnnnnnnnnnnnnnnnnnnnnnnnnnnnnnnnnnnnnnnnnnnnnnnnnnnccagatggtgcccgcggaaccgcccggagaaaccaggtgtggtttggcctccaagtcccccccaccgcctgctgtgggcacagcactcagccgcgagggggacagcgggggggcagcaagactgcttccttcgcggcttcagaccctgttcgctccta

SEQ ID NO: 27065 - DNA, 125 bp, Macaca Mulatta
cagagcttatcaacaaacttaactttttggatgaagcagaaaaggacttggccaccgtgaattcaaatccatttgatgactctgatgttgcagaattaaatccatttggagatcctgactcagaa

SEQ ID NO: 27066 - DNA, 748 bp, Macaca Mulatta
  misc_feature (1)...(748): n = A,T,C or G
agtctccgcacggctgaggcgcgcccggccgctcccacggcctcgcctccgccctccggtccctccgcctccgggaccgcctgggaccctggcccccgccgggcaggacgccgccagcgctgcaggcgcagcccggaggccgcgcgnnnnnnnnnnnnnnnnnnnnnnnnnnnnnnnnnnnnnnnnnnnnnnnnnnnnnnnnnnnnnnnnnnnnnnnnnnnnnnnnnnnnnnnnnnnnnnnnnnnnnnnnnnnnnnnnnnnnnnnnnnnnnnnnnnnnnnnnnnnnnnnnnnnnnnnnnnnnnnnnnnnnnnnnnnnnnnnnnnnnnnnnnnnnnnnnnnnnnnnnnnnnnnnnnnnnnnnnnnnnnnnnnnnnnnnnnnnnnnnnnnnnnnnnnnnnnnnnnnnnnnnnnnnnnnnnnnnnnnnntcttccccctgctgacctccggctctaccttctggctgctcaggctctggggagagctggggccgaaaaaaaacctggtgagtagctatgcgctgctggtggggccgcgactcctcctcgctgccctttccttcgctctggacggggtggtgtaccacctggccccactgttgggggcggatcgctggaatgccctggccctgctctctggttcctacgtcaccctggtcttctacacaaggaccttctccaacaccattgagggactcctcttcgcgtggctgctggtgctggtatccccccatgtaatgtggggccctac

SEQ ID NO: 27067 - DNA, 859 bp, Macaca Mulatta
  misc_feature (1)...(859): n = A,T,C or G
ggaaattgctactaagaaactccgactaacaaaaccaattaaatctgcagcactccacatagatctgtgtaaagctccctccccagcagatgctttgcaatacctgctccagtttgccaggaagcctgtcgaggcagaaagcgtagagggagtagtcaggattctcttggaacattattacaaggnaggagaatgatccatctgtgagactgaaaattgcatcattgttgggtttattatcaaagacagcaggattttcaccagactgcattatggatgatgctattaacatcctgcagaatgaaannnnnnnnnnnnnnnnnnnnnnnnnnnnnnnnnnnnnnnnnnnnnnnnnnnnnnnnnnnnnnnnnnnnnnnnnnnnnnnnnnnnnnnnnnnnnnnnnnnnnnnnnnnnnnnnnnnnnnnnnnnnnnnnnnnnnnnnnnnnnnnnnnnnnnnnnnnnnnnnnnnnnnnnnnnnnnnnnnnnnnnnnnnnnnnnnnnnnnnnnnnnnnnnnnnnnnnnnnnnnnnnnnnnnnnnnnnnnnnnnnnnnnnnnnnnnnnnnnnnnnnnnnnnnnnnnnnnnnnnnnnnnnnnnnnngttgcagctccatgaaagaggactgaaattacaccaaacaatttataatcagnnnnnnnnnnnnnnnnnnnnnnnnnnnnnnnnnnnnnnnnnnnnnnnnnnnnnnnnnnnnnnnnnnnnnnnnnnnnnnnnnnnnnngcattgtcccaattccttcttctaatgaagaaatacgcttagttgatgatgcgtttggaaaaatttgtcacatggtcagtgatggctcttgggtggttcgtgttcaggcagcaaaactgttgg

SEQ ID NO: 27068 - DNA, 1897 bp, Macaca Mulatta
  misc_feature (1)...(1897): n = A,T,C or G
gggtgcagcaaaaccatccaggtgggacagatacaggagatcctcaaggtaagcccctcagtgaccgggctgctggcaccatggacccagnnnnnnnnnnnnnnnnnnnnnnnnnnnnnnnnnnnnnnnnnnnnnnnnnnnnnnnnnnnnnnnnnnnnnnnnnnnnnnnnnnnnnnnnnnnnnnnnnnnnnnnnnnnnnnnnnnnnnnnnnnnnnnnnnnnnnnnnnnnnnnnnnnnnnnnnnnnnnnnnnnnnnnnnnnnnnnnnnnnnnnnnnnnnnnnnnnnnnnnnnnnnnnnnnnnnnnnnnnnnnnnnnnnnnnnnnnnnnnnnnnnnnnnnnnnnnnnnnnnnnnnnnnnnnnnnnnnnnnnnnnnnnnnnnnnnnnnnnnnnnnnnnnnnnnnnnnnnnnnnnnnnnnnnnnnnnnnnnnnnnnnnnnnnnnnnnnnnnnnnnnnnnnnnnnnnnnnnnnnnnnnnnnnnnnnnnnnnnnnnnnnnnnnnnnnnnnnnnnnnnnnnnnnnnnnnnnnnnnnnnnnnnnnnnnnnnnnnnnnnnnnnnnnnnnnnnnnnnnnnnnnnnnnnnnnnnnnnnnnnnnnnnnnnnnnnnnnnnnnnnnnnnnnnnnnnnnnnnnnnnnnnnnnnnnnnnnnnnnnnnnnnnnnnnnnnnnnnnnnnnnnnnnnnnnnnnnnnnnnnnnnnnnnnnnnnnnnnnnnnnnnnnnnnnnnnnnnnnnnnnnnnnnnnnnnnnnnnnnnnnnnnnnnnnnnnnnnnnnnnnnnnnnnnnnnnnnnnnnnnnnnnnnnnnnnnnnnnnnnnnnnnnnnnnnnnnnnnnnnnnnnnnnnnnnnnnnnnnnnnnnnnnnnnnnnnnnnnnnnnnnnnnnnnnnnnnnnnnnnnnnnnnnnnnnnnnnnnnnnnnnnnnnnnnnnnnnnnnnnnnnnnnnnnnnnnnnnnnnnnnnnnnnnnnnnnnnnnnnnnnnnnnnnnnnnnnnnnnnnnnnnnnnnnnnnnnnnnnnnnnnnnnnnnnnnnnnnnnnnnnnnnnnnnnnnnnnnnnnnnnnnnnnnnnnnnnnnnnnnnnnnnnnnnnnnnnnnnnnnnnnnnnnnnnnnnnnnnnnnnnnnnnnnnnnnnnnnnnnnnnnnnnnnnnnnnnnnnnnnnnnnnnnnnnnnnnnnnnnnnnnnnnnnnnnnnnnnnnnnnnnnnnnnnnnnnnnnnnnnnnnnnnnnnnnnnnnnnnnnnnnnnnnnnnnnnnnnnnnnnnnnnnnnnnnnnnnnnnnnnnnnnnnnnnnnnnnnnnnnnnnnnnnnnnnnnnnnnnnnnnnnnnnnnnnnnnnnnnnnnnnnnnnnnnnnnnnnnnnnnnnnnnnnnnnnnnnnnnnnnnnnnnnnnnnnnnnnnnnnnnnnnnnnnnnnnnnnnnnnnnnnnnnnnnnnnnnnnnnnnnnnnnnnnnnnnnnnnnnnnnnnnnnnnnnnnnnnnnnnnnnnnnnnnnnnnnnnnnnnnnnnnnnnnnnnnnnnnnnnnnnnnnnnnnnnnnnnnnnnnnnnnatctcagtcagccagtggcttcttgatgatggttgttggggtggttgttgtgtgacggtcctatctaggttactgaagggtgtatgtcccctgcttgaaccctgaagggcaggaggtgggccatggccgtggtgcccagctgaggagcaggtgtccctgagaactcaaacttcccagagagtatctgagaaccaatcaatgaaaacagtcccatctctcttacccggtaagtaaacagtcagaaaattagcgtgaaagcagcttagcattgggaggaagcacagatctctagagctgtcctgccgccgcccaggagtgccctgtgtgtgagtcctaataaacttacctactcaccaagctgga

SEQ ID NO: 27069 - DNA, 3774 bp, Macaca Mulatta
  misc_feature (1)...(3774): n = A,T,C or G
agccagggtctccaggccccctgagtttccacggttcccaggtgagaccaggaacccccacaaactcaatggccccccacttcccttccacagggaggctactgaggtcctcaagacgtcggaagatcctctacgcagactgccaggcatccctgaaggtgtcctgcacctacaaggaggatgaggggctctacacggtccaagtgccctcacccttcggaccccgggaacagagcacctacgtgcttgtgagagnnnnnnnnnnnnnnnnnnnnnnnnnnnnnnnnnnnnnnnnnnnnnnnnnnnnnnnnnnnnnnnnnnnnnnnnnnnnnnnnnnnnnnnnnnnnnnnnnnnnnnnnnnnnnnnnnnnnnnnnnnnnnnnnnnnnnnnnnnnnnggtgccagggtgactctggggaatgggtcccctgccatgaggcccccggaggaacttgtcggtgcccgatccaaggcctcgttgaaggtcagagctatcggttccgggtgagagccatcagcaaggcgggcagcagcctcccctccaaggcctcagagttggttgtcatgggcgaccatgatgcagcccggaggaagacagnnnnnnnnnnnnnnnnnnnnnnnnnnnnnnnnnnnnnnnnnnnnnnnnnnnnnnnnnnnnnnnnnnnnnnnnnnnnnnnnnnnnnnnnnnnnnnnnnnnnnnnnnnnnnnnnnnnnnnnnnnnnnnnnnnnnnnnnnnnnnnnnnnnnnnnnnnnnnnnnnnnnnnnnnnnnnnnnnnnnnnnnnnnnnnnnnnnnnnnnnnnnnnnnnnnnnnnnnnnnnnnnnnnnnnnnnnnnnnnnnnnnnnnnnnnnnnnnnnnnnnnnnnnnnnnnnnnnnnnnnnnnnnnnnnnnnnnnnnnnnnnnnnnnnnnnnnnnnnnnnnnnnnnnnnnnnnnnnnnnnnnnnnnnnnnnnnnnnnnnnnnnnnnnnnnnnnnnnnnnnnnnnnnnnnnnnnnnnnnnnnnnnnnnnnnnnnnnnnnnnnnnnnnnnnnnnnnnnnnnnnnnnnnnnnnnnnnnnnnnnnnnnnnnnnnnnnnnnnnnnnnnnnnnnnnnnnnnnnnnnnnnnnnnnnnnnnnnnnnnnnnnnnnnnnnnnnnnnnnnnnnnnnnnnnnnnnnnnnnnnnnnnnnnnnnnnnnnnnnnnnnnnnnnnnnnnnnnnnnnnnnnnnnnnnnnnnnnnnnnnnnnnnnnnnnnnnnnnnnnnnnnnnnnnnnnnnnnnnnnnnnnnnnnnnnnnnnnnnnnnnnnnnnnnnnnnnnnnnnnnnnnnnnnnnnnnnnnnnnnnnnnnnnnnnnnnnnnnnnnnnnnnnnnnnnnnnnnnnnnnnnnnnnnnnnnnnnnnnnnnnnnnnnnnnnnnnnnnnnnnnnnnnnnnnnnnnnnnnnnnnnnnnnnnnnnnnnnnnnnnnnncaaggtcagtgaccttcgtgaaggccacttttatgagttccgtgcccgggctgccaactgggcaggtgttggcgagctgtcggcacccagcagcctgttcgagtgcaaagagtggacaatgccccagccaggnnnnnnnnnnnnnnnnnnnnnnnnnnnnnnnnnnnnnnnnnnnnnnnnnnnnnnnnnnnnnnnnnnnnnnnnnnnnnnnnnnnnnnnnnnnnnnnnnnnnnnnnnnnnnnnnnnnnnnnnnnnnnnnnnnnnnnnnnnnnnnnnnnnnnnnnnnnnnnnnnnnnnnnnnnnnnnnnnnnnnnnnnnnnnnnnnnnnnnnnnnnnnnnnnnnnnnnnnnnnnnnnnnnnnnnnnnnnnnnnnnnnnnnnnnnnnnnnnnnnnnnnnnnnnnnnnnnnnnnnnnnnnnnnnncaggtgcccatgagatcgaggttggtgtggatgaagagggttttatctatttggcttttgaagcccctgaagcccccgactcctcagagtttcagtggtccaaagactacaagggcccactggacccccagagggtcacgatcgaggatacagttaacaagtnnnnnnnnnnnnnnnnnnnnnnnnnnnnnnnnnnnnnnnnnnnnnnnnnnnnnnnnnnnnnnnnnnnnnnnnnnnnnnnnnnnnnnnnnnnnnnnnnnnnnnnnnnagagctggagaagctgaagaagctgagtcatgaaatcggaaacccagncccagtgatcaaactgatctccggctggaacgttgacatcctggaacgaggagaggtgcggctttggctggaagtagaaaagttatctccagccgctgagctgcatctaatcttcaacaacaaggagatcttcagctcnnngaaccgcaaaatcaattttgaccgagagaagggcctggtggaagtgatcatccagaacttgtctgaggaggacaaagggtcgtacaccgctcaactccaagacggaaaagccaaaaaccagattaccttgacactggtggatgacgnnnnnnnnnnnnnnnnnnnnnnnnnnnnnnnnnnnnnnnnnnnnnnnnnnnnnnnnnnnnnnnnnnnnnnnnnnnnnnnnnnnnnnnnnnnnnnnnnnnnnnnnnnnnnnnnnnnnnnnnnnnnnnnnnnnnngcccatgctgacaccacacgctcatccttctttccagttgtccaaaaaggacaagggaatttacagagcgatggtttctgacgatcgaggggaggacgacaccatattggacctcacgggtgacgnnnnnnnnnnnnnnnnnnnnnnnnnnnnnnnnnnnnnnnnnnnnnnnnnnnnnnnnnnnnnnnnnnnnnnnnnnnnnnnnnnnnnnnnnnnnnnnnnnnnnnnnnnnnnnnnnnnnnnnnnnnnnnnnnnnnnnnnnnnnnnnnnnnnagacaaacgtctggagagtggtgatcggataaggacgggcaccaccctggatgagatctggcttcacatcctggaccccaaagactcagacaagggcaaatacactctggaaatagctgcagggaaggaattccggcagctctcaacagatctctcagggcaagnnnnnnnnnnnnnnnnnnnnnnnnnnnnnnnnnnnnnnnnnnnnnnnnnnnnnnnnnnnnnnnnnnnnnnnnnnnnnnnnnnnnnnnnnnnnnagaccctgtgcttgacttgcgtcatctcaggagaccccacccctgaaatctcttggctgaagaatgaccagcctgtcaccttccttgaccgataccgcatggaagtgagggggtcagaggtcaccatcaccattgagaaggtcaacagtgatgacagtggccgctacggcgtctttgtcaagaacaagtatggctccgagacaggccaggtcaccatcagtgtgttcaagcacggggacgagcccaaggagctgaagagcatgtgacagcgtgtgtctgggcacagtctgagtctagtctgcatggaccagtagggacaatcagtgggtcacagcctggcacaggctacaggggtggggcagaaggaaaggggacaagatagaacccaggatgtgaggggtgggggtggagcggatgcactaaagtggagaagcaaaaatctttctggggtcctgagtggcctccaggagagcgggatgaaccctggacctggagtaggagacccggatgcactggggctatctaacagtactggcatctgataggtagaggtcaggtacgctgctaaacactgcagctcccactacgtagaattatccgaccccagatgtcaaaaggccaggggtcggagccctgccataaact

SEQ ID NO: 27070 - DNA, 786 bp, Macaca Mulatta
gggggtgggacctgtctgctgcttttgtcatcccacactcatagttgcctcttggtttcttgctgccactgccagctcattgttgagactgctatctctttttctcactcaactctccccagtgcgttttggccactgcagctatgttagaatggcattttatatataccttgtcacctacttctgcctgctttttcctctccagtagaaagtaaaagatttctttcaattggtcttcctgttgcaattactgttatttctcttttttggttaactttaaatcaaaactcaaaatatgttcatccagagtgtaaacttaagtgtcttgagtaacaggaaccagagacatgttacctacaagagttctgggctatccttttcattcttatcacatatcatagcttgaatgttacaagagtgtgggagagtatgaaccttaaaaatgtcttcattaattagacccagttattccacttttgttaatgtctctcaaattgtacaaagtatgaaaaattatatgcacaaagatattccaagtgacattacttttagtagcccatattataaaccactttaaagtttggggtaaagattggcaaactttttctataaagggccagaaagtaactattttaggtttttaaacctactgtctctgtcataacttgtcaacactgctgtatgaagcacaaaagcagccaccgaccatacataaacaatatggggcgtgggcttttgttccagtaaaaactttatttaccaaatgtgggcaccataattttgcac

SEQ ID NO: 27071 - DNA, 9099 bp, Macaca Mulatta
  misc_feature (1)...(9099): n = A,T,C or G
caggaatagctgaaatgttcaagaccccagtgaaggagcaaccacagttgacaagcacaagtcatgtcgctatttcaaattcagagaatttgcnnnnnnnnnnnnnnnnnnnnnnnnnnnnnnnnnnnnnnnnnnnnnnnnnnnnnnnnnnnnnnnnnnnnnnnnnnnnnnnnnnnnnnnnnnnnnnnnnnnnnnnnnnnnnnnnnnnnnnnnnnnnnnnnnnnnnnnnnnnnnnnnnnnnnnnnnnnnnnnnnnnnnnnnnnnnnnnnnnnnnnnnnnnnnnnnnnnnnnnnnnnnnnnnnnnnnnnnnnnnnnnnnnnnnnnnnnnnnnnnnnnnnnnnnnnnnnnnnnnnnnnnnnnnnnnnnnnnnnnnnnnnnnnnnnnnnnnnnnnnnnnnnnnnnnnnnnnnnnnnnnnnnnnnnnnnnnnnnnnnnnnnnnnnnnnnnnnnnnnnnnnnnnnnnnnnnnnnnnnnnnnnnnnnnnnnnnnnnnnnnnnnnnnnnnnnnnnnnnnnnnnnnnnnnnnnnnnnnnnnnnnnnnnnnnnnnnnnnnnnnnnnnnnnnnnnnnnnnnnnnnnnnnnnnnnnnnnnnnnnnnnnnnnnnnnnnnnnnnnnnnnnnnnnnnnnnnnnnnnnnnnnnnnnnnnnnnnnnnnnnnnnnnnnnnnnnnnnnnnnnnnnnnnnnnnnnnnnnnnnnnnnnnnnnnnnnnnnnnnnnnnnnnnnnnnnnnnnnnnnnnnnnnnnnnnnnnnnnnnnnnnnnnnnnnnnnnnnnnnnnnnnnnnnnnnnnnnnnnnnnnnnnnnnnnnnnnnnnnnnnnnnnnnnnnnnnnnnnnnnnnnnnnnnnnnnnnnnnnnnnnnnnnnnnnnnnnnnnnnnnnnnnnnnnnnnnnnnnnnnnnnnnnnnnnnnnnnnnnnnnnnnnnnnnnnnnnnnnnnnnnnnnnnnnnnnnnnnnnnnnnnnnnnnnnnnnnnnnnnnnnnnnnnnnnnnnnnnnnnnnnnnnnnnnnnnnnnnnnnnnnnnnnnnnnnnnnnnnnnnnnnnnnnnnnnnnnnnnnnnnnnnnnnnnnnnnnnnnnnnnnnnnnnnnnnnnnnnnnnnnnnnnnnnnnnnnnnnnnnnnnnnnnnnnnnnnnnnnnnnnnnnnnnnnnnnnnnnnnnnnnnnnnnnnnnnnnnnnnnnnnnnnnnnnnnnnnnnnnnnnnnnnnnnnnnnnnnnnnnnnnnnnnnnnnnnnnnnnnnnnnnnnnnnnnnnnnnnnnnnnnnnnnnnnnnnnnnnnnnnnnnnnnnnnnnnnnnnnnnnnnnnnnnnnnnnnnnnnnnnnnnnnnnnnnnnnnnnnnnnnnnnnnnnnnnnnnnnnnnnnnnnnnnnnnnnnnnnnnnnnnnnnnnnnnnnnnnnnnnnnnnnnnnnnnnnnnnnnnnnnnnnnnnnnnnnnnnnnnnnnnnnnnnnnnnnnnnnnnnnnnnnnnnnnnnnnnnnnnnnnnnnnnnnnnnnnnnnnnnnnnnnnnnnnnnnnnnnnnnnnnnnnnnnnnnnnnnnnnnnnnnnnnnnnnnnnnnnnnnnnnnnnnnnnnnnnnnnnnnnnnnnnnnnnnnnnnnnnnnnnnnnnnnnnnnnnnnnnnnnnnnnnnnnnnnnnnnnnnnnnnnnnnnnnnnnnnnnnnnnnnnnnnnnnnnnnnnnnnnnnnnnnnnnnnnnnnnnnnnnnnnnnnnnnnnnnnnnnnnnnnnnnnnnnnnnnnnnnnnnnnnnnnnnnnnctcctaaggaaaaggcccaggctctggaagacctgactggctttaaagagctcttccagacacctggtcatactgaggaagcagtggctgctggcaaaactactaaaatgccctgcaaatcttctccaccagaattagcagacaccccaacaagcacaannnnnnnnnnnnnnnnnnnnnnnnnnnnnnnnnnnnnnnnnnnnnnnnnnnnnnnnnnnnnnnnnnnnnnnnnnnnnnnnnnnnnnnnnnnnnnnnnnnnnnnnnnnnnnnnnnnnnnnnnnnnnnnnnnnnnnnnnnnnnnnnnnnnnnnnnnnnnnnnnnnnnnnnnnnnnnnnnnnnnnnnnnnnnnnnnnnnnnnnnnnnnnnnnnnnnnnnnnnnnnnnnnnnnnnnnnnnnnnnnnnnnnnnnnnnnnnnnnnnnnnnnnnnnnnnnnnnnnnnnnnnnnnnnnnnnnnnnnnnnnnnnnnnnnnnnnnnnnnnnnnnnnnnnnnnnnnnnnnnnnnnnnnnnnnnnnnnnnnnnnnnnnnnnnnnnnnnnnnnnnnnnnnnnnnnnnnnnnnnnnnnnnnnnnnnnnnnnnnnnnnnnnnnnnnnnnnnnnnnnnnnnnnnnnnnnnnnnnnnnnnnnnnnnnnnnnnnnnnnnnnnnnnnnnnnnnnnnnnnnnnnnnnnnnnnnnnnnnnnnnnnnnnnnnnnnnnnnnnnnnnnnnnnnnnnnnnnnnnnnnnnnnnnnnnnnnnnnnnnnnnnnnnnnnnnnnnnnnnnnnnnnnnnnnnnnnnnnnnnnnnnnnnnnnnnnnnnnnnnnnnnnnnnnnnnnnnnnnnnnnnnnnnnnnnnnnnnnnnnnnnnnnnnnnnnnnnnnnnnnnnnnnnnnnnnnnnnnnnnnnnnnnnnnnnnnnnnnnnnnnnnnnnnnnnnnnnnnnnnnnnnnnnnnnnnnnnnnnnnnnnnnnnnnnnnnnnnnnnnnnnnnnnnnnnnnnnnnnnnnnnnnnnnnnnnnnnnnnnnnnnnnnnnnnnnnnnnnnnnnnnnnnnnnnnnnnnnnnnnnnnnnnnnnnnnnnnnnnnnnnnnnnnnnnnnnnnnnnnnnnnnnnnnnnnnnnnnnnnnnnnnnnnnnnnnnnnnnnnnnnnnnnnnnnnnnnnnnnnnnnnnnnnnnnnnnnnnnnnnnnnnnnnnnnnnnnnnnnnnnnnnnnnnnnnnnnnnnnnnnnnnnnnnnnnnnnnnnnnnnnnnnnnnnnnnnnnnnnnnnnnnnnnnnnnnnnnnnnnnnnnnnnnnnnnnnnnnnnnnnnnnnnnnnnnnnnnnnnnnnnnnnnnnnnnnnnnnnnnnnnnnnnnnnnnnnnnnnnnnnnnnnnnnnnnnnnnnnnnnnnnnnnnnnnnnnnnnnnnnnnnnnnnnnnnnnnnnnnnnnnnnnnnnnnnnnnnnnnnnnnnnnnnnnnnnnnnnnnnnnnnnnnnnnnnnnnnnnnnnnnnnnnnnnnnnnnnnnnnnnnnnnnnnnnnnnnnnnnnnnnnnnnnnnnnnnnnnnnnnnnnnnnnnnnnnnnnnnnnnnnnnnnnnnnnnnnnnnnnnnnnnnnnnnnnnnnnnnnnnnnnnnnnnnnnnnnnnnnnnnnnnnnnnnnnnnnnnnnnnnnnnnnnnnnnnnnnnnnnnnnnnnnnnnnnnnnnnnnnnnnnnnnnnnnnnnnnnnnnnnnnnnnnnnnnnnnnnnnnnnnnnnnnnnnnnnnnnnnnnnnnnnnnnnnnnnnnnnnnnnnnnnnnnnnnnnnnnnnnnnnnnnnnnnnnnnnnnnnnnnnnnnnnnnnnnnnnnnnnnnnnnnnnnnnnnnnnnnnnnnnnnnnnnnnnnnnnnnnnnnnnnnnnnnnnnnnnnnnnnnnnnnnnnnnnnnnnnnnnnnnnnnnnnnnnnnnnnnnnnnnnnnnnnnnnnnnnnnnnnnnnnnnnnnnnnnnnnnnnnnnnnnnnnnnnnnnnnnnnnnnnnnnnnnnnnnnnnnnnnnnnnnnnnnnnnnnnnnnnnnnnnnnnnnnnnnnnnnnnnnnnnnnnnnnnnnnnnnnnnnnnnnnnnnnnnnnnnnnnnnnnnnnnnnnnnnnnnnnnnnnnnnnnnnnnnnnnnnnnnnnnnnnnnnnnnnnnnnnnnnnnnnnnnnnnnnnnnnnnnnnnnnnnnnnnnnnnnnnnnnnnnnnnnnnnnnnnnnnnnnnnnnnnnnnnnnnnnnnnnnnnnnnnnnnnnnnnnnnnnnnnnnnnnnnnnnnnnnnnnnnnnnnnnnnnnnnnnnnnnnnnnnnnnnnnnnnnnnnnnnnnnnnnnnnnnnnnnnnnnnnnnnnnnnnnnnnnnnnnnnnnnnnnnnnnnnnnnnnnnnnnnnnnnnnnnnnnnnnnnnnnnnnnnnnnnnnnnnnnnnnnnnnnnnnnnnnnnnnnnnnnnnnnnnnnnnnnnnnnnnnnnnnnnnnnnnnnnnnnnnnnnnnnnnnnnnnnnnnnnnnnnnnnnnnnnnnnnnnnnnnnnnnnnnnnnnnnnnnnnnnnnnnnnnnnnnnnnnnnnnnnnnnnnnnnnnnnnnnnnnnnnnnnnnnnnnnnnnnnnnnnnnnnnnnnnnnnnnnnnnnnnnnnnnnnnnnnnnnnnnnnnnnnnnnnnnnnnnnnnnnnnnnnnnnnnnnnnnnnnnnnnnnnnnnnnnnnnnnnnnnnnnnnnnnnnnnnnnnnnnnnnnnnnnnnnnnnnnnnnnnnnnnnnnnnnnnnnnnnnnnnnnnnnnnnnnnnnnnnnnnnnnnnnnnnnnnnnnnnnnnnnnnnnnnnnnnnnnnnnnnnnnnnnnnnnnnnnnnnnnnnnnnnnnnnnnnnnnnnnnnnnnnnnnnnnnnnnnnnnnnnnnnnnnnnnnnnnnnnnnnnnnnnnnnnnnnnnnnnnnnnnnnnnnnnnnnnnnnnnnnnnnnnnnnnnnnnnnnnnnnnnnnnnnnnnnnnnnnnnnnnnnnnnnnnnnnnnnnnnnnnnnnnnnnnnnnnnnnnnnnnnnnnnnnnnnnnnnnnnnnnnnnnnnnnnnnnnnnnnnnnnnnnnnnnnnnnnnnnnnnnnnnnnnnnnnnnnnnnnnnnnnnnnnnnnnnnnnnnnnnnnnnnnnnnnnnnnnnnnnnnnnnnnnnnnnnnnnnnnnnnnnnnnnnnnnnnnnnnnnnnnnnnnnnnnnnnnnnnnnnnnnnnnnnnnnnnnnnnnnnnnnnnnnnnnnnnnnnnnnnnnnnnnnnnnnnnnnnnnnnnnnnnnnnnnnnnnnnnnnnnnnnnnnnnnnnnnnnnnnnnnnnnnnnnnnnnnnnnnnnnnnnnnnnnnnnnnnnnnnnnnnnnnnnnnnnnnnnnnnnnnnnnnnnnnnnnnnnnnnnnnnnnnnnnnnnnnnnnnnnnnnnnnnnnnnnnnnnnnnnnnnnnnnnnnnnnnnnnnnnnnnnnnnnnnnnnnnnnnnnnnnnnnnnnnnnnnnnnnnnnnnnnnnnnnnnnnnnnnnnnnnnnnnnnnnnnnnnnnnnnnnnnnnnnnnnnnnnnnnnnnnnnnnnnnnnnnnnnnnnnnnnnnnnnnnnnnnnnnnnnnnnnnnnnnnnnnnnnnnnnnnnnnnnnnnnnnnnnnnnnnnnnnnnnnnnnnnnnnnnnnnnnnnnnnnnnnnnnnnnnnnnnnnnnnnnnnnnnnnnnnnnnnnnnnnnnnnnnnnnnnnnnnnnnnnnnnnnnnnnnnnnnnnnnnnnnnnnnnnnnnnnnnnnnnnnnnnnnnnnnnnnnnnnnnnnnnnnnnnnnnnnnnnnnnnnnnnnnnnnnnnnnnnnnnnnnnnnnnnnnnnnnnnnnnnnnnnnnnnnnnnnnnnnnnnnnnnnnnnnnnnnnnnnnnnnnnnnnnnnnnnnnnnnnnnnnnnnnnnnnnnnnnnnnnnnnnnnnnnnnnnnnnnnnnnnnnnnnnnnnnnnnnnnnnnnnnnnnnnnnnnnnnnnnnnnnnnnnnnnnnnnnnnnnnnnnnnnnnnnnnnnnnnnnnnnnnnnnnnnnnnnnnnnnnnnnnnnnnnnnnnnnnnnnnnnnnnnnnnnnnnnnnnnnnnnnnnnnnnnnnnnnnnnnnnnnnnnnnnnnnnnnnnnnnnnnnnnnnnnnnnnnnnnnnnnnnnnnnnnnnnnnnnnnnnnnnnnnnnnnnnnnnnnnnnnnnnnnnnnnnnnnnnnnnnnnnnnnnnnnnnnnnnnnnnnnnnnnnnnnnnnnnnnnnnnnnnnnnnnnnnnnnnnnnnnnnnnnnnnnnnnnnnnnnnnnnnnnnnnnnnnnnnnnnnnnnnnnnnnnnnnnnnnnnnnnnnnnnnnnnnnnnnnnnnnnnnnnnnnnnnnnnnnnnnnnnnnnnnnnnnnnnnnnnnnnnnnnnnnnnnnnnnnnnnnnnnnnnnnnnnnnnnnnnnnnnnnnnnnnnnnnnnnnnnnnnnnnnnnnnnnnnnnnnnnnnnnnnnnnnnnnnnnnnnnnnnnnnnnnnnnnnnnnnnnnnnnnnnnnnnnnnnnnnnnnnnnnnnnnnnnnnnnnnnnnnnnnnnnnnnnnnnnnnnnnnnnnnnnnnnnnnnnnnnnnnnnnnnnnnnnnnnnnnnnnnnnnnnnnnnnnnnnnnnnnnnnnnnnnnnnnnnnnnnnnnnnnnnnnnnnnnnnnnnnnnnnnnnnnnnnnnnnnnnnnnnnnnnnnnnnnnnnnnnnnnnnnnnnnnnnnnnnnnnnnnnnnnnnnnnnnnnnnnnnnnnnnnnnnnnnnnnnnnnnnnnnnnnnnnnnnnnnnnnnnnnnnnnnnnnnnnnnnnnnnnnnnnnnnnnnnnnnnnnnnnnnnnnnnnnnnnnnnnnnnnnnnnnnnnnnnnnnnnnnnnnnnnnnnnnnnnnnnnnnnnnnnnnnnnnnnnnnnnnnnnnnnnnnnnnnnnnnnnnnnnnnnnnnnnnnnnnnnnnnnnnnnnnnnnnnnnnnnnnnnnnnnnnnnnnnnnnnnnnnnnnnnnnnnnnnnnnnnnnnnnnnnnnnnnnnnnnnnnnnnnnnnnnnnnnnnnnnnnnnnnnnnnnnnnnnnnnnnnnnnnnnnnnnnnnnnnnnnnnnnnnnnnnnnnnnnnnnnnnnnnnnnnnnnnnnnnnnnnnnnnnnnnnnnnnnnnnnnnnnnnnnnnnnnnnnnnnnnnnnnnnnnnnnnnnnnnnnnnnnnnnnnnnnnnnnnnnnnnnnnnnnnnnnnnnnnnnnnnnnnnnnnnnnnnnnnnnnnnnnnnnnnnnnnnnnnnnnnnnnnnnnnnnnnnnnnnnnnnnnnnnnnnnnnnnnnnnnnnnnnnnnnnnnnnnnnnnnnnnnnnnnnnnnnnnnnnnnnnnnnnnnnnnnnnnnnnnnnnnnnnnnnnnnnnnnnnnnnnnnnnnnnnnnnnnnnnnnnnnnnnnnnnnnnnnnnnnnnnnnnnnnnnnnnnnnnnnnnnnnnnnnnnnnnnnnnnnnnnnnnnnnnnnnnnnnnnnnnnnnnnnnnnnnnnnnnnnnnnnnnnnnnnnnnnnnnnnnnnnnnnnnnnnnnnnnnnnnnnnnnnnnnnnnnnnnnnnnnnnnnnnnnnnnnnnnnnnnnnnnnnnnnnnnnnnnnnnnnnnnnnnnnnnnnnnnnnnnnnnnnnnnnnnnnnnnnnnnnnnnnnnnnnnnnnnnnnnnnnnnnnnnnnnnnnnnnnnnnnnnnnnnnnnnnnnnnnnnnnnnnnnnnnnnnnnnnnnnnnnnnnnnnnnnnnnnnnnnnnnnnnnnnnnnnnnnnnnnnnnnnnnnnnnnnnnnnnnnnnnnnnnnnnnnnnnnnnnnnnnnnnnnnnnnnnnnnnnnnnnnnnnnnnnnnnnnnnnnnnnnnnnnnnnnnnnnnnnnnnnnnnnnnnnnnnnnnnnnnnnnnnnnnnnnnnnnnnnnnnnnnnnnnnnnnnnnnnnnnnnnnnnnnnnnnnnnnnnnnnnnnnnnnnnnnnnnnnnnnnnnnnnnnnnnnnnnnnnnnnnnnnnnnnnnnnnnnnnnnnnnnnnnnnnnnnnnnnnnnnnnnnnnnnnnnnnnnnnnnnnnnnnnnnnnnnnnnnnnnnnnnnnnnnnnnnnnnnnnnnnnnnnnnnnnnnnnnnnnnnnnnnnnnnnnnnnnnnnnnnnnnnnnnnnnnnnnnnnnnnnnnnnnnnnnnnnnnnnnnnnnnnnnnnnnnnnnnnnnnnnnnnnnnnnnnnnnnnnnnnnnnnnnnnnnnnnnnnnnnnnnnnnnnnnnnnnnnnnnnnnnnnnnnnnnnnnnnnnnnnnnnnnnnnnnnnnnnnnnnnnnnnnnnnnnnnnnnnnnnnnnnnnnnnnnnnnnnnnnnnnnnnnnnnnnnnnnnnnnnnnnnnnnnnnnnnnnnnnnnnnnnnnnnnnnnnnnnnnnnnnnnnnnnnnnnnnnnnnnnnnnnnnnnnnnnnnnnnnnnnnnnnnnnnnnnnnnnnnnnnnnnnnnnnnnnnnnnnnnnnnnnnnnnnnnnnnnnnnnnnnnnnnnnnnnnnnnnnnnnnnnnnnnnnnnnnnnnnnnnnnnnnnnnnnnnnnnnnnnnnnnnnnnnnnnnnnnnnnnnnnnnnnnnnnnnnnnnnnnnnnnnnnnnnnnnnnnnnnnnnnnnnnnnnnnnnnnnnnnnnnnnnnnnnnnnnnnnnnnnnnnnnnnnnnnnnnnnnnnnnnnnnnnnnnnnnnnnnnnnnnnnngaagtgacaccagtactctgaaaagcatcatcgtccttggagggactgagcactcagcccttcggccacgatttcaggatcgcttccttgtgagccgctgcctccaaaatctcctttgaagctcagacatctttctccagcttcaggcctgtagacataactgttgttcatctccatttactttccagtttgtcccccctcctctctgtgttccccaaatcagagaatagcccaccatcccccaggtcacctgtctggactccccattcacccactttgccaggtgcaggtgaggataacacaccagacagggtagctgtcccccagcaagtgccctgtgtggtcattgcacccccatatacacgcttgtctccccagtgtctggtggggagccacgtgacacgaatattcgctgaatgaatgcagaaatcagtggtactgacttgtgctgtattggctgccatgatagtgttataacagcatcacccatgatcataagggagaatgacattctgcttgagggagggaatagaagggcagggaggggacatctaagggcttcacagggctgcaaagagtacggggattgcgccagggcagaacaggggagggtattcaaggaggagcggctcttagtggaggcactttggaaagggtgaggcataaatgcttccttctaggtaggccaactaaaggacctttagtaggaatgttgctatg

SEQ ID NO: 27072 - DNA, 1573 bp, Macaca Mulatta
  misc_feature (1)...(1573): n = A,T,C or G
aggagcctggatggaggtgaggctgctgaacggcacagggaggtgctcaggccgtgtggaagttctcgtccagggcacgtggggtaccgtgtgtgatgatctctgggacctggctgaggccaccgtcgtgtgccgccagctgcagtgtggccaggctctggcagcccccacaggagcccactttggggcaggctctgggaagatcttactggatgatatgcagtgtgtgggcagtgagagccacctggggcagtgcatgcannnnnnnnnnnnnnnnnnnnnnnnnnnnnnnnnnnnnnnnnnnnnnnnnnnnnnnnnnnnnnnnnnnnnnnnnnnnnnnnnnnnnnnnnnnnnnnnnnnnnnnnnnnnnnnnnnnnnnnnnnnnnnnnnnnnnnnnnnnnnnnnnnnnnnnnnnnnnnnnnnnnnnnnnnnnnnnnnnnnnnnnnnnnnnnnnnnnnnnnnnnnnnnnnnnnnnnnnnnnnnnnnnnnnnnnnnnnnnnnnnnnnnnnnnnnnnnnnnnnnnnnnnnnnnnnnnnnnnnnnnnnnnnnnnnnnnnnnnnnnnnnnnnnnnnnnnnnnnnnnnnnnnnnnnnnnncacctggaggatgtcagcgtcatctgtgcaggnnnnnnnnnnnnnnnnnnnnnnnnnnnnnnnnnnnnnnnnnnnnnnnnnnnnnnnnnnnnnnnnnnnnnnnnnnnnnnnnnnnnnnnnnnnnnnnnnnnnnnnnnnnnnnnnnnnnnnnnnnnnnnnnnnnnnnnnnnnnnnnnnnnnnnnnnnnnnnnnnnnnnnnnnnnnnnnnnnnnnnnnnnnnnnnnnnnnnnnnnnnnnnnnnnnnnnnnnnnnnnnnnnnnnnnnnnnnnnnnnnnnnnnnnnnnnnnnnnnnnnnnnnnnnnnnnnnnnnnnnnnnnnnnnnnnnnnnnnnnnnnnnnnnnnnnnnnnnnnnnnnnnnnnnnnnnnnnnnnnnnnnnnnnnnnnnnnnnnnnnnnnnnnnnnnnnnnnnnnnnnnnnnnnnnnnnnnnnnnnnnnnnnnnnacctgtgggatctgaatgaagctgaggttgtatgccagcagctcgggtgtgattgggccattgctgctcctggaaaggcccactttggcccaggctctggagacatccttctagacaacattcagtgttcaggaagtgagcaccaccttggccagtgccccagctctggctggtcagacgacaactgcggccatcatgaggatgccagtgtcgtctgctnagaagatggaccagagttgtggctggtgggtggctctggccagtgctcaggacatgtggaggtcctacacaagggctcctggggcgctgtctgtggtgacctgtgggatctgaatgaagctgaggttgtatgccagcagctcgggtgtgattgggccattgctgctcctggaaaggcccactttggcccaggctctggagacatccttctagacaacattcagtgttcaggaagtgagcaccaccttggccagtgccccagctctggctggtcagacgacaactgcggccatcatgaggatgccagtgtcgtctgct

SEQ ID NO: 27073 - DNA, 359 bp, Macaca Mulatta
gaagtggcaggtgaagaggagctacagatgattcagcctgagaagctcctgttggtcgcagttggagagtcggccactctgaactgcactgtgacctccctgcttcccgtgggacctgtcctgtggttcagaggagttggaccaggccgagaattaatctacaatcaaaaagaaggccacttcccccgggtaacaactgtttcagacctcacaaaaagaaacaacatggacttttccatccgcatcagtagcatcaccccagcagatgccggcacctactactgtgtgaagtttcgaaaagggagccctgagaacgtggagtttaagtctggaccgggcactgagatggctttgcgtgg

SEQ ID NO: 27074 - DNA, 280 bp, Macaca Mulatta
  misc_feature (1)...(280): n = A,T,C or G
tccactcctgccaggcccagtagccaccacagcgcctgcttcctcagccctgaaatcatgcccctaggtctcctgtggctgggcctagccctgttgggggccctgcatgcccaggcccaggactccagctcagacctgatcccggccccacctctgagcaaggtccctctgcagcagaacttccaggacaaccanttccaggggaagtggtatgtggtaggcctgtcagggaatgcagttggcagaaaagacgaagccccgctaaagatgtatgccacca

SEQ ID NO: 27075 - DNA, 863 bp, Macaca Mulatta
  misc_feature (1)...(863): n = A,T,C or G
ggcatgccagaacagtgggctcgattactacagacctccaacatcaccaaactagagcaaaagaagaatcctcaggctgtgctggatgtcctcaagttctacgactccaacacagtgaagcagaagtatctgagctttactcctcnnnnnnnnnnnnnnnnnnnnnnnnnnnnnnnnnnnnnnnnnnnnnnnnnnnnnnnnnnnnnnnnnnnnnnnnnnnnnnnnnnnnnnnnnnnnnnnnnnnnnnnnnnnnnnnnnnnnnnnnnnnnnnnnnnnnnnnnnnnnnnnnnnnnnnnnnnnnnnnnnnnnnnnnnnnnnnnnnnnnnnnnnnnnnnnnnnnnnnnnnnnnnnnnnnnnnnnnnnnnnnnnnnnnnnnnnnnnnnnnnnnnnnnnnnnnnnnnnnnnnnnnnnnnnnnnnnnnnnnnnnnnnnnnnnnnnnnnnnnnnnnnnnnnnnnnnnnnnnnnnnnnnnnnnnnnnnnnnnnnnnnnnnnnnnnnnnnnnnnnnnnnnnnnnnnnnnnnnnnnnnnnnnnnnnnnnnnnnnnnnnnnnnnnnnnnnnnnnnnnnnnnnnnnnnnnnnnnnnnnnnnnnnnnnnnnnnnnnnnnnnnnnnnnnnnnnnnnnnnnnnnnnnnnnnnnnnnnnnnnnnnnnnnnnnnnnnnnnnnnnnnnnnnnnnnnnnnnnnnnnnnnnnnnnnnnnnnnnnnnnnnnnnnnnnnnnnnnnnnnnnnnnnnnnnnnnnnnnnnnnnnnnnnnnnnnnnnnngtgtttgcaggcgttggagtttttacatgctaatcaagtgatccacagagacatcaaaagcgacaatgtccttttgggaatggaaggatcggttaagctca

SEQ ID NO: 27076 - DNA, 1175 bp, Macaca Mulatta
  misc_feature (1)...(1175): n = A,T,C or G
cataacaagccaaaccagaccgagagtgccacggtgcgcgagtgccgggtgtgtgcgcgccggnnnnnnnnnnnnnnnnnnnnnnnnnnnnnnnnnnnnnnnnnnnnnnnnnnnnnnnnnnnnnnnnnnnnnnnnnnnnnnnnnnnnnnnnnnnnnnnnnnnnnnnnnnnnnnnnnnnnnnnnnnnnnnnnnnnnnnnnnnnnnnnnnnnnnnnnnnnnnnnnnnnnnnnnnnnnnnnnnnnnnnnnnnnnnctgtcaactacttggtcccagaattcccgatcccagcataggagaagttcctgctccagacatgaagatcgcaagccttcggaggnnnnnnnnnnnnnnnnnnnnnnnnnnnnnnnnnnnnnnnnnnnnnnnnnnnnnnnnnnnnnnnnnnnnnnnnnnnnnnnnnnnnnnnnnnnnnnnnnnnnnnnnnnnnnnnnnnnnnnnnnnnnnnnnnnnnnnnnnnnnnnnnnnnnnnnnncagggttgtgtctgaagagaaatccctcatgttcatcaggcccaagaagtacatcgtgtcatcaggctcagagcctcccgagttgggctatgtggacatccggacgctggctgacagtgtgtgtcgctatgacctcaatgacatggatgctgcatggctggaactgaccaatgaagaatttaaggaaatggnnnnnnnnnnnnnnnnnnnnnnnnnnnnnnnnnnnnnnnnnnnnnnnnnnnnnnnnnnnnnnnnnnnnnnnnnnnnnnnnnnnnnnnnnnnnnnnnnnnnnnnnnnnnnnnnnnnnnnnnnnnnnnnnnnnnnnnnnnnnnnnnnnnnnnnnnnnnnnnnnnnnnnnnnnnnnnnngttctgtgacaaatgcaacatctgtgtgcaccaggnnnnnnnnnnnnnnnnnnnnnnnnnnnnnnnnnnnnnnnnnnnnnnnnnnnnnnnnnnnnnnnnnnnnnnnnnnnnnnnnnnnnnnnnnnnnnnnnnnnnnnnnnnnnnnnnnnnnnnnnnnnnnnnnnnnnnnnnnnnnnnnnnnnnnnnnnnnnnnnnnnnnnaggtgagcattggcagcccagagaagatggagcccatcaccaaggtgtcacatattcccagcagtcggtgggcgctagtgtgcagcctctgcaatgagaagtttggggcctctataca

SEQ ID NO: 27077 - DNA, 1298 bp, Macaca Mulatta
  misc_feature (1)...(1298): n = A,T,C or G
aggaagatcagggaatttatcagagcaaagttcgggagctgatcagtgacaaccaataccggctgattgtcaatgtgaatgacctgcgcaggaaaaacgagaagagggctaaccgnggcttctgaacaatgcctttgaggagctggttgccttccagcgggccttaaaggattttgtggcctccattgatgctacctatgccaagcagtatgaggagttctacgtaggattggaaggcagctttggctccaagcatgtctccccgcggactcttacctcctgcttcctcagctgtgtggtctgtgtggagggcattgtcactaaatgtnnnnnnnnnnnnnnnnnnnnnnnnnnnnnnnnnnnnnnntgtcctgctactaagaagaccatagagcgacgttattctgatctcaccaccctggtggcctttccctccagctctgtctatcctaccaagnnnnnnnnnnnnnnnnnnnnnnnnnnnnnnnnnnnnnnnnnnnnnnnnnnnnnnnnnnnnnnnnnnnnnnnnnnnnnnnnnnnnnnnnnnnnnnnnnnnnnnnnnnnnnnnnnnnnnnnnnnnnnnnnnnnnnnnnnnnnnnnnnnnnnnnnnnnnnnnnnnnnnnnnnnnnnnnnnnnnnnnnnnnnnnnnnnnnnnnnnnnnnnnnnnnnnnnnnnnnnnnnnnnnnnnnnnnnnnnnnnnnnnnnnnnnnnnnnnnnnnnnnnnnnnnnnnnnnnnnnnnnnnnnnnnnnnnnnnnnnnnnnnnnnnnnnnnnnnnnnnnnnnnnnnnnnnnnnnnnnnnnnnnnnnnnnnnnnnnnnnnnnnnnnnnnnnnnnnnnnnnnnnnnnnnnnnnnnnnnnnnnnnnnnnnnnnnnnnnnnnnnnnnnnnnnnnnnnnnnnnnnnnnnnnnnnnnnnnnnnnnnnnnnnnnnnnnnnnnnnnnnnnnnnnnnnnnnnnnnnnnnnnnnnnnnnnnnnnnnnnnnnnnnnnnnnnnnnnnnnnnnnnnnnnnnnnnnnnnnnnnnnnnnnnnnnnnnnnnnnnnnnnnnnnnnnnnnnnnnnnnnnnnnnnnnnnnnnnnnnnnnnnnnnnnnnnnnnnnnncgtctggaagcgggggccatggtcctggctgaccgaggtgtggtttgcattgatgaatttgacaaaatgtctgacatggatcgcacagccatccacgaagtgatggagcagggtcgagtgaccattgccaaggctggcatccatgctcggttgaatgcccgctgcagtgttttggcagctgccaaccccgtctacggcag

SEQ ID NO: 27078 - DNA, 536 bp, Macaca Mulatta
  misc_feature (1)...(536): n = A,T,C or G
ggcacgaggctgctnttgaaatccagctcatctgccacaatgtaggttacgtcttggagcatgagctattgctagagcatcatccttagaaatagtgccccagatgtacatgtgttgagcgtattcttgaaagtattgtgtttatgcatttcaatttcaatggtgttggcttcccctccccaccctacgcgtgcataaaaactggttctacaaatttttacttgaagtaccaggcagtttgctttttcaggttgtattgttttatagtattaagtgaaattttaaatgcacangttctatgttgctatctgaactaattcatttattaagtatatttggtaaacagctaaggctcgagttaaaacaattaagtgttttacaatcgatttgctaaaggactatttataactaatatggttttgttttcagtgaattaagcaaagattaaactatatctttgtaaattattttacgtcatagttaaattggtctaccaagctaagaacattctcaaatacagtagtataatgtatgaa

SEQ ID NO: 27079 - DNA, 798 bp, Macaca Mulatta
  misc_feature (1)...(798): n = A,T,C or G
ctccctgctccgcagaccaacgcgtggccgctgagcgaggtgaacggggacttcagcttgtgccccagatacccccgtgccgtgatcgtgccacacgtggtggacgatgatgccctggcacgcagcgcccgatttgatcagggaggtcgctttccggtgctcagctaacccctgctcccagcggcaccgtgagcgcgcccttcccatgctccgcccctaggaggccgtgtcctttctgggcctttttctttttggcccgggccaattcgcgggcttggccgcctgccccagcttcctgctccattctgggtcccgcccctctcccgccttttnnnnnnnnnnnnnnnnnnnnnnnnnnnnnnnnnnccctgacggttctgggccccgcgaagcttagtcccttctttgtcaagccaggacccgcccacgggctattcatagggtcccaaaccactttggccacaacacctccagactggtccgaagcctcctgagttcgccctggtctctctactccagcctgtcggtgtgcagacctggcctaggggccctctaagcctgggggggtcacttccagagctgagtccggtccgcaggttctgctacgctccagccagcccctgaccgttccccagaagcggcgctgcgagaaggaccaggagctgctgcgaactgtgctggcgggagctcgtccgtgggcgccgggcttcatcatggacacgctctcggctcaggcagcgaaacaggcccacgtgactggcggaggcaccgaggccaaggccgcttaccctggctggt

SEQ ID NO: 27080 - DNA, 109 bp, Macaca Mulatta
ggtggcggagagaggtgcgcatcaagaagggcagccaccgatggcagggggagacctggtattatggcccctgtgggaagaggatgaagcaatttccagaagtgatcaa

SEQ ID NO: 27081 - DNA, 117 bp, Macaca Mulatta
agattaatctcgtgattaatccgaaagatttgagaattgacactaagcgagccagtggagctggggggcagcatgtaaataccacagacagtgctgtgggaatagttcatcttccaa

SEQ ID NO: 27082 - DNA, 220 bp, Macaca Mulatta
ttgcaattggcctcttaaacttggtgtcttcccccattatcccttagcagtaattactgtcgctcgttttgcaaactcctgccccccaaaccaagctactcgaatttatttcagtgatgaaagcatatgagcatagtcaaaacaaggagatcttggagtcaaattagaaatgagaaagaaacatcagtccagttaatagtcaagaatggacatttgaacg

SEQ ID NO: 27083 - DNA, 1901 bp, Macaca Mulatta
  misc_feature (1)...(1901): n = A,T,C or G
gggttactttgaaagttgcaacatacacagaaataggatagcaggctttgaagtaaaagcctatgctaaccccacagtggttcgatgtgaaattcaccatggacagactggaggaatatatgtccatgaaaaaggaagaggacaattcatagagaataaaatctatgcaaacaactttgcaggtgtatggattacctgaaatagcgacccaacaataagnnnnnnnnnnnnnnnnnnnnnnnnnnnnnnnnnnnnnnnnnnnnnnnnnnnnnnnnnnnnnnnnnnnnnnnnnnnnnnnnnnnngcatgaaaagggacaaggagtaatagaagagaatgaagtttatagtaacactctggctggagtctgggtgacaactggcagcactccagtactgagaagaaaccggatacatagtggcaagcaggnnnnnnnnnnnnnnnnnnnnnnnnnnnnnnnnnnnnnnnnnnnnnnnnnnnnnnnnnnnnnnnnnnnnnnnnnnnnnnnnnnnnnnnnnnnnnnnnnnnnnnnnnnnnnnnnnnnnnnnnnnnnnnnnnnnnnnnnnnnnnnnnnnnnnnnnnnnnnnnngtctaggctgtatagaagacaatgaaatatttgacaatgcaatggctggagtctggattaagacagatagtaatcctacactaagaagaaataaaatccatgatggaagagatggtggcatctgtatatttaatgggggtcgaggtnnnnnnnnnnnnnnnnnnnnnnnnnnnnnnnnnnnnnnnnnnnnnnnnnnnnnnnnnnnnnnnnnnnnnnnnnnnnnnnnnnnnnnnnnnnnnnnnnnnnnnnnnnnnnnnnnnnnnnnnnnnnnnnnnnnnnnnnnnnnnnnnnnnnnnnnnnnnnnnnnnnnnnnnnnnnnnnnnnnnnnnnnnnnnnnnnnnnnnnnnnnnnnnnnnnnnnngataacaaaataatgaacaatcaagatgccatagaaaaggctgttagtagaggccaatgtttatataaaatatcaagttataccagctatcccatgcatgatttctacagnnnnnnnnnnnnnnnnnnnnnnnnnnnnnnnnnnnnnnnnnnnnnnnnnnnnnnnnnnnnnnnnnnnnnnnnnnnnnnnnnnnnnnnnnnnnnnnnnnnnnnnnnnnnnnnnnnnnnnnnnnnnnnnnnnnnnnnnnnnnnnnnnnnnnnnnnnnnnnnnnnnnnnnnnnnnnnnnnnnnnnnnnnnnnnnnnnnnnnnnnnnnnnnnnnnnnnnnnnnnnnnnnnnnnnnnnnnnnnnnnnnnnnnnnnnnnnnnnnnnnnnnnnnnnnnnnnnnnnnnnnnnnnnnnnnnnnnnnnnnnnnnnnnnnnnnnnnnnnnnnnnnnnnnnnnnnnnnnnnnnnnnnnnnnnnnnnnnnnnnnnnnnnnnnnnnnnnnnnnnnnnnnnnnnnnnnnnnnnnnnnnnnnnnnnnnnnnnnnnnnnnnnnnnnnnnnnnnnnnnnnnnnnnnnnnnnnnnnnnnnnnnnnnnnnnnnnnnnnnnnnnnnnnnnnnnnnnnnnnnnnnnnnnnnnnnnnnnnnnnnnnnnnnnnnnnnnnnnnnnnnnnnnnnnnnnnnnnnnnnnnnnnnnnnnnnnnnnnnnnnnnnnnnnnnnnnnnnnnnnnnnnnnnnnnnnnnnnnnnnnnnnnnnnnnnnnnnnnnnnnnnnnnnnnnnnnnnnnnnnnnnnnnnnnnnnnnnnnnnnnnnnnattcagattgagaaatatgattttaatgctttaatctcatgtagtttgtttttaatttcaagcaaaatcttattgtacttgaatgtgccctgttttgttagcacacctagacttgctgtaactgtactcatgtcccagtatgtacgttctttctatg

SEQ ID NO: 27084 - DNA, 136 bp, Macaca Mulatta
gatgatcctagtgctccccacaaaatccaggaggctctcaaatcctgcctgaaagaggaggagtcatttaacatccagaactccatgtcgcccaaacttgagggtggcaaaggtgaccaggctgacttggatgtga

SEQ ID NO: 27085 - DNA, 502 bp, Macaca Mulatta
tggacctgcccccgcagctctcctttgccctctatgtggcggcctttgcgctgggcttcccgctcaacgtcctggccatccgaggcgcgagggcccacgcccggcgccgtctcacccccagcctggtctacgccctgaacctgggctgctccgacctgttgctgacagtctccctgcccctgaaggcggtggaggcgctggcctccggggcctggcctctgccggcctcactgtgccctgtcttcggggtggcccactttgctccactctatgccggcgggggcttcctggccgccctgagtgcaggccgctacctgggagcggccttccccttgggctaccaagccttccggaggccgtgctattcctggggagtgtgtgcggccatctgggccctcgtcctgtgtcacctgggtctggtctttgtgttggaggctccgggaggctggctggaccacagcaacacctccctgggcatcaacacaccggtcaacggctctcc

SEQ ID NO: 27086 - DNA, 7597 bp, Macaca Mulatta
  misc_feature (1)...(7597): n = A,T,C or G
gttgctgtagaacttgtaaagaaaactgactcttcaccgacctccgtaatgttgcttgatttcatccagcatatcatgaaatcctccccacttatgtttgtaaatgtgaatggaagccatgaggccaaaggcagttgtattgngaattcagtaattggatcataacaagacttctgcggattgcagcaactccctcctgtcatttgttacacaagaaaatctgtgaagtcatctgttcattattatttctttttaaaagcaagagtcctgctatttttggggtactcacgaaagaattattactactttttgaagactgggtttacctccatagaagaaatgtgatgggtcatgctgtggnnnnnnnnnnnnnnnnnnnnnnnnnnnnnnnnnnnnnnnnnnnnnnnnnnnnnnnnnnnnnnnnnnnnnnnnnnnnnnnnnnnnnnnnnnnnnnnnnnnnnnnnnnnnnnnnnnnnnnnnnnnnnnnnnnnnnnnnnnnnnnnnnnnnnnnnnnnnnnnnnnnnnnnnnnnnnnnnnnnnnnnnnnnnnnnnnnnnnnnnnnnnnnnnnnnnnnnnnnnnnnnnnnnnnnnnnnnnnnnnnnnnnnnnnnnnnnnnnnnnnnnnnnnnnnnnnnnnnnnnnnnnnnnnnnnnnnnnnnnnnnnnnnnnnnnnnnnnnnnnnnnnnnnnnnnnnnnnnnnnnnnnnnnnnnnnnnnnnnnnnnnnnnnnnnnnnnnnnnnnnnnnnnnnnnnnnnnnnnnnnnnnnnnnnnnnnnnnnnnnnnnnnnnnnnnnnnnnnnnnnnnnnnnnnnnnnnnnnnnnnnnnnnnnnnnnnnnnnnnnnnnnnggtgtgctcatgcggcttaagtctgatttgctaaaagcagctttgtgccatttactgcagtattttcttaaatttgtgccagctgggtatgaatctgctttacaagtcaggaaggtctatgtgacaaatatttgtaaagctcttttggatgtgcttggaattcaggtagatgcagagnagtacttgttgggcccactttatgcagctttgaaagtggaaagtatggaaatcattgaggagattcaatgccaaactcaacaggaaaacctcagcagtaatagtgatggaatatcacccaaaaggcgtcgtctcagctcatctctaaacccttctaaaagagcaccaaaacagactgagganaattaaacatgtgaacatgaaccaaaagagcgtattatggagtgcactgaaacagaaagctgannnnnnnnnnnnnnnnnnnnnnnnnnnnnnnnnnnnnnnnnnnnnnnnnnnnnnnnnnnnnnnnnnnnnnnnnnnnnnnnnnnnnnnnnnnnnnnnnnnnnnnnnnnnnnnnnnnnnnnnnnnnnnnnnnnnnnnnnnnnnnnnnnnnnnnnnnnnnnnnnnnnnnnnnnnnnnnnnnnnnnnnnnnnnnnnnnnnnnnnnnnnnnnnnnnnnnnnnnnnnnnnnnnnnnnnnnnnnnnnnnnnnnnnnnnnnnnnnnnnnnnnnnnnnnnnnnnnnnnnnnnnnnnnnnnnnnnnnnnnnnnnnnnnnnnnnnnnnnnnnnnnnnnnnnnnnnnnnnnnnnnnnnnnnnnnnnnnnnnnnnnnnnnnnnnnnnnnnnnnnnnnnnnnnnnnnnnnnnnnnnnnnnnnnnnnnnnnnnnnnnnnnnnnnnnnnnnnnnnnnnnnnnnnnnnnnnnnnnnnnnnnnnnnnnnnnnnnnnnnnnnnnnnnnnnnnnnnnnnnnnnnnnnnnnnnnnnnnnnnnnnnnnnnnnnnnnnnnnnnnnnnnnnnnnnnnnnnnnnnnnnnnnnnnnnnnnnnnnnnnnnnnnnnnnnnnnnnnnnnnnnnnnnnnnnnnnnnnnnnnnntgcagcagcagaattcttgtaccagagttcccaagattctnnnagataaagtcaaagatgattctgacattatcaagaaagaatttgcttctatacttggtcaacttgtctgtacccttcatggcatgttttatctgacaagctctttaacagaacctttctctgaacatgaacatgtggacctcttctgtaggaacttgaaagccacttctcaacatgaatgttcatcttctcaactaaaagcgtctgtttgcaagccattccttttcctactnnnnnnnnnnnnnnnnnnnnnnnnnnnnnnnnnnnnnnnnnnnnnnnnnnnnnnnnnnnnnnnnnnnnnnnnnnnnnnnnnnnnnnnnnnnnnnnnnnnnnnnnnnnnnnnnnnnnnnnnnnnnnnnnnnnnnnnnnnnnnnnnnnnnnnnnnnnnnnnnnnnnnnnnnnnnnnnnnnnnnnnnnnnnnnnnnnnnnnnnnnnnnnnnnnnnnnnnnnnnnnnnnnnnnnnnnnnnnnnnnnnnnnnnnnnnnnnnnnnnnnnnnnnnnnnnnnnnnnnnnnnnnnnnnnnnnnnnnnnnnnnnnnnnnnnnnnnnnnnnnnnnnnnnnnnnnnnnnnnnnnnnnnnnnnnnnnnnnnnnnnnnnnnnnnnnnnnnnnnnnnnnnnnnnnnnnnnnnnnnnnnnnnnnnnnnnnnnnnnnnnnnnnnnnnnnnnnnnnnnnnnnnnnnnnnnnnnnnnnnnnnnnnnnnnnnnnnnnnnnnnnnnnnnnnnnnnnnnnnnnnnnnnnnnnnnnnnnnnnnnnnnnnnnnnnnnnnnnnnnnnnnnnnnnnnnnnnnnnnnnnnnnnnnnnnnnnnnnnnnnnnnnnnnnnnnnnnnnnnnnnnnnnnnnnnnnnnnnnnnnnnnnnnnnnnnnnnnnnnnnnnnnnnnnnnnnnnnnnnnnnnnnnnnnnnnnnnnnnnnnnnnnnnnnnnnnnnnnnnnnnnnnnnnnnnnnnnnnnnnnnnnnnnnnnnnnnnnnnnnnnnnnnnnnnnnnnnnnnnnnnnnnnnnnnnnnnnnnnnnnnnnnnnnnnnnnnnnnnnnnnnnnnnnnnnnnnnnnnnnnnnnnnnnnnnnnnnnnnnnnnnnnnnnnnnnnnnnnnnnnnnnnnnnnnnnnnnnnnnnnnnnnnnnnnnnnnnnnnnnnnnnnnnnnnnnnnnnnnnnnnnnnnnnnnnnnnnnnnnnnnnnnnnnnnnnnnnnnnnnnnnnnnnnnnnnnnnnnnnnnnnnnnnnnnnnnnnnnnnnnnnnnnnnnnnnnnnnnnnnnnnnnnnnnnnnnnnnnnnnnnnnnnnggctgattatttacaacccaaattgttgggcattttggctttttttaacatgcagttactgagctctagtgttggcattgaagataagaaaatggnnnnnnnnnnnnnnnnnnnnnnnnnnnnnnnnnnnnnnnnnnnnnnnnnnnnnnnnnnnnnnnnnnnnnnnnnnnnnnnnnnnnnnnnnnnnnnnnnnnnnnnnnnnnnnnnnnnnnnnnnnnnnnnnnnnnnnnnnnnnnnnnnnnnnnnnnnnnnnnnnnnnnnnnnnnnnnnnnnnnnnnnnnnnnnnnnnnnnnnnnnnnnnnnnnnnnnnnnnnnnnnnnnnnnnnnnnnnnnnnnnnnnnnnnnnnnnnnnnnnnnnnnnnnnnnnnnnnnnnnnnnnnnnnnnnnnnnnnnnnnnnnnnnnnnnnnnnnnnnnnnnnnnnnnnnnnnnnnnnnnnnnnnnnnnnnnnnnnnnnnnnnnnnnnnnnnnnnnnnnnnnnnnnnnnnnnnnnnnnnnnnnnnnnnnnnnnnnnnnnnnnnnnnnnnnnnnnnnnnnnnnnnnnnnnnnnnnnnnnnnnnnnnnnnnnnnnnnnnnnnnnnnnnnnnnnnnnnnnnnnnnnnnnnnnnnnnnnnnnnnnnnnnnnnnnnnnnnnnnnnnnnnnnnnnnnnnnnnnnnnnnnnnnnnnnnnnnnnnnnnnnnnnnnnnnnnnnnnnnnnnnnnnnnnnnnnnnnnnnnnnnnnnnnnnnnnnnnnnnnnnnnnnnnnnnnnnnnnnnnnnnnnnnnnnnnnnnnnnnnnnnnnnnnnnnnnnnnnnnngactggagtagaagattcaagctttgcctatggattattgatggaactaacaagagcttaccttgcgtatgctgataatagccgagctcaagattcagctgcctatgccattcaggnnnnnnnnnnnnnnnnnnnnnnnnnnnnnnnnnnnnnnnnnnnnnnnnnnnnnnnnnnnnnnnnnnnnnnnnnnnnnnnnnnnnnnnnnnnnnnnnnnnnnnnnnnnnnnnnnnnnnnnnnnnnnnnnnnnnnnnnnnnnnnnnnnnnnnnnnnnnnnnnnnnnnnnnnnnnnnnnnnnnnnnnnnnnnnnnnnnnnnnnnnnnnnnnnnnnnnnnnnnnnnnnnnnnnnnnnnnnnnnnnnnnnnnnnnnnnnnnnnnnnnnnnnnnnnnnnnnnnnnnnnnnnnnnnnnnnnnnnnnnnnnnnnnnnnnnnnnnnnnnnnnnnnnnnnnnnnnnnnnnnnnnnnnnnnnnnnnnnnnnnnnnnnnnnnnnnnnnnnnnnnnnnnnnnnnnnnnnnnnnnnnnnnnnnnnnnnnnnnnnnnnnnnnnnnnnnnnnnnnnnnnnnnnnnnnnnnnnnnnnnnnnnnnnnnnnnnnnnnnnnnnnnnnnnnnnnnnnnnnnnnnnnnnnnnnnnnnnnnnnnnnnnnnnnnnnnnnnnnnnnnnnnnnnnnnnnnnnnnnnnnnnnnnnnnnnnnnnnnnnnnnnnnnnnnnnnnnnnnnnnnnnnnnnnnnnnnnnnnnnnnnnnnnnnnnnnnnnnnnnnnnnnnnnnnnnnnnnnnnnnnnnnnnnnnnnnnnnnnnnnnnnnnnnnnnnnnnnnnnnnnnnnnnnnnnnnnnnnnnnnnnnnnnnnnnnnnnnnnnnnnnnnnnnnnnnnnnnnnnnnnagaaattgtatgctgctatgcatgaacctgatggagtggccggagtcagcgcaattagaaaggcagaaccatctctaaaagaacagatccttgaacatgaaagccttggtttgctgagggatgccactgcttgttatgatagggctattcagctagaaccagaccagnagatcattcattatcatggtgtagtaaagtccatgttaggtcttggtcagctgtctactgttatcactcaggtgaatggagtgcatgctaacaggtnaggtccgagtggacagatgaattaaacacttacagagtggaagcagcttggaaattgtcacagtgggatttggtggaaaactatttggcagcagnnnnnnnnnnnnnnnnnnnnnnnnnnnnnnnnnnnnnnnnnnnnnnnnnnnnnnnnnnnnnnnnnnnnnnnnnnnnnnnnnnnnnnnnnnnnnnnnnnnnnnnnnnnnnnnnnnnnnnnnnnnnnnnnnnnnagattgcacatgttgtgtgagtggagcatagcatcaaaccacttnnnnnnnnnnnnnnnnnnnnnnnnnnnnnnnnnnnnnnnnnnnnnnnnnnnnnnnnnnnnnnnnnnnnnnnnnnnnnnnnnnnnnnnnnnnnnnnnnnnnnnnnnnnnnnnnnnnnnnnnnnnnnnnnnnnnnnnnnnnnnnnnnnnnnnnnnnnnnnnnnnnnnnnnnnnnnnnnnnnnnnnnnnnnnnnnnnnnnnnnnnnnnnnnnnnnnnnnnnnnnnnnnnnnnnnnnnnnnnnnnnnnnnnnnnnnnnnnnnnnnnnnnnnnnnnnnnnnnnnnnnnnnnnnnnnnnnnnnnnnnnnnnnnnnnnnnnnnnnnnnnnnnnnnnnnnnnnnnnnnnnnnnnnnnnnnnnnnnnnnnnnnnnnnnnnnnnnnnnnnnnnnnnnnnnnnnnnnnnnnnnnnnnnnnnnnnnnnnnnncgatttatggaagaacagctaacttttgaaagcaatgccattatgaaaaaatataaggcaagnnnnnnnnnnnnnnnnnnnnnnnnnnnnnnnnnnnnnnnnnnnnnnnnnnnnnnnnnnnnnnnnnnnnnnnnnnnnnnnnnnnnnnnnnnnnnnnnnnnnnnnnnnnnnnnnnnnnnnnnnnnnnnnnnnnnnnnnngcagatctctacaatatggaaatcagttcatatatcagtcaatgccacgaatgttaactctatggcttgattatggtacaaaggcatatgaatgggaaanagctggccgttccgatcgtgtacagatgaggaatgatttgggtaaaataaacaaggttatcacagagcatacaaactatttagctccatatcaatttttgactgctttttcacaattgatctctcgaatttgtcattctcatgatgaagtttttgttgtcttgatggaaataatagccaaagtatttctagcctatcctcaacaagcaatgtggatgatgacagctgtgtcaaagnagtcttcttatcccatgcgtgtgaacagatgcaaggaaatcctaaataaagccattcatatgaaaaaatccttagagaagtttgttggagatgcaactcgcctaacagataagcttctagaattgtgcaataaaccggtnggttgatggaagtagttccacattaagcatgaggactcattttaaaatgcttaaaaaactggtagaagaagcaacatttagtgaaatcctcattcctctgcaatcagtcatgatacctacacttccatcaattctgggtacccatgctaaccatgctagcccatgagccatttcctnnnnnnnnnnnnnnnnnnnnnnnnnnnnnnnnnnnggtggaaattcttgcttctcttcagaaaccaaagaagatttctttaaaagggtcagatggaaagttctacatcatgatgtgtaagccaaaagatgacctgagaaaggattgtagactaatggaattcaattccttgattaataagnnnnnnnnnnnnnnnnnnnnnnnnnnnnnnnnnnnnnnnnnnnnnnnnnnnnnnnnnnnnnnnnnnnnnnnnnnnnnnnnnnnnnnnnnnnnnnnnnnnnnnnnnnnnnnnnnnnnnnnnnnnnnnnnnnnnnnnnnnnnnnnnnnnnnnggagtgtatatgacaggaaaagaacttcgccagtgtatgctaccaaagtcagcagctttatctgaaaaactcaaagtattccgagaatttctcctgcccaggcatcctcctatttttcatgagtggtttctgagaacattccctgatcctacatcatggtanggtacagtagtagatcagcatactgccgttccactgcagtaatgtcaatggttggttatattctggggcttggagaccgtcatggtgaaaatattctctttgattctttgactggtgaatgcgtacatgtagatttcaactgtcttttcaataaggnnnnnnnnnnnnnnnnnnnnnnnnnnnnnnnnnnnnnnnnnnnnnnnnnnnnnnnnnnnnnnnnnnnnnnnnnnnnnnnnnnnnnnnnnnnnnnnnnnnnnnnnnnnnnnnnnnnnnnnnnnnnnnnnnnnnnnnnnnnnnnnnnnnnnagtgtcttaaagacttttctacatgatcctcttgtggagtggagtaaaccagtgaaagggcattccaaagcaccactgaatgaaactggagaagttgtcaacgaaaagg

SEQ ID NO: 27087 - DNA, 2012 bp, Macaca Mulatta
  misc_feature (1)...(2012): n = A,T,C or G
ggcagctgcaggaagaagtgctttgatgcatcatttagaggactggagaactgccggtgtgatgtggcatgtaaagaccgaggcgattgctgctgggattttgaagacacctgtgtggcatcaannnnnnnnnnnnnnnnnnnnnnnnnnnnnnnnnnnnnnnnnnnnnnnnnnnnnnnnnnnnnnnnnnnnnnnnnnnnnnnnnnnnnnnnnnnnnnnnnnnnnnnnnnnnnnnnnnnnnnnnnnnnnnnnnnnnnnnnnnnnnnnnnnnnnnnnnnnnnnnnnnnnnnnnnnnnnnnnnnnnnnnnnnnnnnnnnnnnnnnnnnnnnnnnnnnnnnnnnnnnnnnnnnnnnnnnnnnnnnnnnnnnnnnnnnnnnnnnnnnnnnnnnnnnnnnnnnnnnnnnnnnnnnnnnnnnnnnnnnnnnnnnnnnnnnnnnnnnnnnnnnnnnnnnnnnnnnnnnnnnnnnnnnnnnnnnnnnnnnnnnnnnnnnnnnnnnnnnnnnnnnnnnnnnnnnnnnnnnnnnnnnnnnnnnnnnnnnnnnnnnnnnnnnnnnnnnnnnnnnnnnnnnnnnnnnnnnnnnnnnnnnnnnnnnnnnnnnnnnnnnnnnnnnnnnnnnnnnnnnnnnnnnnnnnnnnnnnnnnnnnnnnnnnnnnnnnnnnnnnnnnnnnnnnnnnnnnnnnnnnnnnnnnnnnnnnnnnnnnnnnnnnnnnnnnnnnnnnnnnnnnnnnnnnnnnnnnnnnnnnnnnnnnnnnnnnnnnnnnnnnnnnnnnnnnnnnnnnnnnnnnnnnnnnnnnnnnnnnnnnnnnnnnnnnnnnnnnnnnnnnnnnnnnnnnnnnnnnnnnnnnnnnnnnnnnnnnnnnnnnnnnnnnnnnnnnnnnnnnnnnnnnnnnnnnnnnnnnnnnnnnnnnnnnnnnnnnnnnnnnnnnnnnnnnnnnnnnnnnnnnnnnnnnnnnnnnnnnnnnnnnnnnnnnnnnnnnnnnnnnnnnnnnnnnnnnnnnnnnnnnnnnnnnnnnnnnnnnnnnnnnnnnnnnnnnnnnnnnnnnnnnnnnnnnnnnnnnnnnnnnnnnnnnnnnnnnnnnnnnnnnnnnnnnnnnnnnnnnnnnnnnnnnnnnnnnnnnnnnnnnnnnnnnnnnnnnnnnnnnnnnnnnnnnnnnnnnnnnnnnnnnnnnnnnnnnnnnnnnnnnnnnnnnnnnnnnnnnnnnnnnnnnnnnnnnnnnnnnnnnnnnnnnnnnnnnnnnnnnnnnnnnnnnnnnnnnnnnnnnnnnnnnnnnnnnnnnnnnnnnnnnnnnnnnnnnnnnnnnnnnnnnnnnnnnnnnnnnnnnnnnnnnnnnnnnnnnnnnnnnnnnnnnnnnnnnnnnnnnnnnnnnnnnnnnnnnnnnnnnnnnnnnnnnnnnnnnnnnnnnnnnnnnnnngatcttctacgcattcagccagcaccaaacaacggaacccgtggtagtttaaaccatcttctgaaggtgcctttttatgagccatcccatgcagaggaggtgtcaaagttttctgtttnnnnnnnnnnnnnnnnnnnnnnnnnnnnnnnnnnnnnnnnnnnnnnnnnnnnnnnnnnnnnnnnnnnnnnnnnnnnnnnnnnnnnnnnnnnnnnnnnnnnnnnnnnnnnnnnnnnnnnnnnnnnnnnnnnnnnnnnnnnnnnnnnnnnnnnnnnnnnnnnnnnnnnnnnnnnnnnnnnnnnnnnnnnnnnnnnnnnnnnnnnnnnnnnnnnnnnnnnnnnnnnnnnnnnnnnnnnnnnnnnnnnnnnnnnnnnnnnnnnnnnnnnnnnnnnnnnnnnnnnnnnnnnnnnnnnnnnnnnnnnnnnnnnnnnnnnnnnnnnnnnnnnnnnnnnnnnnnnnnnnnnnnnnnnnnnnnnnnnnnnnnnnnnnnnnnnnnnnnnnnnnnnnnnnnnnnnnnnnnnnnnnnnnnnnnnnnnnnnnnnatagccaatatgatgctttaattatgagcaatttggtacctatgtatgaagaattcagaa

SEQ ID NO: 27088 - DNA, 799 bp, Macaca Mulatta
gaaagaacgcgcattttttacgttataacctattcgggggccctccggcggcccaaaaacggaattggttttatgaaaagctttttaaagggggccgagggttggcccaacaaaggcattctctactcagtttatatatgaggggcgaactcttttaaacccaagatcttttattaaagagtttcctcgaatgggtcccttgtcatcaatgagcagatcccccaagaccaccgtcttgtcccttgtcaggataattcgttctacgaactggggccccaggtgttgctccacccagcggtatttctgggtttctggtggtttcttattaaaatcaggatttaggcagctccacgtgcggagtaggggcggggcagccacaccttctcacccacacagtggtcgtacttcagcagggggctggtgcagatgaagacctccgtgtccggtaggtcgttcatctcccgcacagcgtccaaggcccccgggatgggctccaggtccaggaaaaagcccggggcttcgtacacactggccactttatccgccaggtcgggccgcagggcgcggtactgctcgcgggccaggaagccgcggcgctgctccagcggcacgtgcggctcctcagggaagcggcggcggaagccccgcagaaggccggcctcgaagtcggccaggacgccgtccatgtccaccagcacacgcaggcgccgcgccatcgccgccgggccggggctgcaggctctcggcgtctggggggcgcgggcccggccggaagcgcggggagtgggaggggagcccc

SEQ ID NO: 27089 - DNA, 179 bp, Macaca Mulatta
agcatctttatgacccatctgtccaattatggaaatgatcggctgggcctgtacacctttgagagcttggtgcgcttcctccagtgctggacacggctgcgcctacagacccttcctcctgtcccgcttgcacagaagtactttgaacttttccctcaggagcgaagccccctttggca

SEQ ID NO: 27090 - DNA, 1359 bp, Macaca Mulatta
  misc_feature (1)...(1359): n = A,T,C or G
agcttgggggtcaggggaaggaactgggaggacctaggctgccgttccgcggagcccggccgatgaggnnnnnnnnnnnnnnnnnnnnnnnnnnnnnnnnnnnnnnnnnnnnnnnnnnnnnnnnnnnnnnnnnnnnnnnnnnnnnnnnnnnnnnnnnnnnnnnnnnnnnnnnnnnnnnnnnnnnnnnnnnnnnnnnnnnnnnnnnnnnnnnnnnnnnnnnnnnnnnnnnnnnnnnnnnnnnnnnnnnnnnnnnnnnnnnnnnnnnnnnnnnnnnnnnnnnnnnnnnnnnnnnnnnnnnnnnnnnnnnnnnnnnnnnnnnnnnnnnnnnnnnnnnnnnnnnnnnnnnnnnnnnnnnnnnnnnnnnnnnnnnnnnnnnnnnnnnnnnnnnnnnnnnnnnnnnnnnnnnnnnnnnnnnnnnnnnnnnnnnnnnnnnnnnnnnnnnnnnnnnnnnnnnnnnnnnnnnnnnnnnnnnnnnnnnnnnnnnnnnnnnnnnnnnnnnnnnnnnnnnnnnnnnnnnnnnnnnnnnnnnnnnnnnnnnnnnnnnnnnnnnnnnnnnnnnnnnnnnnnnnnnnnnnnnnnnnnnnnnnnnnnnnnnnnnnnnnnnnnnnnnnnnnnnnnnnnnnnnnnnnnnnnnnnnnnnnnnnnnnnnnnnnnnnnnnnnnnnnnnnnnnnnnnnnnnnnnnnnnnnnnnnnnnnnnnnnnnnnnnnnnnnnnnnnnnnnnnnnnnnnnnnnnnnnnnnnnnnnnnnnnnnnnnnnnnnnnnnnnnnnnnnnnnnnnnnnnnnnnnnnnnnnnnnnnnnnnnnnnnnnnnnnnnnnnnnnnnnnnnnnnnnnnnnnnnnnnnnnnnnnnnnnnnnnnnnnnnnnnnnnnnnnnnnnnnnnnnnnnnnnnnnnnnnnnnnnnnnnnnnnnnnnnnnnnnnnnnnnnnnnnnnnnnnnnnnnnnnnnnnnnnnnnnnnnnnnnnnnnnnnnnnnnnnnnnnnnnnnnnnnnnnnnnnnnnnnnnnnnnnnnnnnnnnnnnnnnnnnnnnnnnnnnnnnnnnnnnnnnnnnnnnnnnnnnnnnnnnnnnnnnnnnnnnnnnnnnnnnnnnnnnnnnnnnnnnnggctccaaagactgatattcttatggaactacctactttcactgaatctaaagagaacatagtggatcttgcacctcaactgaagggaactaaggnnnnnnnnnnnnnnnnnnnnnnnnnnnnnnnnnnnnnnnnnnnnnnnnnnnnnnnnnnnnnnnnnnnnnnnnnnnnnnnnnnnnnnnnnnnnnnnnnnnnnacactccaggccaaatcacaaatgacggcccagaacagcaaggctagttcaaaaggagcata

SEQ ID NO: 27091 - DNA, 2386 bp, Macaca Mulatta
  misc_feature (1)...(2386): n = A,T,C or G
tacattatgaaggaacctgtactaaatgatgatgtcccaagtcgtctactctgtggagccatcaaggtgaaatctacagtgaaagagctcacagaaacttctgccatttttgaggatggaacagtggaggagaacattgatgtcatcatttttgcaacaggatatagtttctcttttcccttccttgaagattcacttgttaaagtagagaataatatggtctcactgtataagtacatattcccagctcacctggagaagtcaacctttgcatgcattggtctcatccagcccctaggttccattttcccaactgctgaacttcaagctcgttgggtgacaagagttttcaaaggnnnnnnnnnnnnnnnnnnnnnnnnnnnnnnnnnnnnnnnnnnnnnnnnnnnnnnnnnnnnnnnnnnnnnnnnnnnnnnnnnnnnnnnnnnnnnnnnnnnnnnnnnnnnnnnnnnnnnnnnnnnnnnnnnnnnnnnnnnnnnnnnnnnnnnnnnnnnnnnnnnnnnnnnnnnnnnnnnnnnnnnnnnnnnnnnnnnnnnnnnnnnnnnnnnnnnnnnnnnnnnnnnnnnnnnnnnnnnnnnnnnnnnnnnnnnnnnnnnnnnnnnnnnnnnnnnnnnnnnnnnnnnnnnnnnnnnnnnnnnnnnnnnnnnnnnnnnnnnnnnnnnnnnnnnnnnnnnnnnnnnnnnnnnnnnnnnnnnnnnnnnnnnnnnnnnnnnnnnnnnnnnnnnnnnnnnnnnnnnnnnnnnnnnnnnnnnnnnnnnnnnnnnnnnnnnnnnnnnnnnnnnnnnnnnnnnnnnnnnnnnnnnnnnnnnnnnnnnnnnnnnnnnnnnnnnnnnnnnnnnnnnnnnnnnnnnnnnnnnnnnnnnnnnnnnnnnnnnnnnnnnnnnnnnnnnnnnnnnnnnnnnnnnnnnnnnnnnnnnnnnnnnnnnnnnnnnnnnnnnnnnnnnnnnnnnnnnnnnnnnnnnnnnnnnnnnnnnnnnnnnnnnnnnnnnnnnnnnnnnnnnnnnnnnnnnnnnnnnnnnnnnnnnnnnnnnnnnnnnnnnnnnnnnnnnnnnnnnnnnnnnnnnnnnnnnnnnnnnnnnnnnnnnnnnnnnnnnnnnnnnnnnnnnnnnnnnnnnnnnnnnnnnnnnnnnnnnnnnnnnnnnnnnnnnnnnnnnnnnnnnnnnnnnnnnnnnnnnnnnnnnnnnnnnnnnnnnnnnnnnnnnnnnnnnnnnnnnnnnnnnnnnnnnnnnnnnnnnnnnnnnnnnnnnnnnnnnnnnnnnnnnnnnnnnnnnnnnnnnnnnnnnnnnnnnnnnnnnnnnnnnnnnnnnnnnnnnnnnnnnnnnnnnnnnnnnnnnnnnnnnnnnnnnnnnnnnnnnnnnnnnnnnnnnnnnnnnnnnnnnnnnnnnnnnnnnnnnnnnnnnnnnnnnnnnnnnnnnnnnnnnnnnnnnnnnnnnnnnnnnnnnnnnnnnnnnnnnnnnnnnnnnnnnnnnnnnnnnnnnnnnnnnnnnnnnnnnnnnnnnnnnnnnnnnnnnnnnnnnnnnnnnnnnnnnnnnnnnnnnnnnnnnnnnnnnnnnnnnnnnnnnnnnnnnnnnnnnnnnnnnnnnnnnnnnnnnnnnnnnnnnnnnnnnnnnnnnnnnnnnnnnnnnnnnnnnnnnnnnnnnnnnnnnnnnnnnnnnnnnnnnnnnnnnnnnnnnnnnnnnnnnnnnnnnnnnnnnnnnnnnnnnnnnnnnnnnnnnnnnnnnnnnnnnnnnnnnnnnnnnnnnnnnnnnnnnnnnnnnnnnnnnnnnnnnnnnnnnnnnnnnnnnnnnnnnnnnnnnnnnnnnnnnnnnnnnnnnnnnnnnnnnnnnnnnnnnnnnnnnnnnnnnnnnnnnnnnnnnnnnnnnnnnnnnnnnnnnnnnnnnnnnnnnnnnnnnnnnnnnnnnnnnnnnnnnnnnnnnnnnnnnnnnnnnnnnnnnnnnnnnnnnnnnnnnnnnnnnnnnnnnnnnnnnnnnnnnnnnnnnnnnnnnnnnnnnnnnnnnnnnnnnnnnnnnnnnnnnnnnnnnnnnnnnnnnnnnnnnnnnnnnnnnnnnnnnnnnnnnnnnnnnnnnnnnnnnngaattgaagtctaaaacaaacaaaagcaattcaatgtcaatagacattgagcaacgtaatagacaaatatctcctaatggaacatttgttacagctgctccttccatgaactgtgctttgtaaaatgagctctgtcgtgagtccaaaccaaacccttccaagagagaacaaaggtcagagatgttgaagatttcaacaaatttctcctcttatttctaccaagcctttgtgaacattgttcttcattttggcctggatttctccctcagggacctagaacaatggaatgtcagtc

SEQ ID NO: 27092 - DNA, 892 bp, Macaca Mulatta
gtttccccatctcccactaagaattatttgcttcaaaaggagatctttagaaaaatccccatatatttaaaattattgtgtatttttctttacctactataaatataatacagtcataaaatatattaaacatttaaggagaaaactcttcattctatttcattctagtctttttttctgtgcattttagtgtgcgtgaaattatattgtgtgttcaactttgtattttcactgacttcaaaacacttaaattttggtttgaattgaaactggctggccatctgttaaacaacatctcttatctcccctaaaaagtccctaggaagtaacagaaaagatggaaacacgcagaacttaaaactcagttttggccagtagaattcagttgtttatggacacaagccacctaataaaagataggaaagcattgtatgaccttgtgtctgagacagtgttctctgagttgttatctctgtcaaccagaaaacccagggactgtccttctgttgcaggggtgcttcacttttaggtgaccacagtgcactcttatcccttccatttcctggttttccacgcttaataataggttcagataccaaataacaagaagtacagaattttctctaagtaaggtgtgaagggtatggacaaaagtgctagaaatggaagatactctattggttcggaattggagatccaagcagtagaattttatttaatctcagtagaacggagtggtaatagagaaatatctgcaaggacagcattgaactcagaactctgtgcaacgatgaaccctgaagctaattatgtaagaagagggtttggccattatgtcagaatagttaaagttaataggaatacacagtcctaattattgatatacaaataa

SEQ ID NO: 27093 - DNA, 804 bp, Macaca Mulatta
  misc_feature (1)...(804): n = A,T,C or G
ttcnnggtnnnnnnnnnnnnnnnnnnnnnnnnnnnnnnnnnnnnnnnnnnnnnnnnnnnnnnnnnnnnnnnnnnnnnnnnnnnnnnnnnnnnnnnnnntaatcagcgtatatgttgcagtgctttaagatgttctcaaggagtaattaatttatttccagtaatctcggcatcatagtacatcttggaaaggaaagtatttagctttacatatttctgtaaatttacatattattcataagaaaatacatttaacccttgtcctgccacagaattattttgtgnnnnnnnnnnnnnnnnnnnatgtactttttgaaatatgtgtacatcaaaaccaaaaaagttaacttttactttttcctttattggcaacttttgatgcatttcttggttttggttcccagagggcattttttacaaatcttgaagctgcacctctgtccagcttgccagcctttttcttgtctgttatttccttgactctgttcatatatactctgattctttccaattcctgttttactggatgttccttaggattaactccttgagttgccaaataaacccaaaacattgaatttaatgtgtatgcagaaaccaaatccacttttgcttgttcaagtgggtccaacttctgcaacaactcatttctagaaacagacatcatggtcttcagcatctcatccacagcaccaatggaattctcaaacgctgacaaatactcatgaatttctactggatagtcttcattaatttcttcacctgccattatggctgactcagggccttcgactacagtctcccc

SEQ ID NO: 27094 - DNA, 282 bp, Macaca Mulatta
cctgtgtgagaagttgctctgtgcctgtgaccagacggcagctgagtgcatggcctctgcctcctttaaccaaagtctcaagtccccaagcagactcgggtgccctgggcaaccagagacctgtcaagacagcctgcaccatgtgcctgcagcccccaccctgggctccagctctgaggaggacagccaggaggaccctccccaggaggaccttggcagagccaagaggtttctgcagaagtcactgggtccgttggggaccaggcccctccatggaagata

SEQ ID NO: 27095 - DNA, 456 bp, Macaca Mulatta
  misc_feature (1)...(456): n = A,T,C or G
gggaagagctgaacctggcggtgctccatgcttttgtggatctgcatgagttcaccgacctcaatctggtgcaggccctcaggnnnnnnnnnnnnnnnnnnnnnnnnnnnnnnnnnnnnnnnnnnnnnnnnnnnnnnnnnnnnnnnnnnnnnnnnnnnnnnnnnnnnnnnnnnnnnnnnnnnnnnnnnnnnnnnnnnnnnnnnnnnnnnnnnnnnnnnnnnnnnnnnnnnnnnnnnnnnnnnnnnnnnnnnnnnnnnnnnnnnnnnnnnnnnnnnnnnnnnnnnnnnnnnnnnnnnnnnnnnnnnnnnnnnnnnnnnnnnnnnnnnnnnnnnnnnnnnnnnnngaacctctacgacagcatccgaaatgagcccttcaagattcctgaggatgacgggaacgacctgacccacaccttcttcaacccagaccgggagggctggctcctgaagctgg

SEQ ID NO: 27096 - DNA, 6017 bp, Macaca Mulatta
  misc_feature (1)...(6017): n = A,T,C or G
ttttgacacgacgggcacagggtccctggggcaggaagaactcaccgacctttgccacatgttgagcttggaggaggtggccccagtgctgcagcagacgttacttcaggacaacctcttgggaagggtnnnnnnnnnnnnnnnnnnnnnnnnnnnnnnnnnnnnnnnnnnnnnnnnnnnnnnnnnnnnnnnnnnnnnnnnnnnnagactgctcactagaagctcagcccaaatatgttagaggtgggaagcgttatggacgaaggtccttgcccgagttccaagagtccgtggaggagtttgccgaagtgacagtgattgagccactggatgaagaagcgcggccttcacacatcccagccagtgactgcagtgagnnnnnnnnnnnnnnnnnnnnnnnnnnnnnnnnnnnnnnnnnnnnnnnnnnnnnnnnnnnnnnnnnnnnnnnnnnnnnnnnnnnnnnnnnnnnnnnnnnnnnnnnnnnnnnnnnnnnnnnnnnnnnnnnnnnnnnnnnnnnnnnnnnnnnnnnnnnnnnnnnnnnnnnnnnnnnnnnnnnnnnnnnnnnnnnnnnnnnnnnnnnnnnnnnnnnnnnnnnnnnnnnnnnnnnnnnnnnnnnnnnnnnnnnnnnnnnnnnnnnnnnnnnnnnnnnnnnnnnnnnnnnnnnnnnnnnnnnnnnnnnnnnnnnnnnnnnnnnnnnnnnnnnnnnnnnnnnnnnnnnnnnnnnnnnnnnnnnnnnnnnnnnnnnnnnnnnnnnnnnnnnnnnnnnnnnnnnnnnnnnnnnnnnnnnnnnnnnnnnnnnnnnnnnnnnnnnnnnnnnnnnnnnnnnnnnnnnnnnnnnnnnnnnnnnnnnnnnnnnnnnnnnnnnnnnnnnnnnnnnnnnnnnnnnnnnnnnnnnnnnnnnnnnnnnnnnnnnnnnnnnnnnnnnnnnnnnnnnnnnnnnnnnnnnnnnnnnnnnnnnnnnnnnnnnnnnnnnnnnnnnnnnnnnnnnnnnnnnnnnnnnnnnnnnnnnnnnnnnnnnnnnnnnnnnnnnnnnnnnnnnnnnnnnnnnnnnnnnnnnnnnnnnnnnnnnnnnnnnnnnnnnnnnnnnnnnnnnnnnnnnnnnnnnnnnnnnnnnnnnnnnnnnnnnnnnnnnnnnnnnnnnnnnnnnnnnnnnnnnnnnnnnnnnnnnnnnnnnnnnnnnnnnnnnnnnnnnnnnnnnnnnnnnnnnnnnnnnnnnnnnnnnnnnnnnnnnnnnnnnnnnnnnnnnnnnnnnnnnnnnnnnnnnnnnnnnnnnnnnnnnnnnnnnnnnnnnnnnnnnnnnnnnnnnnnnnnnnnnnnnnnnnnnnnnnnnnnnnnnnnnnnnnnnnnnnnnnnnnnnnnnnnnnnnnnnnnnnnggaaaacagtcgtctggaaagtgagcttctggaaaatgcagagaagttgggagaatatgagaatctgacgaacaaacttcagcgaaatttggaaaatgtgttagcagaaaagnagtttggtgacctcgatcccagcagtgctgagttcttcctgcaagaagagagactgacacagatgagaaatgaatatgagcagcagtgcagggtannnnnnnnnnnnnnnnnnnnnnnnnnnnnnnnnnnnnnnnnnnnnnnnnnnnnnnnnnnnnnnnnnnnnnnnnnnnnnnnnnnnnnnnnnnnnnnnnnnnnnnnnnnnnnnnnnnnnnnnnnnnnnnnnnnnnnnnnnnnnnnnnnnnnnnnnnnnnnnnnnnnnnnnnnnnnnnnnnnnnnnnnnnnnnnnnnnnnnnnnnnnnnnnnnnnnnnnnnnnnnnnnnnnnnnnnnnnnnnnnnnnnnnnnnnnnnnnnngtgcaccattatgaaaagcagctggatgaaaccattgtcagctgcaagaaggcacaggagaacatgaagcaaaggcacgagaatgaaatgcacaccttggaaaaacaaataagtgaccttaaaaatgaaattgctgaacttcaggggcaagcagcagtactcaaggaggcacatcatgaggccacttgcaggcatgaggaggagaagaaacaactgcaagcgaagcttgaggaggaaaagactcacctgcaggagaagctgaggctggaacatgagatggagctcaaggctagactggcgcaggctcaagcaagctttgagcaggagagggaaggccttcagagtcgcgcctggacagaagagaaggtgagaggcttgactcaggaactagagcggtttcaccaggagcagctgacgagcctggtagagaagcacactcttgagaaagaggagttaagaaaagagctcttggaaaagcaccaaaaggagcttcaggagggaagnnnnnnnnnnnnnnnnnnnnnnnnnnnnnnnnnnnnnnnnnnnnnnnnnnnnnnnnnntgattgtcagaaagtcactgagaggtgtgaaagcgctctgcaaagcctggaagggcgctaccgccaagagctgaaggacctccgggaacagcagcgcgaggagaaatcccagtgggagtttgagaaggacgagctcacccaggagtgtgcggaagcccaggagctgctgaaagagactcttaagagagagaaagcaacttctctggtcctaacgcaggagagagagatgctggagaaaacatacgaagaacatttgaacagcatggttgtcgaaagagagcagctactccaagacctggaagacctaaggaatgtatctgaaacccagcaaagcctgctgtccgaccagattctcgagctgaagagcagtcacgagcgagaactgagggagcgcgaggaggccctgtgccaggcaggggcctcggagcagttggccagccagcggctggaaagactagaaatggaacatgaccaggaaaggcaggaaatgatgtctaagcttctggccatggagaacattcacaaaacaacctgtgagaaagcagatcgagaaagagctgagatgagcacagaaatctccagacttaagagtaaaataaaggaaatgcagcaggcagcatctcctctctccacgcttcagagtggttcccaggtgataggagaggaggaggtggaaggagatggagccctgtccctgcttcagcaaggggagcagctgttggaagaaaatggggacgtcctcttaagtctacagagagctcatgaacaggcagtaaaggaaaatgtgaaaatggctactgaaatttccagattgcaacagaggctacaaaagttagagccagggttagtaatgtcttgtttggatgaaccagctactgagttttttggagatactgcggaacaagcagagcnnnnnnnnnnnnnnnnnnnnnnnnnnnnnnnnnnnnnnnnnnnnnnnnnnnnnnnnnnnnnnnnnnnnnnnnnnnnnnnnnnnnnnnnnnnnnnnnnnnnnnnnnnnnnnnnnnnnnnnnnnnnnnnnnnnnnnnnnnnnnnnnnnnnnnnnnnnnnnnnnnnnnnnnnnnnnnnnnnnnnnnnnnnnnnnnnnnnnnnnnnnnnnnnnnnnnnnnnnnnnnnnnnnnnnnnnnnnnnnnnnnnnnnnnnnnnnnnnnnnnnnnnnnnnnnnnnnnnnnnnnnnnnnnnnnnnnnnnnnnnnnnnnnnnnnnnnnnnnnnnnnnnnnnnnnnnnnnnnnnnnnnnnnnnnnnnnnnnnnnnnnnnnnnnnnnnnnnnnnnnnnnnnnnnnnnnnnnnnnnnnnnnnnnnnnnnnnnnnnnnnnnnnnnnnnnnnnnnnnnnnnnnnnnnnnnnnnnnnnnnnnnnnnnnnnnnnnnnnnnnnnnnnnnnnnnnnnnnnnnnnnnnnnnnnnnnnnnnnnnnnnnnnnnnnnnnnnnnnnnnnnnnnnnnnnnnnnnnnnnnnnnnnnnnnnnnnnnnnnnnnnnnnnnnnnnnnnnnnnnnnnnnnnnnnnnnnnnnnnnnnnnnnnnnnnnnnnnnnnnnnnnnnnnnnnnnnnnnnnnnnnnnnnnnnnnnnnnnnnnnnnnnnnnnnnnnnnnnnnnnnnnnnnnnnnnnnnnnnnnnnnnnnnnnnnnnnnnnnnnnnnnnnnnnnnnnnnnnnnnnnnnnnnnnnnnnnnnnnnnnnnnnnnnnnnnnnnnnnnnnnnnnnnnnnnnnnnnnnnnnnnnnnnnnnnnnnnnnnnnnnnnnnnnnnnnnnnnnnnnnnnnnnnnnnnnnnnnnnnnnnnnnnnnnnnnnnnnnnnnnnnnnnncaagttatactggaggaaaacactactctcctaggctttcaagacaaacattttcagcgtcaggccacaatagcagagttagaactggagaaaacaaagctacaggagctgactaggaagttgaaggagagagtcactattttagttaagcaaaaagatgtactttctcaaggagaaaaggaggaagagctgaaggccatgatgcatgacttgcagatcacctgcagtgagatgcagcaaaaagttgaacttctgagnagatatgaatctgaaaagcttcaacaggaaaattctattttgagaaatgaaattactactttaaatgaagaagatagcatttctaacctgaaattagggaaattaaatggatctcaggaagaaatgtggnnnnnnnnnnnnnnnnnnnnnnnnnnnnnnnnnnnnnnnnnnnnnnnnnnnnnnnnnnnnnnnnnnnnnnnnnnnnnnnnnnnnnnnnnnnnnnnnnnnnnnnnnnnnnnnnnnnnnnnnnnnnnnnnnnnnnnnnnnnnnnnnnnnnnnnnnnnnnnnnnnnnnnnnnnnnnnnnnnnnnnnnnnnnnnnnnnnnnnnnnnnnnnnnnnnnnnnnnnnnnnnnnnnnnnnnnnnnnnnnnnnnnnnnnnnnnnnnnnnnnnnnnnnnnnnnnnnnnnnnnnnagtcctccactttagtgtcttctctagaggcagaactctctgaaattaaaatacagacccatattgtggaacaggaaaacctccttctcaaagatgaactggagaaaatgaaacannnnnnnnnnnnnnnnnnnnnnnnnnnnnnnnnnnnnnnnnnnnnnnnnnnnnnnnnnnnnnnnnnnnnnnnnnnnnnnnnnnnnnnnnnnnnnnnnnnnnnnnnnnnnnnnnnnnnnnnnnnnnnnnnnnnnnnnnnnnnnnnnnnnnnnnnnnnnnnnnnnnnnnnnnnnnnnnnnnnnnnnnnnnnnnnnnnnnnnnnnnnnnnnnnnnnnnnnnnnnnnnnnnnnnnnnnnaggttcagaatttagaagacaccctgcagaatgtaaacctgcaaatgtcccagatgaaatctgacctgcgagtgactcagcaggaaaaggaggctttaaaacaagaactgatgtctttgcataagcaacttcagaatgctggtggcaannnnnnnnnnnnnnnnnnnnnnnnnnnnnnnnnnnnnnnnnnnnnnnnnnnnnnnnnnnnnnnnnnnnnnnnnnnnnnnnnnnnnnnnnnnnnnnnnnnnnnnnnnnnnnnnnnnnnnnnnnnnnnnnnnnnnnnnnnnnnnnnnnnnnnnnnnnnnnnnnnnnnnnnnnnnnnnnnnnnnnnnnnnnnnnnnnnnnnnnnnnnnnnnnnnnnnnnnnnnnnnnnnnnnnnnnnnnnnnnnnnnnnnnnnnnnnnnnnnnnnnnnnnnnnnnnnnnnnnnnnnnnnnnnnnnnnnnnnnnnnnnnnnnnnnnnnnnnnnnnnnnnnnnnnnnnnnnnnnnnnnnnnnnnnnnnnnnnnnnnnnnnnnnnnnnnnnnnnnnnnnnnnnnnnnnnnnnnnnnnnnnnnnnnnnnnnnnnnnnnnnnnnngatgcagcacctgaggttcactgcgacgcctagcccgtcccctcatgcttgggatttgcagctgctccagcagcaagcctgtccgatggtacccagggagcagtttctgcagcttcaacaccagctgctgcaggcagaaaggataaaccagcacctgcaggaggaacttgaaaacaggacctccgaaaccaacacaccacagg

SEQ ID NO: 27097 - DNA, 1312 bp, Macaca Mulatta
  misc_feature (1)...(1312): n = A,T,C or G
aggtgatatttgcgatcccaatccatgtgaaaatggaggtatctgtttgccaggattggctgatggttccttttcctgtgagtgtccagatggcttcacagaccccaactgttctagtgttgtggaggttgngcatcagatgaagaagaaccaacttcagcaggtncaggtccctgcattcctaatccatgccataatggaggaacctgtgaaataagtgaagcataccgaggtgacacattcataggctatgtttgtaaatgtccccaaggatttaatgggattcactgtcagcacanacataaatgaatgcgaagttgagccttgcaaaaatggtggaatatgtacagatcttgttgccaactattcctgcgagtgcccaggcgaatttatgggaagaaattgtcaatacanaatgctcaggcccattgggaattgaaggtggaattatatcaaaccagcaaatcacggcttcctctactcaccgagctctttttggactccaaaaatggtatccctactatgcgcgtcttaataagaaggggcttataaatgcgtggacagctgcagaaaatgacagatggccgtggattcagnttcagataaatttgcaaaggaaaatgagagttactgggtgtgattacccaaggagccaagaggattggaagcccagagtatataaaatcctacaaaattgcctacagtaatgatggaaagacttgggcaatgtacaaagtgaaaggcaccaatgaagacatggtnggtgtttcgtggaaacattgataacaatactccatatgctaactctttcacaccccccataaaagctcagtatgtaagactctatccccaagtttgtcgaagacattgcactttgcgaatggaacttcttggctgtgaactgtcgggtnggttgttctgagcctctgggtatgaaatcaggacatatacaagactatcagatcactgcctccagcgtcttcagaaccctcaacatggacatgttcacttgggaaccaaggaaagctcgactggacaagcaaggcaaagtgaatgcctggacctctggccacaatgaccagtcacagtggttacaggtnnnnnnnnnnnnnnnnnnnnnnnnnnnnnnnnnnnnnnnnnnnnnnnnnnnnnaggtggatcttcttgttccaaccaaagtgactggcatcattacacaaggagcaaaagattttggtcatgtacagttcgttggctcctacaaactggcttacagcaatgatggagaacactggactgtataccaggatgaaaagcaaagaaaagataaggt

SEQ ID NO: 27098 - DNA, 556 bp, Macaca Mulatta
  misc_feature (1)...(556): n = A,T,C or G
gggggctaccgtgactaagatggaagcgtttttggggtcgcggtccggactttgggcggggggtccggccccnggacagttttaccgtattccatccactcccgattccttcatggatccagcgtctgcactttacagaggtccaatcacacggacccagaaccccatggtgaccgggacctcagtcctcggcgttaagttcgagggcggagtggtgattgccgcatacttgctgggatcctacggttccttggctcgttttccctatatatcttgtattacgccagttatttatttttccatgctggttccctctggggacttttcccattccccactttttctgcctctcttcttccttacggtctatgctctcgtattttccttacttcccctctttttatttcctttttcatcactcattccctcctatctttcttctttctcgctttcatattttttatatttctcttgctcttcctttcgatttatattatccctcccctttccattcttctttttttctcctcccattttaacaccttttcccctttca

SEQ ID NO: 27099 - DNA, 339 bp, Macaca Mulatta
  misc_feature (1)...(339): n = A,T,C or G
agaccctctgcagtgtggagcctgggtcgggcagtgcgctctttacatcgtgatcatgatttttgaaaaatctgtcgtcttcatcgtcctcctcatacttcagtggaaaaaggtnnnnnnnnnnnnnnnnnnnnnnnnnnnnnnnnnnnnnnnnnnnnnnnnnnnnnnnnnnnnnnnnnnnnnnnnnnnngctttgatgttttgggtagtggacaatttcctcatgagaaaggggaagacgaaagctaagctagaagaaaggggagccaaccaggactcaaggaatgggagcaaggttcgctaccggagggccgcatcccacgaggagtctgagtctga

SEQ ID NO: 27100 - DNA, 193 bp, Macaca Mulatta
  misc_feature (1)...(193): n = A,T,C or G
gaagtgagatactcaggtggtgtttactaagatgctctacctatatcgaggtctacagaacccaantcctggantggatgacataagggcgaacgagtacttcatctcgggataaacgtcttgtacctggaggtggccagaaattgaattagccaaacagatcacatcatacggagagacatgtcctggactc

SEQ ID NO: 27101 - DNA, 1114 bp, Macaca Mulatta
  misc_feature (1)...(1114): n = A,T,C or G
tgcgtctggacacgcgtggctgcaccgcgcacaggcgcgccacgttacaccacggcatcgtgttcagccagcgccccgtgcgcctgggcgagcccgtgccgctgcgcattctgcgggaggagagcggctggtgcggcggcctccgcgtgggcctcacgcgcctggtccccgcgtgcgtgtccgtgcccagcatgcccccgctcgtgtgccccgaccaggaggagcagagcccgacgtgggcggccgtactgcccgagggctgcgcgctcgtgggggacgtggtccgcttctggccggaccgccgcggccgcctcttcgccaaggtcaacgccggctgnnnnnnnnnnnnnnnnnnnnnnnnnnnnnnnnnnnnnnnnnnnnnnnnnnnnnnnnnnnnnnnnnnnnnnnnnnnnnnnnnnnnnnnnnnnnnnnnnnnnnnnnnnnnnnnnnnnnnnnnnnnnnnnnnnnnnnnnnnnnnnnnnnnnnnnnnnnnnnnnnagccacaccaggagaagagtgtgccatctgcttctatcacgctgccaacacctgccttgtgccctgcggccacacatacttctgcagatgctgtgcctggcgggtcttcagggatacggccaagtgccctgtgtgccgctggcagatcgaggcggtagcccccgcgcagggccctcctgctctgaggactgaggaaggctcatgagaggaggcttcccagtatgagtggcagcccaggcctagatctgagtccggttcctgcagaggaaggaggcgcagccctaccttctttctagggaagagtcagaagggctgattagcaagaggtgtggcagagagaggaagtcagggaggtgctgtctgctccctccacctgtttcacaacaggggagcaaggaaaaacccctttctgtccatgccagagctatccttctgatgggttgctttgtttagagacagggtggcccaatcccgtgttttatagctgagggagttcaggtatctgtcgtgtctggtgaagccctgtacctcctgggtactgaagaacctggacttgaagcaggaggtatctacatggaatgcgtcaagttccacgtggaagctgggttgcctccca

SEQ ID NO: 27102 - DNA, 147 bp, Macaca Mulatta
ggaaaaggggaggatgcagggagaggtgaggcggggacggtgtacccaagggctgcccacctgggcatcatttggtgctgatataaggacaggcccacccagagagaaggagcatcccatctggggaggaaaggaagggctgggaac

SEQ ID NO: 27103 - DNA, 687 bp, Macaca Mulatta
ctccccgagtgacagcccggcggggaccttggtctgatcgacgtggtgacaccccggggcgcctagagcgcggctggctctgtggaggggccctccgagggtgcccgagtgcggcgtggagactggcaggcggggggggcgcctggagagtgaggaggcgcggcctctcgaggaggggcccggcggcggcagggccaggctggcccgagctgaggactctgcaagtgtctggagcggctgctcgcccaggaaggcctaggctaggacgttggcctcagggccaggaaggacagactggccgggcaggcgtgactcagcagcctgcgctcggcaggaaggagcggcgccctggacttggtacagttgcaggagcgtgaaggacttagccaactgcgctgctttttcaaaacggatccgggcaatgcttcgttttctaaaggatgctgctgttgaagctttgaattttacaataaactttttgaaacaaacttatgctctttattgagggtaggggatctttgtgtcgggggaggtggtgcgcggggtttcagaggattgctggaactccgtggaactgatggcacctgttccgtcttcctgtcgggcaagaatgacaggctcctccgcgctggcagagggagggcatgctgcccagtgctagggtagaacttgagcctggctcctact

SEQ ID NO: 27104 - DNA, 182 bp, Macaca Mulatta
  misc_feature (1)...(182): n = A,T,C or G
nttttcttgtttggtctgacgtctcttttttgctcatgtttttaggctcagctatgtgaaccatgcagaagacctggcctccaagctcctacaatgttccccaaagaacagactatcggcacaggctgccttgagccacgagtattttagtgacctgcccccacggctatgggaactcaccg

SEQ ID NO: 27105 - DNA, 3989 bp, Macaca Mulatta
  misc_feature (1)...(3989): n = A,T,C or G
tggggcgggcctgagcacctggattttcacccagcgtgctggtaattcctacacttgtgtgtgtttgagagacataaagaagagaggatgacctcttcccggaagcgggacttccataaaagaaccgtcgggggcgggtcccgggcacctgtggtttggtgagtcccccaggtgattgtgatgcgggggtcaggggtggaggcacccggaagctcccgcggtctgcaccccagcagcgcgaggaaaatgcccaaannnnnnnnnnnnnnnnnnnnnnnnnnnnnnnnnnnnnnnnnnnnnnnnnnnnnnnnnnnnnnnnnnnnnnnnnnnnnnnnnnnnnnnnnnnnnnnnnnnnnnnnnnnnnnnnnnnnnnnnnnnnnnnnnnnnnnnnnnnnnnnnnnnnnnnnnnnnnnnnnnnnnnnnnnnnnnnnnnnnnnnnnnnnnnnnnnnnnnnnnnnnnnnnnnnnnnnnnnnnnnnnnnnnnnnnnnnnnnnnnnnnnnnnnnnnnnnnnnnnnnnnnnnnnnnnnnnnnnnnnnnnnnnnnnnnnnnnnnnnnnnnnnnnnnnnnnnnnnnnnnnnnnnnnnnnnnnnnnnnnnnnnnnnnnnnnnnnnnnnnnnnnnnnnnnnnnnnnnnnnnnnnnnnnnnnnnnnnnnnnnnnnnnnnnnnnnnnnnnnnnnnnnnnnnnnnnnnnnnnnnnnnnnnnnnnnnnnnnnnnnnnnnnnnnnnnnnnnnnnnnnnnnnnnnnnnnnnnnnnnnnnnnnnnnnnnnnnnnnnnnnnnnnnnnnnnnnnnnnnnnnnnnnnnnnnnnnnnnnnnnnnnnnnnnnnnnnnnnnnnnnnnnnnnnnnnnnnnnnnnnnnnnnnnnnnnnnnnnnnnnnnnnnnnnnnnnnnnnnnnnnnnnnnnnnnnnnnnnnnnnnnnnnnnnnnnnnnnnnnnnnnnnnnnnnnnnnnnnnnnnnnnnnnnnnnnnnnnnnnnnnnnnnnnnnnnnnnnnnnnnnnnnnnnnnnnnnnnnnnnnnnnnnnnnnnnnnnnnnnnnnnnnnnnnnnnnnnnnnnnnnnnnnnnnnnnnnnnnnnnnnnnnnnnnnnnnnnnnnnnnnnnnnnnnnnnnnnnnnnnnnnnnnnnnnnnnnnnnnnnnnnnnnnnnnnnnnnnnnnnnnnnnnnnnnnnnnnnnnnnnnnnnnnnnnnnnnnnnnnnnnnnnnnnnnnnnnnnnnnnnnnnnnnnnnnnnnnnnnnnnnnnnnnnnnnnnnnnnnnnnnnnnnnnnnnnnnnnnnnnnnnnnnnnnnnnnnnnnnnnnnnnnnnnnnnnnnnnnnnnnnnnnnnnnnnnnnnnnnnnnnnnnnnnnnnnnnnnnnnnnnnnnnnnnnnnnnnnnnnnnnnnnnnnnnnnnnnnnnnnnnnnnnnnnnnnnnnnnnnnnnnnnnnnnnnnnnnnnnnnnnnnnnnnnnnnnnnnnnnnnnnnnnnnnnnnnnnnnnnnnnnnnnnnnnnnnnnnnnnnnnnnnnnnnnnnnnnnnnnnnnnnnnnnnnnnnnnnnnnnnnnnnnnnnnnnnnnnnnnnnnnnnnnnnnnnnnnnnnnnnnnnnnnnnnnnnnnnnnnnnnnnnnnnnnnnnnnnnnnnnnnnnnnnnnnnnnnnnnnnnnnnnnnnnnnnnnnnnnnnnnnnnnnnnnnnnnnnnnnnnnnnnnnnnnnnnnnnnnnnnnnnnnnnnnnnnnnnnnnnnnnnnnnnnnnnnnnnnnnnnnnnnnnnnnnnnnnnnnnnnnnnnnnnnnnnnnnnnnnnnnnnnnnnnnnnnnnnnnnnnnnnnnnnnnnnnnnnnnnnnnnnnnnnnnnnnnnnnnnnnnnnnnnnnnnnnnnnnnnnnnnnnnnnnnnnnnnnnnnnnnnnnnnnnnnnnnnnnnnnnnnnnnnnnnnnnnnnnnnnnnnnnnnnnnnnnnnnnnnnnnnnnnnnnnnnnnnnnnnnnnnnnnnnnnnnnnnnnnnnnnnnnnnnnnnnnnnnnnnnnnnnnnnnnnnnnnnnnnnnnnnnnnnnnnnnnnnnnnnnnnnnnnnnnnnnnnnnnnnnnnnnnnnnnnnnnnnnnnnnnnnnnnnnnnnnnnnnnnnnnnnnnnnnnnnnnnnnnnnnnnnnnnnnnnnnnnnnnnnnnnnnnnnnnnnnnnnnnnnnnnnnnnnnnnnnnnnnnnnnnnnnnnnnnnnnnnnnnnnnnnnnnnnnnnnnnnnnnnnnnnnnnnnnnnnnnnnnnnnnnnnnnnnnnnnnnnnnnnnnnnnnnnnnnnnnnnnnnnnnnnnnnnnnnnnnnnnnnnnnnnnnnnnnnnnnnnnnnnnnnnnnnnnnnnnnnnnnnnnnnnnnnnnnnnnnnnnnnnnnnnnnnnnnnnnnnnnnnnnnnnnnnnnnnnnnnnnnnnnnnnnnnnnnnnnnnnnnnnnnnnnnnnnnnnnnnnnnnnnnnnnnnnnnnnnnnnnnnnnnnnnnnnnnnnnnnnnnnnnnnnnnnnnnnnnnnnnnnnnnnnnnnnnnnnnnnnnnnnnnnnnnnnnnnnnnnnnnnnnnnnnnnnnnnnnnnnnnnnnnnnnnnnnnnnnnnnnnnnnnnnnnnnnnnnnnnnnnnnnnnnnnnnnnnnnnnnnnnnnnnnnnnnnnnnnnnnnnnnnnnnnnnnnnnnnnnnnnnnnnnnnnnnnnnnnnnnnnnnnnnnnnnnnnnnnnnnnnnnnnnnnnnnnnnnnnnnnnnnnnnnnnnnnnnnnnnnnnnnnnnnnnnnnnnnnnnnnnnnnnnnnnnnnnnnnnnnnnnnnnnnnnnnnnnnnnnnnnnnnnnnnnnnnnnnnnnnnnnnnnnnnnnnnnnnnnnnnnnnnnnnnnnnnnnnnnnnnnnnnnnnnnnnnnnnnnnnnnnnnnnnnnnnnnnnnnnnnnnnnnnnnnnnnnnnnnnnnnnnnnnnnnnnnnnnnnnnnnnnnnnnnnnnnnnnnnnnnnnnnnnnnnnnnnnnnnnnnnnnnnnnnnnnnnnnnnnnnnnnnnnnnnnnnnnnnnnnnnnnnnnnnnnnnnnnnnnnnnnnnnnnnnnnnnnnnnnnnnnnnnnnnnnnnnnnnnnnnnnnnnnnnnnnnnnnnnnnnnnnnnnnnnnnnnnnnnnnnnnnnnnnnnnnnnnnnnnnnnnnnnnnnnnnnnnnnnnnnnnnnnnnnnnnnnnnnnnnnnnnnnnnnnnnnnnnnnnnnnnnnnnnnnnnnnnnnnnnnnnnnnnnnnnnnnnnnnnnnnnnnnnnnnnnnnnnnnnnnnnnnnnnnnnnnnnnnnnnnnnnnnnnnnnnnnnnnnnnnnnnnnnnnnnnnnnnnnnnnnnnnnnnnnnnnnnnnnnnnnnnnnnnnnnnnnnnnnnnnnnnnnnnnnnnnnnnnnnnnnnnnnnnnnnnnnnnnnnnnnnnnnnnnnnnnnnnnnnnnnnnnnnnnnnnnnnnnnnnnnnnnnnnnnnnnnnnnnnnnnnnnnnnnnnnnnnnnnnnnnnnnnnnnnnnnnnnnnnnnnnnnnnnnnnnnnnnnnnnnnnnnnnnnnnnnnnnnnnnnnnnnnnnnnnnnnnnnnnnnnnnnnnnnnnnnnnnnnnnnnnnnnnnnnnnnnnnnnnnnnnnnnnnnnnnnnnnnnnnnnnnnnnnnnnnnnnnnnnnnnnnnnnnnnnnnnnnnnnnnnnnnnnnnnnnnnnnnnnnnnnnnnnnnnnnnnnnnnnnnnnnnnnnnnnnnnnnnnnnnnnnnnnnnnnnnnnnnnnnnnnnnnnnnnnnnnnnnnntatataacattcaggcattttctctgatatactatactttcatactctataaatttctgtcccataattccaacactttacatttttactttagtatcgactagctatattcatggaagggaaaaatcactaaatacttgtctagtcatagcatgatgtgagcatctcctcttcatccctcgatgcctggcttggtgtctggcaaacagtccataattagcacatgttgaaagactgttt

SEQ ID NO: 27106 - DNA, 396 bp, Macaca Mulatta
attttcagcccccaccctcattgattctgatcatctctggagcagaggcagggagtttgcaatgtgatgcactggcaacattgagaattagtgaattgagccctttgcaacggtctagctaggtagttaaattacccccatgttaatgaggttgaataaggctcccgagctaagggacttgcccaaggtctcacagtgagtaggaggagggcctgagatttgaacccaggggtctgaggccagggccgactgccgtaagatgggtgctgagaagtgagtcagggcagggcagtaggtatcgaggtgccccatgggagtagggggacgccttccgggcggatgcagggctggggtgatctgtagctggagccccttggaataaaagcgcgttgaccg

SEQ ID NO: 27107 - DNA, 255 bp, Macaca Mulatta
  misc_feature (1)...(255): n = A,T,C or G
agcatgttgattccattttcaatgaagaattgcttccagttactttgtaaccaccaggtcccagcagctggctttaaacaaacagtaaaaaatgggctcattttacagtcagtttccaatgatgtctatcanaatctggctgtggaagactggatccatgaccacatgaatctagaaggcaaaccaattctattcttttggcggaattctccctctgttgtaattggtaggcatcaaaatccttggcaggaatgt

SEQ ID NO: 27108 - DNA, 1134 bp, Macaca Mulatta
  misc_feature (1)...(1134): n = A,T,C or G
cttgcagttgggccccgagttttccagtacggagtcaaagttgtatttcaggctatgtacttgctgtggaagttgatgtggagggagccaggtgactatatctttctccannnnnnnnnnnnnnnnnnnnnnnnnnnnnnnnnnnnnnnnnnnnnnnnnnnnnnnnnnnnnnnnnnnnnnnnnnnnnnnnnnnnnnnnnnnnnnnnnnnnnnnnnnnnnnnnnnnnnnnnnnnnnnnnnnnnnnnnnnnnnnnnnnnnnnnnnnnnnnnnnnnnnnnnnnnnnnnnnnnnnnnnnnnnnnnnnnnnnnnnnnnnnnnnnnnnnnnnnnnnnnnnnnnnnnnnnnnnnnnnnnnnnnnnnnnnnnnnnnnnnnnnnnnnnnnnnnnnnnnnnnnnnnnnnnnnnnnnnnnnnnnnnnnnnnnnnnnnnnnnnnnnnnnnnnnnnnnnnnnnnnnnnnnnnnnnnnnnnnnnnnnnnnnnnnnnnnnnnnnnnnnnnnnnnnnnnnnnnnnnnnnnnnnnnnnnnnnnnnnnnnnnnnnnnnnnnnnnnnnnnnnnnnnnnnnnnnnnnnnnnnnnnnnnnnnnnnnnnnnnnnnnnnnnnnnnnnnnnnnnnnnnnnnnnnnnnnnnnnnnnnnnnnnnnnnnnnnnnnnnnnnnnnnnnnnnnnnnnnnnnnnnnnnnnnnnnnnnnnnnnnnnnnnnnnnnnnnnnnnnnnnnnnnnnnnnnnnnnnnnnnnnnnnnnnnnnnnnnnnnnnnnnnnnnnnnnnnnnnnnnnnnnnnnnnnnnnnnnnnnnnnnnnnnnnnnnnnnnnnnnnnnnnnnnnnnnnnnnnnnnnnnnnnnnnnnnnnnnnnnnnnnnnnnnnnnnnnnnnnnnnnnnnnnnnnnnnnnnnnnnnnnnnnnnnnnnnnnnnnnnnnnnnnnnnnnnnnnnnnnnnnnnnnnnnnnnnnnnnnnnnnnnnnnnnnnnnnnnnnnnnnnnnnnngcagatgcttttctcaaacttccctgatcctgcgggcaagctaaaccagttccggaagaacctgcgggagtcggagcagctccgatgggatgagagctgggtgcagactgtgctccctttggttatggacacatgactcctgggccagaggctaa

SEQ ID NO: 27109 - DNA, 544 bp, Macaca Mulatta
acttcccgccgggcagctgtgcgcaccaaagactcgggagaacctggaaaggctgtctggggtcttctgactggaggggaaggatgtactttccaaacaaatgatacaaccctgaccaagctaaaatacgcttgttaaaggctattttctatatttattgttgggaaaagtcactttaaagacttgtgctatttggaagcaaaactattttttttgtcagtggaatgcggtttttttactattccatcatgaggaacaacatagattccatgatctttttaatgataggacagactgagatttgaaggaaacgtacaccaatctgtgaaacatagaccttcgctttatttttgtaagtatcacctgccaccatgttttgtaatttgaggtcttgatttcaccattgtcggtgaagaaaattttcaataaatatgtattacccgtcggaagcttaaagatactgtgtaacggactctttccacttgtcccatttctctttgatgacagtctggaatgggttctgaatcaacctgctaattttgtt

SEQ ID NO: 27110 - DNA, 732 bp, Macaca Mulatta
gcatggctgccatgctcagcctggaaacccagcccctgggtcagtaccactgacaaggtccacgagctgatgaagagactgaagtactttgcctacacagtgggcctgagcctgcggacagccatcagcacccagcgctgtctctccgtcctcttccctatctggttcaagtgtcaccggcccaggcacctgtcagcctgggtgtgcgccctgctctggatgctgtgtctcctgacaaatgggttgacctcttgcttctgcagcaagttcctgaaattcaataaagaccagtgcttccgggtggacatggtccaggctgccctcatcatgggggtcttaaccccagtgatgactctgtccagcctgaccctctttgtccgggtgcggagaagctcccagcagtggcggcggcagcctactcggctgttcgtggtggtcctggcctctgtcctggtgttcctcatctgttccctgcccctgggcttctactggttcgtgctgtactggttgaacctgccgcctgacacgaaggtcctgtacttcaacttgtcacgcctctcctcgtccatgagcagcagcgctaaccccctcatctacttcctggtgggcagccggagaagtcgcaggctgcaggggtcgctggggactgtgctccaacgggcgcttcgtgaggagcccgagctggaaggtggggagacgcccaccacgggcaccaatgagatgggggcttga

SEQ ID NO: 27111 - DNA, 3513 bp, Macaca Mulatta
  misc_feature (1)...(3513): n = A,T,C or G
gacgacccaccttgagatgcatctggagacttctcccagcatgtaggagcggttgtaaaatcacagccgtaacagtgcctgctctccagtgtctgaaaacaaatgtttttctggtcttcacttttttgaggnnnnggatctttcgaagatggtttggctgccttggagatttggagatctgatgccacgatgaggactcacacacggggggctcccagtgtgtttttcatatatttgcttcgctttgtgtcagcctacatcaccgacgagaacccagaagtcatgattcccttcaccaatgccaactatgacagccatcccatgctgtacttctccagggcagaagtggcggagctgcagcgcagggctgccagctcgcacgagcacattgcagcccgcctcacggaggctgtgcacacaatgctgtccagccccttggaatacctccctccctgggatcccaaggactacagtgcccgctggaatgaaatttatggaaacaacttaggtgccttggcaatgttttgtgtgctgtatcctgagaacattgaagcccgagacatggccaaagactacatggagaggatggcagcgcagcctagttggnnnnnnnnnnnnnnnnnnnnnnnnnnnnnnnnnnnnnnnnnnnnnnnnnnnnnnnnnnnnnnnnnnnnnnnnnnnnnnnnnnnnnnnnnnnnnnnnnnnnnnnnnnnnnnnnnnnnnnnnnnnnnnnnnnnnnnnnnnnnnnnnnnnnnnnnnnnnnnnnnnnnnnnnnnnnnnnnnnnnnnnnnnnnnnnnnnnnnnnnnnnnnnnnnnnnnnnnnnnnnnnnnnnnnnnnnnnnnnnnnnnnnnnnnnaggatatcttcaagaagcctacttatggaccaaacaagttctgaccatcatggagaaatctctgatcttgctcagggaggtgacggatggctccctctatgaaggagttgcatatggcagctacaccactagatcactcttccaatacatgtttctcgtccagaggcacttcaacatcaaccactttggccatccgtggcttaaacaacacttcgcatttatgtatagaaccatcctgccagnnnnnnnnnnnnnnnnnnnnnnnnnnnnnnnnnnnnnnnnnnnnnnnnnnnnnnnnnnnnnnnnnnnnnnnnnnnnnnnnnnnnnnnnnnnnnnnnnnnnnnnnnnnnnnnnnnnnnnnnnnnnnnnnnnnnnnnnnnnnnnnnnnnnnnnnnnnnnnnnnnnnnnnnnnnnnnnnnnnnnnnnnnnnnnnnnnnnnnnnnnnnnnnnnnnnnnnnnnnnnnnnnnnnnnnnnnnnnnnnnnnnnnnnnnnnnnnnnnnnnnnnnnnnnnnnnnnnnnnnnnnnnnnnnnnnnnnnnnnnnnnnnnnnnnnnnnnnnnnnnnnnnnnnnnnnnnnnnnnnnnnnnnnnnnnnnnnnnnnnnnnnnnnnnnnnnnnnnnnnnnnnnnnnnnnnnnnnnnnnnnnnnnnnnnnnnnnnnnnnnnnnnnnnnnnnnnnnnnnnnnnnnnnnnnnnnnnnnnnnnnnnnnnnnnnnnnnnnnnnnnnnnnnnnnnnnnnnnnnnnnnnnnnnnnnnnnnnnnnnnnnnnnnnnnnnnnnnnnnnnnnnnnnnnnnnnnnnnnnnnnnnnnnnnnnnnnnnnnnnnnnnnnnnnnnnnnnnnnnnnnnnnnnnnnnnnnnnnnnnnnnnnnnnnnnnnnnnnnnnnnnnnnnnnnnnnnnnnnnnnnnnnnnnnnnnnnnnnnnnnnnnnnnnnnnnnnnnnnnnnnnnnnnnnnnnnnnnnnnnnnnnnnnnnnnnnnnnnnnnnnnnnnnnnnnnnnnnnnnnnnnnnnnnnnnnnnnnnnnnnnnnnnnnnnnnnnnnnnnnnnnnnnnnnnnnnnnnnnnnnnnnnnnnnnnnnnnnnnnnnnnnnnnntccacaatgtggatgttcctttgaggagactgtggtagatggtgtccatggggctttcatcaggcagagagatggtctctataaaatgtactggatggacgatactggctacagcgagaaagcaacctttgcctcagtgacatatcctcggggctatccctacaatgggacaaactatgtgaatgtcaccatgcacctccgaagtcccatcaccagggcagcttacctcttcatagggccatctatagatgttcagagcttcactatccacggagactctcagcaactggatgtgttcgtagccaccagcaaacatgcctacgcaacgtacctgtggacaggtgaggccacaggacagtctgcctttgcacaggtcattgctgatcgtcacaaaattctgtttgaccggaattcagccatcaagagcagcattgtccctgaggtgaaggactatgctgctattgtggaacagaacctgcagcattttaagccagtgtttcagctgctggagaagcagatactgtcccgagtccggaacacagctagctttaggaagactgctgagcgcctgctgagattttcagataagagacagactgaggaggccattgacaggatttttgccatatcacagcaacagcagcagcaaagcaagtcaaagaaaaaccgaagggcaggcaagcgctataaatttgtggatgctgtccctgatatttttgcacagattgaaggcaatgagaaaaagattagacagnnnnnnnnnnnnnnnnnnnnnnnnnnnnnnnnnnnnnnnnnnnnnnnnnnnnnnnnnnnnnnnnnnnnnnnnnngatgtaacatatgagaaacataaaaacgggggtttgatgaaaggccgggttggacaggcatggatggtgacaaccactcatagcagggcgtcatcactatctgtttcctacaccaggttgttcctcatcctgaacactgctattgtctttgtcatgttggcaatacaactgacttatttccagagggcccagaacctacatggccaaagatgtctttctgcagttcttctaatagatagctgtattttattgtggttgtacttttcttgttcccaacctcagtgttagccctgaagctataaattgcccagtcattttgtgatcacaaaagtccatgnnnnnnnnnnnnnnnnttaccccagtttatcagattttttccctcacattcattttaacaaattaagggaagatattttgacacaagaaagcaagaacatggagaaattggagcaggaaaggaatttatcaaagcgatagaaatagcttgctagtcctatggtggttctggaagtatttggcattgcaattgaacagtccatatagtacttcctcttttagaagaaacaaaaagtctgttttttaaagtaatgttttttcttatgagaaaaagatttagatagaattaggttttattaatattaatttaatgctattagcaatttccatgtactatattatggaaaagactgaagaatacaattctgagaaatattttaaaaattttaatggtatagtcatg

SEQ ID NO: 27112 - DNA, 1190 bp, Macaca Mulatta
  misc_feature (1)...(1190): n = A,T,C or G
tgtgccgtgcaggtgaagctggagctggggcaccgcgcccaggtgaggaaaaaacccaccgtggagggcttcacccacgactggatggtgttcgtacgcggcccggagcacagtaacatacagcactttgtggagaaagtcgtcttccacttgcacgaaagctttcctaggccaaaaagagnnnnnnnnnnnnnnnnnnnnnnnnnnnnnnnnnnnnnnnnnnnnnnnnnnnnnnnnnnnnnnnnnnnnnnnnnnnnnnnnnnnnnnnnnnnnnnnnnnnnnnnnnnnnnnnnnnnnnnnnnnnnnnnnnnnnnnnnnnnnnnnnnnnnnnnnnnnnnnnnnnnnnnnnnnnnnnnnnnnnnnnnnnnnnnnnnnnnnnnnnnnnnnnnnnnnnnnnnnnnnnnnnnnnnnnnnnnnnnnnnnnnnnnnnnnnnnnnnnnnnnnnnnnnnnnnnnnnnnnnnnnnnnnnnnnnnnnnnnnnnnnnnnnnnnnnnnnnnnnnnnnnnnnnnnnnnnnnnnnnnnnnnnnnnnnnnnnnnnnnnnnnnnnnnnnnnnnnnnnnnnnnnnnnnnnnnntcacaaattaatgaaggatcacaaggaaaaaccttctaaagactccagagaacataaaagtgccttcaaagaaccttacagggatcacaacaaatcttccaaagaatcctctaagaaacccaaagaaaataaaccactgaaagaagagaaaatagttcctaagatggccttcaaggaacctaaacccatgtcaaaagagccaaaaccagacagtaatttactcaccatcaccagtggacaagataagaaggctcctagtaaaaggccacccatttcagattctgaagaactctcagccaaaaaaaggaaaaagagtagctcagaggctttatttaaaagtttttctagcgcaccaccactgatactcacttgttctgctgataaaaaacagataaaagataaatctcatgtcaagatgggaaaggtcaaaattgaaagtgagacatcagagaagaagaaatcaacattaccgccatttgatgatattgtggatcccaatgattcagatgtggaggagaatatatcctctaaatctgatnnnnnnnnnnncagtcctgccagctccagctccagctccagctccagcttcacaccatttcggaacaggcaacaagg

SEQ ID NO: 27113 - DNA, 4986 bp, Macaca Mulatta
  misc_feature (1)...(4986): n = A,T,C or G
acgggggccactttgccagaggctgcctcccggagttgggggcggcctggcggctggctgaagctgttctttttcctcttctgcagcttggggcttggagaggatctggaagtccgggctccatcgagcccttcggagacggcaatgatttcttccaaccaccgccacctgacgaccctgcatggcggctgcgccctccgctctgcttctgctgccgccctttccagtcctctctgcctatcggctccagagccgcagtcgtccttccgccccagagactgatgatagtggagttgggggcattatgagaggagagaaaaactactactgccgtggagctgcgggggaccacggttcctgccccactacaacttcgcctctggcctcggccctcttgatgccctcggaggcagtctcaagcagctggtctgattctggaggcggtttgtcagggggagatgaagaggagactcggctccttcaactcctccgcaccgcgccggatccttctgaggcctttcaggctttgcaagctgctttgccgcggcggggcggtcgacttggcttcccccgacgcaaggaagctttgtatcgggcactgggccgagtgcttgtggaaggaggtagtgatgagaagcggctctgcttgcaacttctctcagacgttctccggggtcagggggaggcaggccagctggaagaggcctttagcttagcacttttgcctcaactagttgtctcgttacgggaagagaatccagccctnnnnnnnnnnnnnnnnnnnnnnnnnnnnnnnnnnnnnnnnnnnnnnnnnnnnnnnnnnnnnnnnnnnnnnnnnnnnnnnnnnnnnnnnnnnnnnnnnnnnnnnnnnnnnnnnnnnnnnnnnnnnnnnnnnnnnnnnnnnnnnnnnnnnnnnnnnnnnnnnnnnnnnnnnnnnnnnnnnnnnnnnnnnnnnnnnnnnnnnnnnnnnnnnnnnnnnnnnnnnnnnnnnnnnnnnnnnnnnnnnnnnnnnnnnnnnnnnnnnnnnnnnnnnnnnnnnnnnnnnnnnnnnnnnnnnnnnnnnnnnnnnnnnnnnnnnnnnnnnnnnnnnnnnnnnnnnnnnnnnnnnnnnnnnnnnnnnnnnnnnnnnnnnnnnnnnnnnnnnnnnnnnnnnnnnnnnnnnnnnnnnnnnnnnnnnnnnnnnnnnnnnnnnnnnnnnnnnnnnnnnnnnnnnnnnnnnnnnnnnnnnnnnnnnnnnnnnnnnnnnnnnnnnnnnnnnnnnnnnnnnnnnnnnnnnnnnnnnnnnnnnnnnnnnnnnnnnnnnnnnnnnnnnnnnnnnnnnnnnnnnnnnnnnnnnnnnnnnnnnnnnnnnnnnnnnnnnnnnnnnnnnnnnnnnnnnnnnnnnnnnnnnnnnnnnnnnnnnnnnnnnnnnnnnnnnnnnnnnnnnnnnnnnnnnnnnnnnnnnnnnnnnnnnnnnnnnnnnnnnnnnnnnnnnnnnnnnnnnnnnnnnnnnnnnnnnnnnnnnnnnnnnnnnnnnnnnnnnnnnnnnnnnnnnnnnnnnnnnnnnnnnnnnnnnnnnnnnnnnnnnnnnnnnnnnnnnnnnnnnnnnnnnnnnnnnnnnnnnnnnnnnnnnnnnnnnnnnnnnnnnnnnnnnnnnnnnnnnnnnnnnnnnnnnnnnnnnnnnnnnnnnnnnnnnnnnnnnnnnnnnnnnnnnnnnnnnnnnnnnnnnnnnnnnnnnnnnnnnnnnnnnnnnnnnnnnnnnnnnnnnnnnnnnnnnnnnnnnnnnnnnnnnnnnnnnnnnnnnnnngtattggcatcatcaatgggctcaggtaaaaccagcatcctttttaaagctgtggatactgttgaactgcaagataatggagatggagtgatgaatgctgtgcaggccagattggctaggaaaaccttaccaaggctaacagagcagggatttgtggaatatgcagtactgatgccatcttctgccgggggtagatcaaaccatttggcacatggagcagatacggactggcttttggctggtaacagaactcagagtgcacactgtcactgtggtgaccacgtaagggatagcatgcaaatttatggatcttacagtccaactatttgtacccgaagggtattaagtgcaggaaaaggaaaaaataaattaccgtgggaaaatgagcagcctggaatcatgggagaaaaccagacctccacttccaaggatgtagagcannnnnnnnnnnnnnnnnnnnnnnnnnnnnnnnnnnnnnnnnnnnnnnnnnnnnnnnnnnnnnnnnnnnnnnnnnnnnnnnnnnnnnnnnnnnnnnnnnnnnnnnnnnnnnnnnnnnnnnnnnnnnnnnnnnnnnnnnnnnnnnnnnnnnnnnnnnnnnnnnnnnnnnnnnnnnnnnnnnnnnnnnnnnnnnnnnnnnnnnnnnnnnnnnnnnnnnnnnnnnnnnnnnnnnnnnnnnnnnnnnnnnnnnnnnnnnnnnnnnnnnnnnnnnnnnnnnnnnnnnnnnnnnnnnnnnnnnnnnnnnnnnnnnnnnnnnnnnnnnnnnnnnnnnnnnnnnnnnnnnnnnnnnnnnnnnnnnnnnnnnnnnnnnnnnnnnnnnnnnnnnnnnnnnnnnnnnnnnnnnnnnnnnnnnnnnnnnnnnnnnnnnnnnnnnnnnnnnnnnnnnnnnnnnnnnnnnnnnnnnnnnnnnnnnnnnnnnnnnnnnnnnnnnnnnnnnnnnnnnnnnnnnnnnnnnnnnnnnnnnnnnnnnnnnnnnnnnnnnnnnnnnnnnnnnnnnnnnnnnnnnnnnnnnnnnnnnnnnnnnnnnnnnnnnnnnnnnnnnnnnnnnnnnnnnnnnnnnnnnnnnnnnnnnnnnnnnnnnnnnnnnnnnnnnnnnnnnnnnnnnnnnnnnnnnnnnnnnnnnnnnnnnnnnnnnnnnnnnnnnnnnnnnnnnnnnnnnnnnnnnnnnnnnnnnnnnnnnnnnnnnnnnnnnnnnnnnnnnnnnnnnnnnnnnnnnnnnnnnnnnnnnnnnnnnnnnnnnnnnnnnnnnnnnnnnnnnnnnnnnnnnnnnnnnnnnnnnnnnnnnnnnnnnnnnnnnnnnnnnnnnnnnnnnnnnnnnnnnnnnnnnnnnnnnnnnnnnnnnnnnnnnnnnnnnnnnnnnnnnnnnnnnnnnnnnnnnnnnnnnnnnnnnnnnnnnnnnnnnnnnnnnnnnnnnnnnnnnnnnnnnnnnnnnnnnnnnnnnnnnnnnnnnnnnnnnnnnnnnnnnnnnnnnnnnnnnnnnnnnnnnnnnnnnnnnnnnnnnnnnnnnnnnnnnnnnnnnnnnnnnnnnnnnnnnnnnnnnnnnnnnnnnnnnnnnnnnnnnnnnnnnnnnnnnnnnnnnnnnnnnnnnnnnnnnnnnnnnnnnnnnnnnnnnnnnnnnnnnnnnnnnnnnnnnnnnnnnnnnnnnnnnnnnnnnnnnnnnnnnnnnnnnnnnnnnnnnnnnnnnnnnnnnnnnnnnnnnnnnnnnnnnnnnnnnnnnnnnnnnnnnnnnnnnnnnnnnnnnnnnnnnnnnnnnnnnnnnnnnnnnnnnnnnnnnnnnnnnnnnnnnnnnnnnnnnnnnnnnnnnnnnnnnnnnnnnnnnnnnnnnnnnnnnnnnnnnnnnnnnnnnnnnnnnnnnnnnnnnnnnnnnnnnnnnnnnnnnnnnnnnnnnnnnnnnnnnnnnngctaaagtttctatttcaaaatctacttgtaacaagatgagacaaaagagaaaagaagagaaagaactgtttcacaataaagattgtgaaaagaaggaaaaaaattcctgggaacgaatgaaacatacaggaactgagaaaatggcatctgantgaaacatctactggagtcatttcacagtataaagaaaggatgccttctgtcactcatagtccagaaataatggatctatcagaactacgaccattctctaaaccagaaatagcactgacagaagccctgaggcttttggctgatgaggattggnnnnnnnnnnnnnnnnnnnnnnnnnnnnnnnnnnnnnnnnnnnnnnnnnnnnnnnnnnnnnnnnnnnnnnnnnnnnnnnnnnnnnnnnnnnnnnnnnnnnnnnggtgaaaaatttacgttctggagtttctcgtgctgctgtggtctgtttaagtgatcttttcacttatttgaaaaagagcatggatcaagagctagataccacagtaaaagttttgttgcagaaggctggtgaatcaaatacatttataagagaagatgttgacaaagcattgagagctatggttaataatgtaactcctgcacgtgcagttgtttctcttatcaatggtggacaaaggtannnnnnnnnnnnnnnnnnnnnnnnnnnnnnnnnnnnnnnnnnnnnnnnnnnnnnnnnnnnnnnnnnnnnnnnnnnnnnnnnnnnnnnnnnnnnnnnnnnnnnnnnnnnnnnnnnnnnnnnnnnnnnnnnnnnnnnnnnnnnnnnnnnnnnnnnnnnnnnnnnnnnnnnnnnnnnnnnnnnnnnnnnnnnnnnnnnnnnnnnnnnnnnnnnnnnnnnnnnnnnnnnnnnnnnnnnnnnnnnnnnnnnnnnnnnnnnnnnnnnnnnnnnnnnnnnnnnnnnnnnnnnnnnnnnnnnnnnnnnnnnnnnnnnnnnnnnnnnnnnnnnnnnnnnnnnnnnnnnnnnnnnnnnnnnnnnnnnnnnnnnnnnnnnnnnnnnnnnnnnnnnnnnnnnnnnnnnnnnnnnnnnnnnnnnnnnnnnnnnnnnnnnnnnnnagatttttgatgcttttaaatctcgacttcatgactctaatagtaaagtaaatctggtggctctggaaacaatgcacaaaatgattcctctacttagagaccacttatctcctataatcaacatgctaattccagcaatagtggataacaatctgaattccaagaatccaggcatctacgctgctgctacgaatgttgttcaggcactgagtcagcatgta

SEQ ID NO: 27114 - DNA, 3729 bp, Macaca Mulatta
  misc_feature (1)...(3729): n = A,T,C or G
cagagcctggctgagggagatgagaataagctggtgcccctgcctgcctgtctccgtgctgctatgacggacaaatttgcccagtttgacgagtaccagctggctaagtataaccctcggaagcaccgggccaagagacacccccgcaggccaccccgctctccannnnnnnnnnnnnnnnnnnnnnnnnnnnnnnnnnnnnnnnnnnnnnnnnnnnnnnnnnnnnnnnnnnnnnnnnnnnnnnnnnnnnnnnnnnnnnnnnnnnnnnnnnnnnnnnnnnnnnnnnnnnnnnnnnnnnnnnnnnnnnnnnnnnnnnnnnnnnnnnnnnnnnnnnnnnnnnnnnnnnnnnnnnnnnnnnnnnnnnnnnnnnnnnnnnnnnnnnnnnnnnnnnnnnnnnnnnnnnnnnnnnnnnnnnnnnnnnnnnnnnnnnnnnnnnnnnnnnnnnnnnnnnnnnnnnnnnnnnnnnnnnnnnnnnnnnnnnnnnnnnnnnnnnnnnnnnnnnnnnnnnnnnnnnnnnnnnnnnnnnnnnnnnnnnnnnnnnnnnnnnnnnnnnnnnnnnnnnnnnnnnnnnnnnnnnnnnnnnnnnnnnnnnnnnnnnnnnnnnnnnnnnnnnnnnnnnnnnnnnnnnaagtcggtgatccacagtcggcagtttccattcagatttcttaatgcccatgatccattgatgccccnnnnnnnnnnnnnnnnnnnnnnnnnnnnnnnnnnnnnnnnnnnnnnnnnnnnnnnnnnnnnnnnnnnnnnnnnnnnnnnnnnnnnnnnnnnnnnnnnnnnnnnnnnnnnnnnnnnnnnnnnnnnnnnnnnnnnnnnnnnnnnnnnnnnnnnnnnnnnnnnnnnnnnnnnnnnnnnnnnnnnnnnnnnnnnnnnnnnnnnnnnnnnnnnnnnnnnnnnnnnnnnnnnnnnnnnnnnnnnnnnnnnnnnnnnnnnnnnnnnnnnnnnnnnnnnnnnnnnnnnnnnnnnnnnnnnnnnnnnnnnnnnnnnnnnnnnnnnnnnnnnnnnnnnnnnnnnnnnnnnnnnnnnnnnnnnnnnnnnnnnnnnnnnnnnnnnnnnnnnnnnnnnnnnnnnnnnnnnnnnnnnnnnnnnnnnnnnnnnnnnnnnnnnnnnnnnnnnnnnnnnnnnnnnnnnnnnnnnnnnnnnnnnnnnnnnnnnnnnnnnnnnnnnnnnnnnnnnnnnnnnnnnnnnnnnnnnnnnnnnnnnnnnnnnnnnnnnnnnnnnnnnnnnnnnnnnnnnnnnnnnnnnnnnnnnnnnnnnnnnnnnnnnnnnnnnnnnnnnnnnnnnnnnnnnnnnnnnnnnnnnnnnnnnnnnnnnnnnnnnnnnnnnnnnnnnnnnnnnnnnnnnnnnnnnnnnnnnnnnnnnnnnnnnnnnnnnnnnnnnnnnnnnnnnnnnnnnnnnnnnnnnnnnnnnnnnnnnnnnnnnnnnnnnnnnnnnnnnnnnnnnnnnnnnnnnnnnnnnnnnnnnnnnnnnnnnnnnnnnnnnnnnnnnnnnnnnnnnnnnnnnnnnnnnnnnnnnnnnnnnnnnnnnnnnnnnnnnnnnnnnnnnnnnnnnnnnnnnnnnnnnnnnnnnnnnnnnnnnnnnnnnnnnnnnnnnnnnnnnnnnnnnnnnnnnnnnnnnnnnnnnnnnnnnnnnnnnnnnnnnnnnnnnnnnnnnnnnnnnnnnnnnnnnnnnnnnnnnnnnnnnnnnnnnnnnnnnnnnnnnnnnnnnnnnnnnnnnnnnnnnnnnnnnnnnnnnnnnnnnnnnnnnnnnnnnnnnnnnnnnnnnnnnnnnnnnnnnnnnnnnnnnnnnnnnnnnnnnnnnnnnnnnnnnnncagacaattggaagtgtgccttggggaggtggagaacgcacagctgtttgtggggattctgggctcccgttatggatacattccccccagctacaaccttcctgaccatccacacttccactgggnnnnnnnnnnnnnnnnnnnnnnnnnnnnnnnnnnnnnnnnnnnnnnnnnnnnnnnnnnnnnnnnnnnnnnnnnnnnnnnnnnnnnnnnnnnnnnnnnnnnnnnnnnnnnnnnnnnnnnnnnnnnnnnnnnnnnnnnnnnnnnnnnnnnnnnnnnnnnnnnnnnnnnnnnnnnnnnnnnnnnnnnnnnnnnnnnnnnnnnnnnnnnnnnnnnnnnnnnnnnnnnnnnnnnnnnnnnnnnnnnnnnnnnnnnnnnnnnnnnnnnnnnnnnnnnnnnnnnnnnnnnnnnnnnnnnnnnnnnnnnnnnnnnnnnnnnnnnnnnnnnnnnnnnnnnnnnnnnnnnnnnnnnnnnnnnnnnnnnnnnnnnnnnnnnnnnnnnnnnnnnnnnnnnnnnnnnnnnnnnnnnnnnnnnnnnnnnnnnnnnnnnnnnnnnnnnnnnnnnnnnnnnnnnnnnnnnnnnnnnnnnnnnnnnnnnnnnnnnnnnnnnnnnnnnnnnnnnnnnnnnnnnnnnnnnnnnnnnnnnnnnnnnnnnnnnnnnnnnnnnnnnnnnnnnnnnnnnnnnnnnnnnnnnnnnnnnnnnnnnnnnnnnnnnnnnnnnnnnnnnnnnnnnnnnnnnnnnnnnnnnnnnnnnnnnnnnnnnnnnnnnnnnnnnnnnnnnnnnnnnnnnnnnnnnnnnnnnnnnnnnnnnnnnnnnnnnnnnnnnnnnnnnnnnnnnnnnnnnnnnnnnnnnnnnnnnnnnnnnnnnnnnnnnnnnnnnnnnnnnnnnnnnnnnnnnnnnnnnnnnnnnnnnnnnnnnnnnnnnnnnnnnnnnnnnnnnnnnnnnnnnnnnnnnnnnnnnnnnnnnnnnnnnnnnnnnnnnnnnnnnnnnnnnnnnnnnnnnnnnnnnnnnnnnnnnnnnnnnnnnnnnnnnnnnnnnnnnnnnnnnnnnnnnnnnnnnnnnnnnnnnnnnnnnnnnnnnnnnnnnnnnnnnnnnnnnnnnnnnnnnnnnnnnnnnnnnnnnnnnnnnnnnnnnnnnnnnnnnnnnnnnnnnnnnnnnnnnnnnnnnnnnnnnnnnnnnnnnnnnnnnnnnnnnnnnnnnnnnnnnnnnnnnnnnnnnnnnnnnnnnnnnnnnnnnnnnnnnnnnnnnnnnnnnnnnnnnnnnnnnnnnnnnnnnnnnnnnnnnnnnnnnnnnnnnnnnnnnnnnnnnnnnnnnnnnnnnnnnnnnnnnnnnnnnnnnnnnnnnnnnnnnnnnnnnnnnnnnnnnnnnnnnnnnnnnnnnnnnnnnnnnnnnnnnnnnnnnnnnnnnnnnnnnnnnnnnnnnnnnnnnnnnnnnnnnnnnnnnnnnnnnnnnnnnnnnnnnnnnnnnnnnnnnnnnnnnnnnnnnnnnnnnnnnnnnnnnnnnnnnnnnnnnnnnnnnnnnnnnnnnnnnnnnnnnnnnnnnnnnnnnnnnnnnnnnnnnnnnnnnnnnnnnnnnnnnnnnnnnnnnnnnnnnnnnnnnnnnnnnnnnnnnnnnnnnnnnnnnnnnnnnnnnnnnnnnnnnnnnnnnnnnnnnnnnnnnnnnnnnnnnnnnnnnnnnnnnnnnnnnnnnnnnnnnnnnnnnnnnnnnnnnnnnnnnnnnnnnnnnnnnnnnnnnnnnnnnnnnnnnnnnnnnnnnnnnnnnnnnnnnnnnnnnnnnnnnnnnnnnnnngctccagagcgggaaccgtggacttctttcgaagtttcttaccaacatccatgtggtggctgcacacttggaactgggtctggtctctcggctcttggagacccatgccctctat

SEQ ID NO: 27115 - DNA, 95 bp, Macaca Mulatta
gggctcgtgcgatccgcttcagacaggatggtaatgaagccgtcggaggattcttctctcagattgggcagctgtacatggtgcaccatctttgg

SEQ ID NO: 27116 - DNA, 356 bp, Macaca Mulatta
agtgtttcacatcagaataaaacgattaagatgaactagaacacaacattttcagctttttggtcataaggaatataagtagtcatatttggtatgtatttaagcatgacttaaatgaaatgtaaacaactaatgctctttgaagaatcataatcagaataaagataaattcttggtcagctataacttctgttttccatctggttcttgtctgtcaatgcctttcctcccgctccccatcttctgaggcctgcaggatgttcctgccgcatcgaactcctttaggcggagtaccaccattggatgtacagtttaatgtttcatctgctttttctttaaattatttgcttcacatg

SEQ ID NO: 27117 - DNA, 486 bp, Macaca Mulatta
  misc_feature (1)...(486): n = A,T,C or G
tctggccagctgcagagtgtgaccgcctcctcggacaaggctttcgaagactggctgaatgatgacctcggctcctatcaagggnnnnnnnnnnnnnnnnnnnnnnnnnnnnnnnnnnnnnnnnnnnnnnnnnnnnnnnnnnnnnnnnnnnnnnnnnnnnnnnnnnnnnnnnnnnnnnnnnnnnnnnnnnnnnnnnnnnnnnnnnnnnnnnnnnnnnnnnnnnnnnnnnnnnnnnnnnnnnnnnnnnnnnnnnnnnnnnnnnnnnnnnnnnnnnnnnnnnnnnnnnnnnnnnnnnnnnnggcgtccgagctgggccacagcctgaacgagaacgtcctcaagcctgcgcaggagaaggnnnnnnnnnnnnnnnnnnnnnnnnnnnnnnnnnnnnnnnnnnnnnnnnnnnnnnnnagggagtcggtagtaagggatggcgggacgtcaccacctttttttcggggaaagcagagggccccttggaca

SEQ ID NO: 27118 - DNA, 162 bp, Macaca Mulatta
aggagctactcctccgtcctgaaatcctgggttgctgcctgtccaggcgccatgagaacttcctaccttctgctgtacactctcgtagcttactctatgtctgagatggcctcaggcgataactgtctcacaggtcttggccgcatgatcgtgaccattaca

SEQ ID NO: 27119 - DNA, 4461 bp, Macaca Mulatta
  misc_feature (1)...(4461): n = A,T,C or G
ggtgccagggtgactctggggaatgggtcccctgccatgaggcccccggaggaacttgtcggtgcccgatccaaggcctcgttgaaggtcagagctatcggttccgggtgagagccatcagcaaggcgggcagcagcctcccctccaaggcctcagagttggttgtcatgggcgaccatgatgcagcccggaggaagacagnagagatcccctttggtctgggaaacaagatcaccatcagcacagacgattttnnnnnnnnnnnnnnnnnnnnnnnnnnnnnnnnnnnnnnnnnnnnnnnnnnnnnnnnnnnnnnnnnnnnnnnnnnnnnnnnnnnnnnnnnnnnnnnnnnnnnnnnnnnnnnnnnnnnnnnnnnnnnnnnnnnnnnnnnnnnnnnnnnnnnnnnnnnnnnnnnnnnnnnnnnnnnnnnnnnnnnnnnnnnnnnnnnnnnnnnnnnnnnnnnnnnnnnnnnnnnnnnnnnnnnnnnnnnnnnnnnnnnnnnnnnnnnnnnnnnnnnnnnnnnnnnnnnnnnnnnnnnnnnnnnnnnnnnnnnnnnnnnnnnnnnnnnnnnnnnnnnnnnnnnnnnnnnnnnnnnnnnnnnnnnnnnnnnnnnnnnnnnnnnnnnnnnnnnnnnnnnnnnnnnnnnnnnnnnnnnnnnnnnnnnnnnnnnnnnnnnnnnnnnnnnnnnnnnnnnnnnnnnnnnnnnnnnnnnnnnnnnnnnnnnnnnnnnnnnnnnnnnnnnnnnnnnnnnnnnnnnnnnnnnnnnnnnnnnnnnnnnnnnnnnnnnnnnnnnnnnnnnnnnnnnnnnnnnnnnnnnnnnnnnnnnnnnnnnnnnnnnnnnnnnnnnnnnnnnnnnnnnnnnnnnnnnnnnnnnnnnnnnnnnnnnnnnnnnnnnnnnnnnnnnnnnnnnnnnnnnnnnnnnnnnnnnnnnnnnnnnnnnnnnnnnnnnnnnnnnnnnnnnnnnnnnnnnnnnnnnnnnnnnnnnnnnnnnnnnnnnnnnnnnnnnnnnnnnnnnnnnnnnnnnnnnnnnnnnnnnnnnnnnnnnnnnnnnnnnnnnnnnnnnnnnnnnnnnnnnnnnnnnnnnnnnnnnnnnnnnnnnnnnnnnnnnnnnnnnnnnnnnnnnnnnnnnnnnnnnnnnnnnnnnnnnnnnnnnnnnnnnnnnnnnnnnnnnnnnnnnnnnnnnnnnnnnnnnnnnnnnnnnnnnnnnnnnnnnnnnnnnnnnnnnnnnnnnnnnnnnnnnnnnnnnnnnnnnnnnnnnnnnnnnnnnnnnnnnnnnnnnnnnnnnnnnnnnnnnnnnnnnnnnnnnnnnnnnnnnnnnnnnnnnnnnnnnnnnnnnnnnnnnnnnnnnnnnnnnnnnnnnnnnnnnnnnnnnnnnnnnnnnnnnnnnnnnnnnnnnnnnnnnnnnnnnnnnnnnnnnnnnnnnnnnnnnnnnnnnnnnnnnnnnnnnnnnnnnnnnnnnnnnnnnnnnnncaggtgcccatgagatcgaggttggtgtggatgaagagggttttatctatttggcttttgaagcccctgaagcccccgactcctcagagtttcagtggtccaaagactacaagggcccactggacccccagagggtcacgatcgaggatacagttaacaagtnnnnnnnnnnnnnnnnnnnnnnnnnnnnnnnnnnnnnnnnnnnnnnnnnnnnnnnnnnnnnnnnnnnnnnnnnnnnnnnnnnnnnnnnnnnnnnnnnnnnnnnnnnagagctggagaagctgaagaagctgagtcatgaaatcggaaacccagncccagtgatcaaactgatctccggctggaacgttgacatcctggaacgaggagaggtgcggctttggctggaagtagaaaagttatctccagccgctgagctgcatctaatcttcaacaacaaggagatcttcagctcnnngaaccgcaaaatcaattttgaccgagagaagggcctggtggaagtgatcatccagaacttgtctgaggaggacaaagggtcgtacaccgctcaactccaagacggaaaagccaaaaaccagattaccttgacactggtggatgacgngattttgacaaacttctgaggcaggcagatgctaagagaagggactggaagagaaaacagggtnnnnnnnnnnnnnnnnnnnnnnnnnnnnnnnnnnnnnnnnnnnnnnnnnnnnnnnnnnnnnnnnnnnnnnnnnnnnnnnnnnnnnnnnnnnnnnnnnnnnnnnnnnnnnnnnnnnnnnnnnnnnnnnnnnnnnnnnnnnnnnnnnnnnnnnnnnnnnnnnnnnnnnnnnnnnnnnnnnnnnnnnnnnnnnnnnnnnnnnnnnnnnnnnnnnnnnnnnnnnnnnnnnnnnnnnnnnnnnnnnnnnnnnnnnnnnnnnnnnnnnnnnnnnnnnnnnnnnnnnnnnnnnnnnnnnnnnnnnnnnnnnnnnnnnnnnnnnnnnnnnnnnnnnnnnnnnnnnnnnnnnnnnnnnnnnnnnnnnnnnnnnnnnnagacaaacgtctggagagtggtgatcggataaggacgggcaccaccctggatgagatctggcttcacatcctggaccccaaagactcagacaagggcaaatacactctggaaatagctgcagggaaggaattccggcagctctcaacagatctctcagggcaagnnnnnnnnnnnnnnnnnnnnnnnnnnnnnnnnnnnnnnnnnnnnnnnnnnnnnnnnnnnnnnnnnnnnnnnnnnnnnnnnnnnnnnnnnnnnnagaccctgtgcttgacttgcgtcatctcaggagaccccacccctgaaatctcttggctgaagaatgaccagcctgtcaccttccttgaccgataccgcatggaagtgagggggtcagaggtcaccatcaccattgagaaggtcaacagtgatgacagtggccgctacggcgtctttgtcaagaacaagtatggctccgagacaggccaggtcaccatcagtgtgttcaagcacggggacgagcccaaggagctgaagagcatgtgacagcgtgtgtctgggcacagtctgagtctagtctgcatggaccagtagggacaatcagtgggtcacagcctggcacaggctacaggggtggggcagaaggaaaggggacaagatagaacccaggatgtgaggggtgggggtggagcggatgcactaaagtggagaagcaaaaatctttctggggtcctgagtggcctccaggagagcgggatgaaccctggacctggagtaggagacccggatgcactggggctatctaacagtactggcatctgataggtagaggtcaggtacgctgctaaacactgcagctcccactacgtagaattatccgaccccagatgtcaaaaggccaggggtcggagccctgccataaactnnnnnnnnnnnnnnnnnnnnnnnnnnnnnnnnnnnnnnnnnnnnnnnnnnnnnnnnnnnnnnnnnnnnnnnnnnnnnnnnnnnnnnnnnnnnnnnnnnnnnnnnnnnnnnnnnnnnnnnnnnnnnnnnnnnnnnnnnnnnnnnnnnnnnnnnnnnnnnnnnnnnnnnnnnnnnnnnnnnnnnnnnnngacaaagcaggacatggtaaagattataaagcaggtccaaggaaagtgctgccagtggtccaggagggagaccagagggtcgtcccaatacggggaggtagggcttttaaaacaccttcatccaggctgggcaaggtggctcacgcctgtaattccagcactttgggaggccgagacgggcagatcacgaggtcaggagatcgagaccatcctggctaacacggtgaaaccctgtctctactaaaatatacaaaaattagccgggcgtggtggcaggcgcctgtaatccctgctattcagaaggccgaggtgggagaatcccttgaacctgggaggtggaggttgtgatgagccaagattgagccnnnnnnnnnnnnnnnnnnnnnnnnnnnnnnnnnnnnnnnnnnnnnnnnnnnnnnnnnnnnnnnnnnnnnnnnnnnnnnnnnnnnnnnnnnnnnnnnnnnnnnnnnnnnnnnnnnnnnnttagcagaattggtgttgggccctgaaaaattggtctggttttgtggtggtaatgggagaaggacatctcaggagcagggtctggtgcaaggaaaggaaaggaggaggctgagcctgcccaggtggccttggataccaggcttggagccagtaacctccagggcttccagcacggggcctctgcctggtgtgacagataccgactggcctcacctgatggatctcagtactgagctgggcatttctctgccccccaacttctttctttttaaaaataagatggggagagttcataaaattatagatgtttgttgtaaaattttggaaaactctggaaatcatagaggagaaaataaacaatctgtacttccaacaccacgaagt

SEQ ID NO: 27120 - DNA, 552 bp, Macaca Mulatta
aaggagaaaggataacaacagaatgtctacaaccagaagtccaagtgtgtgtctatttatgggaccaataaataaagaacagacattggatttgaggtaaggtaaaagcctgaaacatgggatggcattctgttttgatggattttcatttcttcgcacttctgagatggcaaagccaaccacttagaaggcttccacatctttgtcacctgcctggctcctgccctctgatgtacctctgggtagtaggatggaaatggtgtctgcagaagttggggagaaggagacttttgcacagcctccatgacttctttaacccaaatatggatgacaagggtctctgttacaggggtctcagagcaccttcgtttctcctctagaccagggacaggaggatagagataagggctggcaaccagagcctcagcatccaaagaatggtctgaagtgggacggcttgacgggccataactttaggggaaagggaatttcatacgtacaatattagtatacgtgggtaagcgagggcttatcatcaacactgattttata

SEQ ID NO: 27121 - DNA, 567 bp, Macaca Mulatta
  misc_feature (1)...(567): n = A,T,C or G
gcaagtcatttcccttatttaaccgatgcatccctcaaacacctgagtgctactccctgtttgcatctgtttggataaatgatggtgacaccctccaccgaattctaagtggaatcatgtcgggaagagatnacncatccttggcctgtgtatcctcacattagnnnnnnnnnnnnnnnnnnnnnnnnnnnnnnnnnnnnnnnnnnnnnnnnnnnnnnnnnnnnnnnnnnnnnnnnnnnnnnnnnnnnnnnnnnnnnnnnnnnnnnnnnnnnnnnnnnnnnnnnnnnnnnnnnnnnnnnnnnnnnnnnnnnnnnnnnnnnnnnnnnnnnnnnnnnnnnnnnnnnnnnnnnnnnnnnnnnnnnnnnnnnnnnnnnnnnnngcagtcctgctcgtcttgatttttgttctcagaaagagaataaaattgacagttgagcttttccaaatcacaaataaagccatcagcagtgctcccttcctgctgttccagccactgtggacatttgccatcctcattttcttctgggtcctctgggtggctgtgctgctgagcctgggaactgcagg

SEQ ID NO: 27122 - DNA, 644 bp, Macaca Mulatta
gtcgtcagtggatgtaggctggcgccgcgatgttcgacgggacatcggtggagagagacctcggggttaaggggtggggctgacgtcaagagccaagatggcggcggtggtcgcactctccttgaggggccggttaccggccacagcacttggcggagcctgcctgcaggcctcccgaggagcccagacagctgcagccgcagctccccgtatcaagaaatttgccatctatcgatgggacccagacaaggctggagacaaacctcatatgcagacttacgaaattgaccttaataaatgtggccccatggtattggatgctttaatcaagattaagaatgaaattgactctactttgaccttccgaagatcatgcagagaaggcatctgtggctcttgtgcaatgaacatcaatggaggcaacactctagcttgcacccgaaggattgacaccaacctcaataaggtctcaaaaatctaccctcttccgcatatgtatgtgataaaggaccttgttcccgatttgagcaacttctatgctcagtacaaatccattgagccttatttgaagaagaaggatgaatctcaggaaggcaagcagcagtatctgcagtccatagaagagcgtgagaaactggacgggc

SEQ ID NO: 27123 - DNA, 838 bp, Macaca Mulatta
  misc_feature (1)...(838): n = A,T,C or G
aattattccactcaatatgtgatttttgtgaagtccttcttacattttccagtaatttgtggaggactttgaatcattgaatctattggaatctgtatcagaaagattttagccattattttctttaaagaatgctgggtgttgcatttctggaccctccacttcaatgtgagaagacagtatgtttctaaaaatttgtgcttgtttcaccatgcttcattcagaccaatgaaagagtagtgcatttaattggagtatctaaagccagtggcattgtatgctcatacttggacagttagggaaggttttgccaagttatataaagagaagatgtgatttattttgaaatttgtttctgttttgtttttaaatcaaaccgtaaaacttaaaactgaaaaattttcttgataggatttatatctaagtttggttagccttagtttctcagacttgttgtctattacctgtaggtggaagaaatttaggaagcaaaatattatagtagtgcattggtgggtctccaatccttaacatatttgcacaattttgtagcacaaactttaaatttgagctgctttcgacaactgacaatatgattttaaatttgaagatgggatgtgtacatgttgggtatcctacttctttgtgttttcatctcctaaaaatggttttcatttccttgtatctgtagtcttttattttttaaatgactgctaaatgacatattttatcttgttctttanaatcacaacacagagctgctattanattaatattgatatattcagtattctcttaaactttgtcacaaggaagaatttcctatagttaattttaa

SEQ ID NO: 27124 - DNA, 201 bp, Macaca Mulatta
  misc_feature (1)...(201): n = A,T,C or G
gagctggagtggctgctggagattaaccggctcacgcaccggctgctctgtaagcacatgacgctggacagctttgacgccatgttccgggaggccaatcacaatgtgtccgctccctatggccgtatcaccctgcatgtcttctgggaactgaactttgactttctccccaactactgctacaatgggtccacgaaccgn

SEQ ID NO: 27125 - DNA, 417 bp, Macaca Mulatta
  misc_feature (1)...(417): n = A,T,C or G
tactagatgatactacaaatcattctaactccaccaaggaggtcccttcctcagctgttttgagaagccttcgggtgaatgtaggtccagacggagaggagacgagagctcagactgtacagaaatccccggagtttttgtccacttcagagtcttctagcttgttgcaagatctacagccaagtgatagcacttcttttattcttcttaacctaacaagagcaggtnnnnnnnnnnnnnnnnnnnnnnnnnnnnnnnnnnnnnnnnnnnnnnnnnnnnnnnnnnnnnnnnnnnnnnnnnnnnnnnnnnnnnnnnnnnnnnnnnnnnnnnnnnnnngggttcaagagttggcccatgacagtttgattgctgctactcgtgcacaactggcaaagaatgcaaaaaccagcagcaatg

SEQ ID NO: 27126 - DNA, 363 bp, Macaca Mulatta
ttctacctgaattcagccctcatgagacatcagagagtgcacacaggagagaaaccttacgaatgtaacgaatgtggaaagttattctcccagttgtcatacctcactatacatcatagaactcattcaggagtcaaaccctatgaatgtagtgaatgtgggaaaaccttctaccagaactcagccctttgtagacatcggagaatacacaaaggagagaagccctatgaatgttatatatgtggaaaattcttctctcagatgtcatacctcactatacatcatagaattcattcaggagagaagccctatgaatgtagtgaatgtgggaaaaccttctgccagaattcagcccttaatcga

SEQ ID NO: 27127 - DNA, 450 bp, Macaca Mulatta
ccagcaacatccatttttcaccctacatgaatccaaaggaacagatgtggcatcttttgtaaaactgattcttggagattaaaaagcaatggacttaatcggttgaccctactgtggattggtgggttttggggtgaagcaagttcactacagcgtcaatagagagtcatctttgagataattgaacccttcctctgagagggttttctctcccaattttctttttattccccctcttgagggggccttgggatctatagtatagaatgaactgtctagatggatgaattatgataaaggcttaggacttaaaaaggtgattaaatatttaatgatgtgtcatatgagtcctcaagcttctcagatttctctttttctttacaaaatgaatgcattagccctgacaaaaaggtgctacagtagtgatgaaattataagtagatttgtagt

SEQ ID NO: 27128 - DNA, 478 bp, Macaca Mulatta
  misc_feature (1)...(478): n = A,T,C or G
ggggaatttcatcaggaatttcaaccggagccttcccttttgggtgacagcactaactcaggagaagaaagagaccagtttactgatagagcagatggtctccattcggaatttatgaactataaggcaagattttcaggatcaactannncagaagactgtgaagagctgttacggatagaagaggatgtacactggcaaaccgagggcatnnnnnnnnnnnnnnnnnnnnnnnnnnnnnnnnnnnnnnnnnnnnnnnnnnnnnnnnnnnnnnnnnnnnnnnnnnnnnnnnnnnnnnnnnnnnnnnnnnnnnnnnnnnnnnnnnnnnnnnnnnnnnnnnnnnnnnnnnnnnnnnnnnnnnnnnnnnnnnnnnnnnnnnnnnnnnnnnnnnnnnnnnnnnnnnnnnnnnnnnnnnnnnnnnnnnaggtgcaaagtgatctaacattacagagtaatggagccagtatctccaaatgag

SEQ ID NO: 27129 - DNA, 782 bp, Macaca Mulatta
  misc_feature (1)...(782): n = A,T,C or G
gttctgtccactttgccgattaatacccgatgagaatccaagcagcttcagtggcagtttaataagacatcttcaagttagtcacactttgttttatgatgatttcatagngattttaatataattgaggaagctcttatccgaagagtcttagaccggtcacttcttgaatatgtgaatcagtcgaacgccacataattttattaaaacgaagggaaaagggaccactgaattgcaccatttaagatgctgcttgaacaaattgaagggaagttgtcaatgcttgatgggcaaaaatgtacaacacagttatatgtttgtccatgtttattgttatagtgcatttaaaaactgctttaattttgatgatttaaatctgttttacatccttgagattcctacacatctaacaannnnnnnnnnnntctatatcagtcgttattatatggaaaaggcacatggtaggcaagtgggtggaggatctcggtttgcaaattagataacactctgtgtataatactacatattaataactaccatcatggttaggcacgataactaatctttgttctatgtaagaaaatagagagtgaaacaaaatgcagacattcaaagaaataagaaatctgctccaatgcccttgctctaatctctaatagattaacattaataatcttgtacgggagttggaaaggaacattttggaagtcaaggaagtccatttaggccagatgcagtggctcacgcttgtaatcccagcacttgggaggctgaagcgggcg

SEQ ID NO: 27130 - DNA, 584 bp, Macaca Mulatta
caggcactgcaacatggtgctggagaacgtgaaggagatgtggactgaggtccctaagagcggcaagggcaagaagaaatccaagccagtcaacaaagaccgctacatctccaagatgttcctgcgtggggactcggtcatcgtggtcctgcggaacccgctcatcgccggcaagtaggggctgcctatccatcgacagaactcactctctcgtcctatgaagaccattgccattggtgttgagaataataaagctctgtggtttttttctagtggtatgtgttcccagagccttgtgagtggggtggattcaggagggcttgggggaggcagctaatatcaaattgaatgctgggaccaggacccgtgagcaagtggagaggccctggctctgccccatcgaggcctcactttccccctccgcaaagcaaacaggttggatggaaatgagcacccagttgtggcactggagaatattttagttctcctgctttaatctttctgagcttcgccttgtcactctgttgctctcttctctgcctcttaaaatgaattggcctcgcttgaccaaaatatcttttggg

SEQ ID NO: 27131 - DNA, 2641 bp, Macaca Mulatta
  misc_feature (1)...(2641): n = A,T,C or G
caggatgattatgaagacgtgttggaggagaatctggagctggaggaatatgaagacccaggcgtcctcaagccccaggtggaggnnnnnnnnnnnnnnnnnnnnnnnnnnnnnnnnnnnnnnnnnnnnnnnnnnnnnnnnnnnnnnnnnnnnnnnnnnnnnnnnnnnnnnnnnnnnnnnnnnnnnnnnnnnnnnnnnnnnnnnnnnnnnnnnnnnnnnnnnnnnnnnnnnnnnnnnnnnnnnnnnnnnnnnnnnnnnnnnnnnnnnnnnnnnnnnnnnnnnnnnnnnnnnnnnnnnnnnnnnnnnnnnnnnnnnnnnnnnnnnnnnnnnnnnnnnnnnnnnnnnnnnnnnnnnnnnnnnnnnnnnnnnnnnnnnnnnnnnnnnnnnnnnnnnnnnnnnnnnnnnnnnnnnnnnnnnnnnnnnnnnnnnnnnnnnnnnnnnnnnnnnnnnnnnnnnnnnnnnnnnnnnnnnnnnnnnnnnnnnnnnnnnnnnnnnnnnnnnnnnnnnnnnnnnnnnnnnnnnnnnnnnnnnnnnnnnnnnnnnnnnnnnnnnnnnnnnnnnnnnnnnnnnnnnnnnnnnnnnnnnnnnnnnnnnnnnnnnnnnnnnnnnnnnnnnnnnnnnnnnnnnnnnnnnnnnnnnnnnnnnnnnnnnnnnnnnnnnnnnnnnnnnnnnnnnnnnnnnnnnnnnnnnnnnnnnnnnnnnnnnnnnnnnnnnnnnnnnnnnnnnnnnnnnnnnnnnnnnnnnnnnnnnnnnnnnnnnnnnnnnnnnnnnnnnnnnnnnnnnnnnnnnnnnnnnnnnnnnnnnnnnnnnnnnnnnnnnnnnnnnnnnnnnnnnnnnnnnnnnnnnnnnnnnnnnnnnnnnnnnnnnnnnnnnnnnnnnnnnnnnnnnnnnnnnnnnnnnnnnnnnnnnnnnnnnnnnnnnnnnnnnnnnnnnnnnnnnnnnnnnnnnnnnnnnnnnnnnnnnnnnnnnnnnnnnnnnnnnnnnnnnnnnnnnnnnnnnnnnnnnnnnnnnnnnnnnnnnnnnnnnnnnnnnnnnnnnnnnnnnnnnnnnnnnnnnnnnnnnnnnnnnnnnnnnnnnnnnnnnnnnnnnnnnnnnnnnnnnnnnnnnnnnnnnnnnnnnnnnnnnnnnnnnnnnnnnnnnnnnnnnnnnnnnnnnnnnnnnnnnnnnnnnnnnnnnnnnnnnnnnnnnnnnnnnnnnnnnnnnnnnnnnnnnnnnnnnnnnnnnnnnnnnnnnnnnnnnnnnnnnnnnnnnnnnnnnnnnnnnnnnnnnnnnnnnnnnnnnnnnnnnnnnnnnnnnnnnnnnnnnnnnnnnnnnnnnnnnnnnnnnnnnnnnnnnnnnnnnnnnnnnnnnnnnnnnnnnnnnnnnnnnnnnnnnnnnnnnnnnnnnnnnnnnnnnnnnnnnnnnnnnnnnnnnnnnnnnnnnnnnnnnnnnnnnnnnnnnnnnnnnnnnnnnnnnnnnnnnnnnnnnnnnnnnnnnnnnnnnnnnnnnnnnnnnnnnnnnnnnnnnnnnnnnnnnnnnnnnnnnnnnnnnnnnnnnnnnnnnnnnnnnnnnnnnnnnnnnnnnnnnnnnnnnnnnnnnnnnnnnnnnnnnnnnnnnnnnnnnnnnnnnnnnnnnnnnnnnnnnnnnnnnnnnnnnnnnnnnnnnnnnnnnnnnnnnnnnnnnnnnnnnnnnnnnnnnnnnnnnnnnnnnnnnnnnnnnnnnnnnnnnnnnnnnnnnnnnnnnnnnnnnnnnnnnnnnnnnnnnnnnnnnnnnnnnnnnnnnnnnnnnnnnnnnnnnnnnnnnnnnnnnnnnnnnnnnnnnnnnnnnnnnnnnnnnnnnnnnnnnnnnnnnnnnnnnnnnnnnnnnnnnnnnnnnnnnnnnnnnnnnnnnnnnnnnnnnnnnnnnnnnnnnnnnnnnnnnnnnnnnnnnnnnnnnnnnnnnnnnnnnnnnnnnnnnnnnnnnnnnnnnnnnnnnnnnnnnnnnnnnnnnnnnnnnnnnnnnnnnnnnnnnnnnnnnnnnnnnnnnnnnnnnnnnnnnnnnnnnnnnnnnnnnnnnnnnnnnnnnnnnnnnnnnnnnnnnnnnnnnnnnnnnnnnnnnnnnnnnnnnnnnnnnnnnnnnnnnnnnnnnnnnnnnnnnnnnnnnnnnnnnnnnnnnnnnnnnnnnnnnnnnnnnnnnnnnnnnnnnnnnnnnnnnnnnnnnnnnnnnnnnnnnnnnnnnnnnnnnnnnnnnnnnnnnnnnnnnnnnnnnnnnnnnnnnnnnnnnnnnnnnnnnnnnnnnnnnnnnnnnnnnnnnnnnnnnnnnnnnnnnnnnnnnnnnnnnnnnnnnnnnnnnnnnnnnnnnnnnnnnnnnnnnnnnnnnnnnnnnnnnnnnnnnnnnnnnnnnnnnnnnnnnnnnnnnnnnnnnnnnnnnnnnnnnnnnnnnnnnnnnnnnnnnnnnnnnnnnnnnnnnnnnnnnnnnnnnnnnnnnnnnnnnnnnnnnnnnnnnnnnnggtgaagacctggcgcatgcacttgttcacgggcatccagatcatctgcctggcagtgctgtgggtggtgaagtccacgccggcctccctggccctgcccttcgtactcatcctcactgtgccgctgcggcgcgtcctgctgccgctcatcttcaggaacctggagcttcagtg

SEQ ID NO: 27132 - DNA, 755 bp, Macaca Mulatta
  misc_feature (1)...(755): n = A,T,C or G
cgtcgctccctgagcgctcctgagggggccgcccggccttgtctttcggcagtggccgagccaccgccgcctgtcgcgcgttccagagctgggtgctgcagccgcagttccgatcgccgtgtttggtcgatagaatccccagtgtgcccagagagtgcgacccctcgcccggcccggcgagtcccgggcgtgaaccgagctgagggaggatggcagcctccggggtggagaagaacagcaagaagaagacagagaagaaacttgctgctcgggaagaagctaaattgttggcgggtttcatgggcgtcatgaataacatgcggaaacagnagaaaacgttgtgtgacgtgatcctcatggtccaggaaagaaagatacctgctcatcgtgttgttcttgctgcagcaagtcannnnnnnnnnnnnnnnnnnnnnnnnnnnnnnnnnnnnnnnnnnnnnnnnnnnnnnnnnnnnnnnnnnnnnnnnnnnnnnnnnnnnnnnnnnnnnnnnnnnnnnnnnnnnnnnnnnagaatttccgtgaatagcaacaatgttcagtctttgttggatgcagcaaaccaatatcagattgaacctgtgaagaaaatgtgtgttgattttttgaaagaacaagttgatgcttcaaattgccttggnggagaagcagaaaaagttgatcagagccttccagagtgtggtatgcttttggctatgtgatgatccttagtggcacgtgaatgaacgtcccagatgttt

SEQ ID NO: 27133 - DNA, 1945 bp, Macaca Mulatta
  misc_feature (1)...(1945): n = A,T,C or G
tggacctgctgaccagggagaatgtggccctcaaggtggagtcagcccagcagcccaagcaggtcctcaagatggaggtggccgtgctgaagaagctgcaaggnagggaaggaccatgtgtgcaggttcattggctgtggcaggaacgagaagtttaactatgtagtgatgcagctccaggncagggccggaacctggccgacctgcgccgcagccagccgcgaggcaccttcacgctgagcaccacgttgcggctgggcaagcagatctttggagtccctcgaggccatccactctgtgggcttcctgcatcgtgacttcaggcctntcaaactttgccatgggcaggctgccctccacctacaggaagtgctatatgctggacttcgggctggcccggcagtacaccaacaccacgggggatgtgcggccncctcggaatgtggccgggtttcgaggaactgttcgctatgcctcggtcaatgcccacaagaaccgggnggagatgggccgccacgatgacctgtggtccctattctacatgctggtggagtttgcggtgggccagctgccctggaggaagatcaaggacaaggnaggagcaggtagggatgatcaaggagaagtatgagcaccggatgctgctgaagcacatgccatcagagttccacctcttcctggaccacattgccagccttgactactttaccaagcccgactaccagnnnnnnnnnnnnnnnnnnnnnnnnnnnnnnnnnnnnnnnnnnnnnnnnnnnnnnnnnnnnnnnnnnnnnnnnnnnnnnnnnnnnnnnnnnnnnnnnnnnnnnnnnnnnnnnnnnnnnnnnnnnnnnnnnnnnnnnnnnnnnnnnnnnnnnnnnnnnnnnnnnnnnnnnnnnnnnnnnnnnnnnnnnnnnnnnnnnnnnnnnnnnnnnnnnnnnnnnnnnnnnnnnnnnnnnnnnnnnnnnnnnnnnnnnnnnnnnnnnnnnnnnnnnnnnnnnnnnnnnnnnnnnnnnnnnnnnnnnnnnnnnnnnnnnnnnnnnnnnnnnnnnnnnnnnnnnnnnnnnnnnnnnnnnnnnnnnnnnnnnnnnnnnnnnnnnnnnnnnnnnnnnnnnnnnnnnnnnnnnnnnnnnnnnnnnnnnnnnnnnnnnnnnnnnnnnnnnnnnnnnnnnnnnnnnnnnnnnnnnnnnnnnnnnnnnnnngtccgttctctgcgctccggcgggtgaacagccctgagtcagagaggctgtccacggcggacgggcgagtggaactacctgagaggaggtnaggtcacggatggatctgcctggctcgccctcgcgccaggcctgctcctctcagccagcccagatgctgtcagtggacacaggccacgctgaccggcaggccagtggccgcatggacgtgtcagcctctgtggagcaggaggccctaagcaatgccttccgctcggtgccgctggctgaggaggaggacttcgacagcaaagagtgggtcatcattgacaaggagacggagctcaaggacttccctccgggggctgaacccagcacgtcgggcaccacggacgaggagccggaggagctgcggccattgcccgaggagggcgaagagcggcggcggctgggggcagagcccaccgtccggccccggggacgcagcatgcaggtgctggccgaggaggacctgcagcatttgcccgccccaagccctgcccccccaagctgagcccaggccgatgggcggttcggagacgtcacaaccccctcacgccttggcaaccccttccccctcacccctgcactccgggaccccgccctcgacggagagagtcggaccccacaggcccacagagacaggtnnnnnnnnnnnnnnnnnnnnnnnnnnnnncaggtgttctccgtggcgcctccatttgaggtgaatggcctcccaagagctg

SEQ ID NO: 27134 - DNA, 1736 bp, Macaca Mulatta
  misc_feature (1)...(1736): n = A,T,C or G
catcagacgctgaactgaagaaggcctatagacagctggcagtgatggttcatcccgacaaaactcatcaccccggggctgaggaggccttcaaggttttgcgcgcagcttgggacattgtcagcaatgctgaaaagcggaaggaatatgagatgaaaggaatggcagagaatgagctgagccggtcagtaaatgaatttctgtccaagctgcaagatgacctcaaggaggcagtgaatactttgatgtgtggccgatgccaaggaaagcataggaggtttgaggtggaccaggaacctaagagtgccagatactatgctgcgtgtgataggctgcgtcccgctaaggaaggagacttttgggcagagtcaagcttgttgggcctcaagatcacctacttagcactgatggatggaaaaatgtatgacaacacacagtgggctggaggccagcgtcctacatatctccccagacccgcagagtcccctcacatctctcatttggttctcggattccaggcaccagagggcggcagagagccaccccggacgccccttctgctgatcttcaggatttcttgagtcggatcttccaagtacacccagcgcagacgcccagtgggaacttctttgcagctcctaagcctgcccccggagccactgcagcctctaagcccaaccgcacagtacccaagggagannnnnnnnnnnnnnnnnnnnnnnnnnnnnnnnnnnnnnnnnnnnnnnnnnnnnnnnnnnnnnnnnnnnnnnnnnnnnnnnnnnnnnnnnnnnnnnnnnnnnnnnnnnnnnnnnnnnnnnnnnnnnnnnnnnnnnnnnnnnnnnnnnnnnnnnnnnnnnnnnnnnnnnnnnnnnnnnnnnnnnnnnnnttgcccagctggggtgcagtggtgtgatcttggtttactgcaacctctgtttcctgggttcaagcaattctcccatctcggcctcctgagtagctgggattacaggcacgcaccaccacacctggctcaacgaattcttttttggatttttagtaaagacggggttcaccatgttgcccaggctggtctcgaactcctgagctcaggcgatccacccgtcctggcctcccaaagtgctggattacaggcatgagccaccgcgccggacctgagtcttgtcttttgaaaacaccgaaaaaatagggggtagctagagtaaagaacccagggcctggacctgggctggacagtatatccctttaggtgtgggaactgggtatttccctggggtctctatgcctttgtcttgccatttgcttttgagggcagatgagactttttcccacccttttaaagccacaagtctatcttctttcttgacccatctcaggagggagccctctcctttaccctgatacaacatttaaaagacagaacaagaaagcattcagccctaatgataggagattactgcatagagttcagagagtggaaactgaattttccctcgactttcactttgtgggtaaatcacccaattttaggctcttttctgcaaggatggccaaaattaatcatttttaaaaagtagattcatgcccactgcccttgggtgagggggaaggatgcaggggttcccagaagcccccatgtgattcaagggtttgtannnnnnnnnnagtttgttcatatttgtatgtacatacctatttaaagccaggggattatctttctataaatgtataactgg

SEQ ID NO: 27135 - DNA, 541 bp, Macaca Mulatta
tgccataaataaaagataagccatgcatctctctgtattgcccttgggctcccagctctgtacccgctcccaggcagtgccctttctctgaacttcctctttcaaggctgatggtgaaggggcacctcctggagctcagggaaggcacgaggcctgttcttgccactcctgggtgaaggcttagtggccaaggtcccggatgccacttggtacctcggtcagaaataatcgtgtctcctttggtccacttgtttcaggctcccctgcaaacttcgctgtgtacactgccctggtggaaccccatgggcgcatcatgggcctggacctgccagatgggggccacctgacccatgggttcatgacagacaagaagaaaatctctgccacgtccatcttctttgaatctatgccctataaggtaagcatgtgtttctctccatagcttttatttccttgggaaacctctgatgtttggctctgcctgtagggataagtttggtttatgtgtcactataggaagtccccaccttgcaccattttt

SEQ ID NO: 27136 - DNA, 543 bp, Macaca Mulatta
aaggaaataagtcatctgtgtgctgactggggataatggcatcaaatgtcagtccttgacatttggggggaacagcaggtgccggagctaaaaggtacctttgtctcccattgatccagctcaaaacgattggaaataaatttgaaatgtaaccgagcattcagagtccaacagtattactatagttgtctggggaaagataaacgccacccagggcttgcttttcacctgtgcaatgttatgttctctgacggggcctggacagttcatttctggctcctgttggggccagctctcagaaagcacagccagtacaggcggctcccaagcctgccaagggaggaaggacagtgaccagctttcctttccctacaggagcaccagctgcatgaaacaaaaggaagggtgaaatgtccctctagaaatagcctgtcccagcagccagggcaccggctgaagtgttgattttccaaggtgcagtatgagaacaaatggacctgatccagaaatatgagtgaatctcgtccttccagtcacagtgac

SEQ ID NO: 27137 - DNA, 506 bp, Macaca Mulatta
ggggatcgtgggcggcgtagacctgactggaccgcagctctacagcgtgcatccccatggctcctacagccgtctgcccttcacagccctgggctctggccagggcgaggccctggcggtactagaagaccggttccagccgaacatgacactagaggccgctcaggggctgctggtggaagccatcaccgccggaatcttgggtgacctgggctccgggggcaatgtggacgcatgtgtgatcacgaagactggcgccaagctgctgcggacactgagctcacccacagagcccgtgaagaggtctggccgctaccagtttgtgcctggaaccacagctgtcctgacccaaaccgtgaagccactaaccctggagctagtggaggaaactgtgcaggctatggaggtggagtaaaataggttgaggcttagagcttggaacaagggggaataaacccagaaaatacggtcactcagtgcatatagtatcatactcctatcttgtc

SEQ ID NO: 27138 - DNA, 321 bp, Macaca Mulatta
  misc_feature (1)...(321): n = A,T,C or G
caggatccgtttggggacttgctgaagaagctcatggaccaagtccacgaccacctggnnnnnnnnnnnnnnnnnnnnnnnnnnnnnnnnnnnnnnnnnnnnnnnnnnnnnnnnnnnnnnnnnnnnnnngcggctttggccgggctccaggagcagcgggtgtacgcacttcacctgaggcgctacaatgacgcgctgctcatccatgacaccgtccgcgccgtggatgccctggctgcgctgcaggatttctatcacagggagcacgtcactaaaacccagatcctgtgtgccgagcgccggctgctggccctgttcgat

SEQ ID NO: 27139 - DNA, 197 bp, Macaca Mulatta
aaacctcatactcactcctcagtgaaagaaaggaaaacgttaacgactttagacagaacagcattgtgtaacttgactgaagatcatgcattattagttgttaagcatttaggtaaaattttctaatacctaaaaattttcaaaaacagtcgataaggcttctgctggtccaaagactattttggttcacctcctct

SEQ ID NO: 27140 - DNA, 1035 bp, Macaca Mulatta
  misc_feature (1)...(1035): n = A,T,C or G
ctcagggcgagtatagcgaccaatcatcaagccatttaccaggcttcggaggaagctgtttatgtgatccccgcactaattaggctcatgaactaacaaatcgtttgcacaacttgtgaagaagcgaacacttccatggattgtccttggacttagggcgccctgcccgccttttgcagaggagaaaaaacnnnnnnnnnnnnnngcctcccccgagaactttccccccttctcccccctgcctctaactccgatccccccacgccatctcgccnnnnnnnnnnnnnnnnnnnnnnnnnnnnnnnnnnnnnnnnnnnnnnnnnnnnnttaccccaatccacgcctgcaaattcttctggaaggattttcccccttctcttcaggttgggcgcgtttggtgcaagattctctggatcctcggctttgnnnnnnnnnnnnnnnnnnnnnnnnnnnnnnnnnnnnnnnnnnnnnnnnnnnnnnnnnnnnnnnnnnnnnnnnnnnnnnnnnnnnnnnnaaacaaacaagtccccaattctagtccgtcctccccgcgggcagcgggcggcggaggcagcgtgcggcggtcgccgggagctgggagcccagggcgcccgctcctcggcgcagcatgttccagccggcgcccaagcgctgcttcaccatcgagtcgctgggggccaaggacagtcccctgcccgcctcgcgctccgaggaccccatccgtcccgcggcactcaactacgctaactccagccccataaatccattcctcaacggcttccactcgnnnnnnnnnnnnnnnnnnngtaggggcgtctactccaacccggacttggtgttcgccgaggcggtctcgcacccgcccaaccccgccgtgccagtgcacccggtgccgccgccgcacgccctggccgcccaccccctaccctcttcgcactcgccacaccccctcttcgcctcgcagcagcgggatccgtccaccttctacccctggctcatccaccgctaccgatatctgggtcatcgcttccaagg

SEQ ID NO: 27141 - DNA, 168 bp, Macaca Mulatta
caggtgagaaacctttcaaatgtgaatttgaaggctgtgacagacgctttgccaacagcagcgaccgtaagaagcacatgcatgtgcatacctcggacaagccctatatctgcaaagtgtgcgacaagtcctacacgcacccgagctccctgcgcaaacacatgaagg

SEQ ID NO: 27142 - DNA, 247 bp, Macaca Mulatta
caggtatcgtagtgaaaagatgaccctgagctatgctgaataccttgctcatcgccagcatcatcatttccaaaatggcattgggcatccccttccgccatataaccattattcctgacactgagccgcacaaccagtcactgggcctctctgcagacctcttcccaggagaccctacaccttcttggtctagctatctcttttactgtaccattttatgatgatagtttccgttgccatggtgaag

SEQ ID NO: 27143 - DNA, 1125 bp, Macaca Mulatta
  misc_feature (1)...(1125): n = A,T,C or G
cagatacaagagggtcacaactcacagaagaatatggctggccctgggcctttgctggctggtgtcattcctggtgggactgacccccatgtttggctggaacatgaaactgacctcagagtaccacagaaatgtcaccttcctttcatgccaattcctttctgtcatgagaatggactacatggtatacttnnnnnnnnnnnnnnnnnnnnnnnnnnnnnnnnnnnnnnnnnnnnnnnnnnnnnnnnnnnnnnnnnnnnnnnnnnnnnnnnnnnnnnnnnnnnnnnnnnnnnnnnnnnnnnnnnnnnnnnnnnnnnnnnnnnnnnnnnnnnnnnnnnnnnnnnnnnnnnnnnnnnnnnnnnnnnnnnnnnnnnnnnnnnnnnnnnnnnnnnnnnnnnnnnnnnnnnnnnnnnnnnnnnnnnnnnnnnnnnnnnnnnnnnnnnnnnnnnnnnnnnnnnnnnnnnnnnnnnnnnnnnnnnnnnnnnnnnnnnnnnnnnnnnnnnnnnnnnnnnnnnnnnnnnnnnnnnnnnnnnnnnnnnnnnnnnnnnnnnnnnnnnnnnnnnnnnnnnnnnnnnnnnnnnnnnnnnnnnnnnnnnnnnnnnnnnnnnnnnnnnnnnnnnnnnnnnnnnnnnnnnnnnnnnnnnnnnnnnnnnnnnnnnnnnnnnnnnnnnnnnnnnnnnnnnnnnnnnnnnnnnnnnnnnnnnnnnnnnnnnnnnnnnnnnnnnnnnnnnnnnnnnnnnnnnnnnnnnnnnnnatctcccccactccactactctcttcctccacttcatgtttctcttggccttcttctgtattcaatgttttggaggcctgacttgaggacaacatattattgatactattgtctgttttcctccttcccaaatagaagaataagtcatggagcctgaagggtgcctagttgatttactgaccaaaggctctagttgggctgaacatgtgtgtggtggtgactcagttccatgtcattgtggaattgagcagagaacctgctctcggaggatgcctaggagatattgggaacagaaggaatgaactgagtttaagggggacttaaactgctgaattcacctgtggatgtttttgagtaaataaaagataata

SEQ ID NO: 27144 - DNA, 124 bp, Macaca Mulatta
gagtctggaagtgttagttgcaaaggtatgcatttgcttctctggctacaagaaagaacagaaatgcacaaagaggagcagtgtgaagaagaagaggcgttgatccccagaccgaccaaagccc

SEQ ID NO: 27145 - DNA, 517 bp, Macaca Mulatta
  misc_feature (1)...(517): n = A,T,C or G
ggctgtgcctggcttttgtggaaagcaaattcaacatatcaaagataaatgaaaacgcagatggaagctttgactatggcctcttccagatcaacggccactactggtgcaacgattataaaagtcactcggaaaacctttgccaggtggactgtcaannnnnnnnnnnnnnnnnnnnnnnnnnnnnnnnnnnnnnnnnnnnnnnnnnnnnnnnnnnnnnnnnnnnnnnnnnnnnngggtagaatggaggttgcactgttcaggccggccactctcctactggctgacaggatgccgactgggatgaaacagggtgcgggtgcaccatggagtcattccaagactcctgtccttactcaggaattcttcatttcttcttcctatgcctcaacttcatgttattttcttcccttcccatttacaactaaaactgaccagagccccaagaataaattattttcttggcttcctccttactcccatctggacccaatgtcctggttcctgtctgtcattt

SEQ ID NO: 27146 - DNA, 630 bp, Macaca Mulatta
  misc_feature (1)...(630): n = A,T,C or G
caaaaaaagttccccccgggttaaattcccaagaggacccgagttcctggttttttttttcgagggaaaaaaacgggggagagatttttaactttcccttaaatagaaatttttttggaacattaattttctttttccccccattgttaaaaagtccttgaaagaattgaattgattttggatcaattgcagcggaaaacatttttccatttcttcttgggaaaagggtcacctttttcagtcataaacttgatcagttcatccttagtaagaaacccacgtttagctgaatctaaaactcaaaagctcgangaaggacatcttctggaattggtctgtatctcctttctagtagtatttctgtcatcaccggaagaaatttttcgaatcgaatgtatccagtgggttcttcttcttctacctctgcaatcagatcatgcagctctccttcagtagggcagcatcctaatgacctgataattgttccaatctctctcacatccactgtattattcgactcatggtcaaacacttcaaatgcttccttgatttttttgtgaaattctgctactattatctcttccctgtctttctcgtccgccatcttgctgcggagccggtcgcctcccc

SEQ ID NO: 27147 - DNA, 2276 bp, Macaca Mulatta
  misc_feature (1)...(2276): n = A,T,C or G
cctgagacctgaactatagaccatcattttaatcagaccaattgcagctggaacaagcttctctttggggtcacaatgaccacttcaggcaggggaaatttaggcctcatccccaggagtactgctttccagaagcaggaggggcgcctgactgtgaagcaggagccagcgaaccagagctgggggcagggcagcagtctccaaaagaaccatcctcctgtctgcgaaatcttccggctacacttcagacaattatgttaccacgagatgtctgggccacaggaagcgttgagccggctccgggagctctgccactggtggcttatgccagaggtgcacaccaaggagcagatcctggagctgctggtgctcgagcagttcctgagcatcctccctggggagctccgtacctgggtgcagctgcatcaccctgagagtggtgaggaggctgtggctgtggtggaggatttccagagacacctcagtggaccagaggaggtnnnaggtttcagccccagcacagaaagagaaaatgcatttggaggacacagcagctctgggtgcaacaaaggaatcccctcctacgtcacccctcagtgggggctcagcccctggagcccaccaggcgcctccttatgacccagggacacatcacctccccaatggggacttcnnnnnnnnnnnnnnnnnnnnnnnnnnnnnnnnnnnnnnnnnnnnnnnnnnnnnnnnnnnnnnnnnnnnnnnnnnnnnnnnnnnnnnnnnnnnnnnnnnnnnnnnnnnnnnnnnnnnnnnnnnnnnnnnnnnnnnnnnnnnnnnnnnnnnnnnnnnnnnnnnnnnnnnnnnnnnnnnnnnnnnnnnnnnnnnnnnnnnnnnnnnnnnnnnnnnnnnnnngcaggtgagaacatgatgaagggttcagagttgactccaaagcaggaaatttttaaaggatcagagtcatctaacaagacatcagggggactctttgggatggttcctgggggagcagagactggagatgtttgtgaagatacttccaaagagttagaagcacaaacctcagatgaagaagggagcaagctacaaaatgctttcttggaaataacagatgaagataacaaaaaatccacaaaagacagatatgacaaatataaggaagttggggaacatccacatctgtcctccagtcctgctgaacatgaaggagttttaaagggacagaaatcctatcgatgtgatgaatgtggcaaaactttcaatcggagttctcaccttattggccatcagagaatccacactggagagaaaccctatgagtgtaatgagtgtgggaagaccttcaggcaaacctcccagctcattgttcatctcagaacccacacaggggaaaaaccctatgaatgcagtgagtgtggaaaggcgtataggcacagctcccatctcattcaacatcagagactccataatggggagaaaccctataaatgtaatgaatgtgcaaaagcctttactcagagttcccgactcattgaccaccagagaacccatactggggagaaaccttatgaatgcaatgagtgtggagaggcattcattcgaagtaaaagtcttgttcgacatcaggtcctgcacactggtaagaaaccttacaaatgtaatgagtgtgggagagctttctgttccaatagaaatctcattgaccatcagagaacccacactggagagaagccttatgagtgtagtgaatgtggcaaagccttcagtcggagtaaatgtcttattcgacatcagagcctccacactggcgaaaagccgtacaaatgtagtgaatgtgggaaagccttcaatcagaactcgcaactcgttgagcatgagcgaattcatactggagaaaaaccttttgaatgtagcgagtgtggtaaggcattcggtctgagtaaatgtcttattcggcaccagagacttcacactggtgaaaagccctataaatgcaatgagtgtggaaaatccttcaatcaaaactcacatcttattatacaccagagaattcacactggtgagaaaccctatgaatgtcatgagtgtgggaaggtcttcagttatagctccagccttatggtacatcagagaacccatactggggaaaaaccctataaatgcaatgattgtgggaaagcttttagtgacagctcacagcttattgtgcaccagagagtccacactggagagaaaccttatgaatgtagtgaatgtgggaaagcctttagtcagcgttc

SEQ ID NO: 27148 - DNA, 311 bp, Macaca Mulatta
  misc_feature (1)...(311): n = A,T,C or G
ggactctctttctatggatgttttggcccagctttaactcggtcattgctgaacctggagacaaacagtccagggccattgtaaacacatacttctctctcgttgcctgtgtggtcacagcctttgccttctccagcctagtggagcgccgaggcaagctcaacatggtnnggttcacattcagaatgccacccttgctggaggagttgccgtgggcacttgtgcggatatggcaattcacccattcggttctatgacccttgggagcattgcaggagcggtctctgtgattggatacaagttcctgactg

SEQ ID NO: 27149 - DNA, 1441 bp, Macaca Mulatta
  misc_feature (1)...(1441): n = A,T,C or G
aggtggcagcagaactctcaagagatgccttggaatctgagaatgcaaagccccaaacagagaacgtccagnnnnnnnnnnnnnnnnnnnnnnnnnnnnnnnnnnnnnnnnnnnnnnnnnnnnnnnnnnnnnnnnnnnnnnnnnnnnnnnnnnnnnnnnnnnnnnnnnnnnnnnnnnnnnnnnnnnnnnnnnnnnnnnnnnnnnnnnnnnnnnnnnnnnnnnnnnnnnnnnnnnnnnnnnnnnnnnnnnnnnnnnnnnnnnnnnnnnnnnnnnnnnnnnnnnnnnnnnnnnnnnnnnnnnnnnnnnnnnnnnnnnnnnnnnnnnnnnnnnnnnnnnnnnnnnnnnnnnnnnnnnnnnnnnnnnnnnnnnnnnnnnnnnnnnnnnnnnnnnnnnnnnnnnnnnnnnnnnnnnnnnnnnnnnnnnnnnnnnnnnnnnnnnnnnnnnnnnnnnnnnnnnnnnnnnnnnnnnnnnnnnnnnnnnnnnnnnnnnnnnnnnnnnnnnnnnnnnnnnnnnnnnnnnnnnnnnnnnnnnnnnnnnnnnnnnnnnnnnnnnnnnnnnnnnnnnnnnnnnnnnnnnnnnnnnnnnnnnnnnnnnnnnnnnnnnnnnnnnnnnnnnnnnnnnnnnnnnnnnnnnnnnnnnnnnnnnnnnnnnnnnnnnnnnnnnnnnnnnnnnnnnnnnnnnnnnnnnnnnnnnnnnnnnnnnnnnnnnnnnnnnnnnnnnnnnnnnnnnnnnnnnnnnnnnnnnnnnnnnnnnnnnnnnnnnnnnnnnnnnnnnnnnnnnnnnnnnnnnnnnnnnnnnnnnnnnnnnnnnnnnnnnnnnnnnnnnnnnnnnnnnnnnnnnnnnnnnnnnnnnnnnnnnnnnnnnnnnnnnnnnnnnnnnnnnnnnnnnnnnnnnnnnnnnnnnnnnnnnnnnnnnnnnnnnnnnnnnnnnnnnnnnnnnnnnnnnnnnnnnnnnnnnnnnnnnnnnnntgtgttgctcctctcactccatgtgtctaagccatgtcttttacatcatgtcctttgacctgttggcccccagggtctggttggttatgtgagttgaatcaagaggctctaggccagatgtttacataattttaacctatatgattttatttttaactttgtatttctccctagaaatctcaataagacaattgtagcatcagacaatgttaagaagaacgatccttggagatcccataatcccactacccttgtttggctcagagaggataatttacctaatgatacattaaagttagtggcaaaacttaatgtggagcctgatttcctactgacttccaatttagtgctcccccagtatgctacatagaaagctctctgcaatatactaaatgtatactaaatgtatatatttaataatgtcatgtataaaatatgaataaaatatccacataggaaattaacacacatat

SEQ ID NO: 27150 - DNA, 722 bp, Macaca Mulatta
  misc_feature (1)...(722): n = A,T,C or G
ggggggtcagtggtataaagggggtatatgttgcgaacaaatgttttaataacagttggctgtaatcactcctcgccgtgtctggcactgaaaannnnnnnnnnnnnnnnnnactactgaataaaagtgacaaagaatggagaatctggnnnnnnnnnnnnnnnnnncctacctcttgtagccaatattttgtgtcatacctttgggcacagtgaaacaaaatgggttttcattgtttgattggtatttttgttaattatttttaacaagtgttcttttacatgcaggaggagaggtattggttctctatgaacatgttttgaatatatattggttttattaaggatttcacaatctataaatgctacgagttgttttttttctatttaccgtcatcatgagggtattggatacgttgtatctctatttaactcattatctgttaatgaaattgttgtaaatgggaaccaaatttgtagaacttaatttctactttttacagtgctgaatttcatttttgccttactagtcaaagacttatacaacatttttaacaagttagaactttttttgtcattcagtcatataaaatagcagaaaactaacatcaagtgacgacaatgcactaaatactttttttgtattttactgctatcaaatcagaatgaaatatactttaccatagatattttttctttcaatttttgggtttttccaaaagc

SEQ ID NO: 27151 - DNA, 1246 bp, Macaca Mulatta
agttttttgagcttatttccaaagctcagagcaacagagcagatgaccaacgtgggctgctaaggaaggaagacctggtgttgccagagttcctccgtttacctcctggttccacagaactcaccctccccactgcagctgccatggccaagggctttagcaagagaagcgccacaggcaacggccgggagagtgcctcccagcccagcgagcagtgggagccagcccaggagagcagcgacagcccatccaccagcccgggctcagtccccagcccccctgggcctcccgggacgacccccaccgggcagaagtctcccagcgggcccttctataccccccagtctcccgtctccctcgcgcaggagggcaccacacagatctggaagaggcagtctcgggaagtggaggccgggggcatccagacggtggaggatgagcacgtggccgagctgaccctgatgggggagggggacatcagcagccccaacagcaccttgctgccgccaccctccggcccccaggacgtgccaggaccttccagaccaggtacctccaggttctgatccctctaccttggccccgtcagcgtggtctgctcagcttccagtcagaaggaccgcgggcccccggctaccactgtttgctggtggtctctgtggcccctcctcacctgctgattggggtcttccttggccctcttggaaaggaggagctcgtgtggccccaggccggtgtctgtcaggacggtccccccgaggcgctccaggcaggcatcctggtgtcctgagaggctcttgcaggaacgatgcatggcggtgcccgcagccaggtctgggagcaccctgggcaaggcctgggggtttctgaaaatggaggcattcctttccaaatctggacagctaccatttttagtgtttctgtctcaagactggaaaacaatagcatttgtcttgagtgaggaagtgaagccctccgtgttcatagcaggagagggctccgagacacaggcccgtcctcgggagagccttgagagcgcagctcggacgcaccggcacccccatagcaggtggtgtgggtgctccggagcggaggtgacatcagctccctgactgcgcgtgtcacaggcattgctccaaggaagcaggggtttcagtgcgtgtgaagtgaacaggatggcctggcaggcagcagggatatttccatgagccacaaataccagaaactgaggcgaggctcccagcag

SEQ ID NO: 27152 - DNA, 672 bp, Macaca Mulatta
ccaaagctcactggcctctcaaatttccttgagacttgttaaactttattggtgaaaagtttggcacggagaatgtcaaaataattcaggattcagacaaggtaaatgccaaagagcttgatccaaaatatgctcatatacaagttacttacgtgaagccttactttgatgacaaagaactcacagaaagaaagaccgagtttgaaagaaatcataatatcagcagatttgttttcgaggccccttacactttatcaggcaaaaaacagggctgtatagaagaacagtgcaaacgccgtacaatcttgacaacttcaaactcgtttccctacgtgaagaagaggattcctattaactgtgaacagcagattaatttaaaaccaattgatgttgccactgatgaaataaaagacaaaactgcagagctgcaaaagctttgctcctctgctgacgtggacatgattcagctccaacttaaattgcaaggctgtgtttctgtgcaggtcaatgctggtccattagcatatgcaagagctttcttaaatgacagccaagctagcaagtatccacctaagaaagtgagtgagttgaaagacatgtttaggaaatttatacaagcatgcagcattgcacttgaactaaatgagcggctaattaaagaagatcaagttg

SEQ ID NO: 27153 - DNA, 2034 bp, Macaca Mulatta
  misc_feature (1)...(2034): n = A,T,C or G
gagggacctggaacgcatggagaacactctattctgccgccaatacctggtgttccatgacggggactctgtggtgtttgccggacctgcaggcaacagtgtggagacccgggggganactgctgagcagagagtctccttcaggcagcatgaaagctgtgctgcgcaaggctggaggcacgggccctggggaagagaagcagttcctggaggtnaggtctgggagaagaaccggaagctcaagagtttcaacctatcagtgctggagaaacatgggcctgtttatgaggatgnnnnnnnnnnnnnnnnnnnnnnnnnnnnnnnnnnnnnnnnnnnnnnnnnnnnnnnnnnnnnnnnnnnnnnnnnnnnnnnnnnnnnnnnnnnnnnnnnnnnnnnnnnnnnnnnnnnnnnnnnnnnnnnnnnnnnnnnnnnnnnnnnnnnnnnnnnnnnnnnnnnnnnnnnnnnnnnnnnnnnnnnnnnnnnnnnnnnnnnnnnnnnnnnnnnnnnnnnnnnnnnnnnnnnnnnnnnnnnnnnnnnnnnnnnnnnnnnnnnnnnnnnnnnnnnnnnnnnnnnnnnnnnnnnnnnnnnnnnnnnnnnnnnnnnnnnnnnnnnnnnnnnnnnnnnnnnnnnnnnnnnnnnnnnnnnnnnnnnnnnnnnnnnnnnnnnnnnnnnnnnnnnnnnnnnnnnnnnnnnnnnnnnnnnnnnnnnnnnnnnnnnnnnnnnnnnnnnnnnnnnnnnnnnnnnnnnnnnnnnnnnnnnnnnnnnnnnnnnnnnnnnnnnnnnnnnnnnnnnnnnnnnnnnnnnnnnnnnnnnnnnnnnnnnnnnnnnnnnnnnnnnnnnnnnnnnnnnnnnnnnnnnnnnnnnnnnnnnnnnnnnnnnnnnnnnnnnnnnnnnnnnnnnnnnnnnnnnnnnnnnnnnnnnnnnnnnnnnnnnnnnnnnnnnnnnnnnnnnnnnnnnnnnnnnnnnnnnnnnnnnnnnnnnnnnnnnnnnnnnnnnnnnnnnnnnnaggacctgtttgctgtggacacccaagtgggcactgtgacctccctcacagctggnnnnnnnnnnnnnnnnnnnnnnnnnnnnnnnnnnnnnnnnnnnnnnnnnnnnnnnnnnnnnnnnnnnnnnnnnnnnnnnnnnnnnnnnnnnnnnnnnnnnnnnnnnnnnnnnnnnnnnnnnnnnnnnnnnnnnnnnnnnnnnnnnnnnnnnnnnnnnnnnnnnnnnnnnnnnnnnnnnnnnnnnnnnnnnnnnnnnnnnnnnnnnnnnnnnnnnnnnnnnnnnnnnnnnnnnnnnnnnnnnnnnnnnnnnnnnnnnnnnnnnnnnnnnnnnnnnnnnnnnnnnnnnnnnnnnnnnnnnnnnnnnnnnnnnnnnnnnnnnnnnnnnnnnnnnnnnnnnnnnnnnnnnnnnnnnnnnnnnnnnnnnnnnnnnnnnnnnnnnnnnnnnnnnnnagtgaactatcgtggctccacgggctttggccaggacagcatcctctccatcccaggcaatgtgggccaccaggatgtgaaggatgtccnnnnnnnnnnnnnnnnnnnnnnnnnnnnnnnnnnnnnnnnnnnnnnnnnnnnnnnnnnnnnnnnnnnnnnnnnnnnnnnnnnnnnnnnnnnnnnnnnnnnnnnnnnnnnnnnnnnnnnnnnnnnnnnnnnnnnnnnnnnnnnnnnnnnnnnnnnnnnnnnnnnnnnnnnnnnnnnnnnnnnnnnnnnnnnnnnnnnnnnnnnnnnnnnnnnnnnnnnnnnnnnnnnnnnnnnnnnnnnnnnnnnnnnnnnnnnnnnnnnnnnnnnnnnnnnnnnnnnnnnnnnnnnnnnnnnnnnnnnnnnnnnnnnnnnnnnnnnnnnnnnnnnnnnnnnnnnnnnnnnnnnnnnnnnnnnnnnnnnnnnnnnnnnnnnnnnnnnnnnnnnnnnnnnnnnnnnnnnnnnnggctcgtgctctatcccaaaagcaccctcgcattatcagaggtggaggtggagtcagacagcttcatgaattctttgctctggctacgcacac

SEQ ID NO: 27154 - DNA, 1585 bp, Macaca Mulatta
  misc_feature (1)...(1585): n = A,T,C or G
caggaagaacggctgaagctcccaattctctctgaagaacaagtgatcatggaggctgtggccgagcaccccattgtcatcgtgtgtggtgagactggcagcgggaagaccacacaggtgcctcagtttctctatgaagcaggctacagcagnnnnnnnnnnnnnnnnnnnnnnnnnnnnnnnnnnnnnnnnnnnnnnnnnnnnnnnnnnnnnnnnnnnnnnnnnnnnnnnnnnnnnnnnnnnnnnnnnnnnnnnnnnnnnnnnnnnnnnnnnnnnnnnnnnnnnnnnnnnnnnnnnnnnnnnnnnnnnnnnnnnnnnnnnnnnnnnnnnnnnnnnnnnnnnnnnnnnnnnnnnnnnnnnnnnnnnnnnnnnnnnnnnnnnnnnnnnnnnnnnnnnnnnnnnnnnnnnnnnnnnnnnnnnnnnnnnnnnnnnnnnnnnnnnnnnnnnnnnnnnnnnnnnnnnnnnnnnnnnnnnnnnnnnnnnnnnnnnnnnnnnnnnnnnnnnnnnnnnnnnnnnnnnnnnnnnnnnnnnnnnnnnnnnnnnnnnnnnnnnnnnnnnnnnnnnnnnnnnnnnnnnnnnnnnnnnnnnnnnnnnnnnnnnnnnnnnnnnnnnnnnnnnnnnnnnnnnnnnnnnnnnnnnnnnnnnnnnnnnnnnnnnnnnnnnnnnnnnnnnnnnnnnnnnnnnnnnnnnnnnnnnnnnnnnnnnnnnnnnnnnnnnnnnnnnnnnnnnnnnnnnnnnnnnnnnnnnnnnnnnnnnnnnnnnnnnnnnnnnnnnnnnnnnnnnnnnnnnnnnnnnnnnnnnnnnnnnnnnnnnnnnnnnnnnnnnnnnnnnnnnnnnnnnnnnnnnnnnnnnnnnnnnnnnnnnnnnnnnnnnnnnnnnnnnnnnnnnnnnnnnnnnnnnnnnnnnnnnnnnnnnnnnnnnnnnnnnnnnnnnnnnnnnnnnnnnnnnnnnnnnnnnnnnnnnnnnnnnnnnnnnnnnnnnnnnnnnnnnnnnnnnnnnnnnnnnnnnnnnnnnnnnnnnnnnnnnnnnnnnnnnnnnnnnnnnnnnnnnnnnnnnnnnnnnnnnnnnnnnnnnnnnnnnnnnnnnnnnnnnnnnnnnnnnnnnnnnnnnnnnnnnnnnnnnnnnnnnnnnnnnnnnnnnnnnnnnnnnnnnnnnnnnnnnnnnnnnnnnnnnnnnnnnnnnnnnnnnnnnnnnnnnnnnnnnnnnnnnnnnnnnnnnnnnnnnnnnnnnnnnnnnnnnnnnnnnnnnnnnnnnnnnnnnnnnnnnnnnnnnnnnnnnnnnnnnnnnnnnnnnnnnnnnnnnnnnnnnnnnnnnnnnnnnnnnnnnnnnnnnnnnnnnnnnnnnnnnnnnnnnnnnnnnnnnnnnnnnnnnnnnnnnnnnnnnnnnnnnnnnnnnnnnnnnnnnnnnnnnnnnnnnnnnnaggtcatcaacttccccttcccgacgcccccctccgtggaggcccttcttgccgccgaggagctgttgatcgcactgggtgccctgcaaccgccccagaaagcagaaaggngggtgaagcaactggcagaagaaccgggctgagctgccccatcactgtgctggg

SEQ ID NO: 27155 - DNA, 944 bp, Macaca Mulatta
  misc_feature (1)...(944): n = A,T,C or G
attcatttacgagatagcaagaaggcatcccttcctgtatgcaccaacaattcttcttttggctgctcgctatgacaaaataattccatcttgctgcaaagctgaaaatgcagttgaatgcttccaaacaaagnnnnnnnnnnnnnnnnnnnnnnnnnnnnnnnnnnnnnnnnnnnnnnnnnnnnnnnnnnnnnnnnnnnnnnnnnnnnnnnnnnnnnnnnnnnnnnnnnnnnnnnnnnnnnnnnnnnnnnnnnnnnnnnnnnnnnnnnnnnnnnnnnnnnnnnnnnnnnnnnnnnnnnnnnnnnnnnnnnnnnnnnnnnnnnnnnnnnnnnnnnnnnnnnnnnnnnnnnnnnnnnnnnnnnnnnnnnnnnnnnnnnnnnnnnnnnnnnnnnnnnnnnnnnnnnnnnnnnnnnnnnnnnnnnnnnnnnnnnnnnnnnnnnnnnnnnnnnnnnnnnnnnnnnnnnnnnnnnnnnnnnnnnnnnnnnnnnnnnnnnnnnnnnnnnnnnnnnnnnnnnnnnnnnnnnnnnnnnnnnnnnnnnnnnnnnnnnnnnnnnnnnnnnnnnnnnnnnnnnnnnnnnnnnnnnnnnnnnnnnnnnnnnnnnnnnnnnnnnnnnnnctcagtaattctaagagttgctaaaggataccacgatttattggagaagtgtttccagacggaaaaccctcttcattgccaagagaaaggngaagaagaattacagaaatacatccaggagagccaagcattggcaaagcgaagctgcggcctcttccannnnnnnnnnnnnnnnnnnnnnnnnnnnnnntttctcgttgcttacacaaagaaagcccctcagctgacctcatcggagctgatggccatcaccagaaaaatggcagccacagcagccacttgttgccaactcagtgaggacaaactattggcctgtggtgagggagcg

SEQ ID NO: 27156 - DNA, 198 bp, Macaca Mulatta
atgaaagaaacaatcatgaaccaggaaaaactcgccaaactgcaggcaaaagtgcacattggtggaactgctcacagaaagaaggtagttcacggaacagccacagcaaataataaaaaacgtcagttctccttaaagaagttagaaatctctagcattgaagaggtgaatatgtttacgaatcaaggaacagcgatc

SEQ ID NO: 27157 - DNA, 1804 bp, Macaca Mulatta
  misc_feature (1)...(1804): n = A,T,C or G
tccagcaccgggctgcgcctcgcggtggcccgcgagctgctcctggctgcgctggaggaactgagccaagagcagctgaagcgcttccgccacaagctgcgcgacgtgggcccggaccgacgcagcatcccgtgggggcggctggagcgcgcggacgccgtggacctcgcggagcagctggcccagttctatggcccggagcctgcgctggaggtggcccgcaagaccctcaagaaggcggacgcgcgcgacgtggcggcgcagctcaaggagcagcgactgcnnnnnnnnnnnnnnnnnnnnnnnnnnnnnnnnnnnnnnnnnnnnnnnnnnnnnnnnnnnnnnnnnnnnnnnnnnnnnnnnnnnnnnnnnnnnnnnnnnnnnnnnnnnnnnnnnnnnnnnnnnnnnnnnnnnnnnnnnnnnnnnnnnnnnnnnnnnnnnnnnnnnnnnnnnnnnnnnnnnnnnnnnnnnnnnnnnnnnnnnnnnnnnnnnnnnnnnnnnnnnnnnnnnnnnnnnnnnnnnnnnnnnnnnnnnnnnnnnnnnnnnnnnnnnnnnnnnnnnnnnnnnnnnnnnnnnnnnnnnnnnnnnnnnnnnnnnnnnnnnnnnnnnnnnnnnnnnnnnnnnnnnnnnnnnnnnnnnnnnnnnnnnnnnnnnnnnnnnnnnnnnnnnnnnnnnnnnnnnnnnnnnnnnnnnnnnnnnnnnnnnnnnnnnnnnnnnnnnnnnnnnnnnnnnnnnnnnnnnnnnnnnnnnnnnnnnnnnnnnnnnnnnnnnnnnnnnnnnnnnnnnnnnnnnnnnnnnnnnnnnnnnnnnnnnnnnnnnnnnnnnnnnnnnnnnnnnnnnnnnnnnnnnnnnnnnnnnnnnnnnnnnnnnnnnnnnnnnnnnnnnnnnnnnnnnnnnnnnnnnnnnnnnnnnnnnnnnnnnnnnnnnnnnnnnnnnnnnnnnnnnnnnnnnnnnnnnnnnnnnnnnnnnnnnnnnnnnnnnnnnnnnnnnnnnnnnnnnnnnnnnnnnnnnnnnnnnnnnnnnnnnnnnnnnnnnnnnnnnnnnnnnnnnnnnnnnnnnnnnnnnnnngagaggagggccgagcgcgcctaccgcttcgtgaaggagaacgaaacgctgttcgcgctgtgcttcgtgcccttcgtgtgctggatcgtgtgcaccgtgctgcgccagcagctggagctcggccgggacctgtcgcgcacgtccaagaccaccacgtccgtgtacctgcttttcatcgccagcgtgctgagctcggctccggtagccgacgggccccgggtgcagggcgacctgcgcaatctgtgccgcctggcccgcgagggcgtcctcggacgcagggcgcagtttgccgagaagcaactggagcaactggagcttcgtggctccaaagtccagacgctgtttctcagcaaaaaggagctgcctggcgtgctggagacggaggtcacctaccagttcatcgaccagagcttccaggagttcctcgcggcactgtcctacctgctggaggacgagggggtgcccaggaccgcggctggcggcgttgggacactcctgcgtggggacgcccagccgcacagccacttggtgctcaccacgcgcttcctcttcggactgctgagcgcggagcggatgcgcgacatcgagcgccacttcggctgcgtggtctcagagcgtgtgaagcaggaggccctgcggtgggtgcagggacaggggcagggctgccccggagtggcaccagaggtgaccgaggagaccaaagggctcgaggacacggaagagccagaggaggagg

SEQ ID NO: 27158 - DNA, 1841 bp, Macaca Mulatta
  misc_feature (1)...(1841): n = A,T,C or G
aggcaaaaagccctcccacatttgaggggagtcatgagccgtttcctgaatgtgttaagaagttggctggttatggtgtccatcatagccatggggaacacgctgcagagcttccgagaccacacctttctctatgaaaagctgtacactggcaagccaaaccttnnnnnnnnnnnnnnnnnnnnnnnnnnnnnnnnnnnnnnnnnnnnnnnnnnnnnnnnnnnnnnnnnnnnnnnnnnnnnnnnnnnnnnnnnnnctctatcacatcacactctggaccttcctcctcgccctggggcatttcctctctgagttgtttgtctatggaactgcagctcccacaattggtgtcctggcgcctctgatggtggcaagtngtttctccatcctgggtatgctagtcgggctccggtacctagaagtagaaccagtatccagacagaagaagagaaactgaggccagcattaccacctccgggactttattgtcttccgccttggccatcttcttccttcatcatctctcctctttaatttcttcttttctgttccatcgtcagcccctttattcacttttagcctctttnnnnnnnnnnnaaaatttaaagatatgcatacagaaaagtatataacatgtatgtacaatttaaagaataatcttaaagtgaatactatgtaactccatccaagtcaagaaattgccagctcctcggaaacccactgtgtctccttcccccacctgcaacctctttccaggattcccatttccagccttcccctttttcccttttattttcatgccttgatttgacttgtgtggtgggaacatgtgaactatgaaacttaaacctgctgcccacccagagcagctgtgaccaagggctgcctcaagggaaagtccacgcaggttgggctcctcnnnnnnnnnnnnnnnnnnnnnnnnnnnnnnnnnnnnnnnnnnnnnnnnnnnnnnnnnnnnnnnnnnnnnnnnnnnnnnnnnnnnnnnnnnnnnnnnnnnnnnnnnnnnnnnnnnnnnnnnnnnnnnnnnnnnnnnnnnnnnnnnnnnnnnnnnnnnnnnnnnnnnnnnnnnnnnnnnnnnnnnnnnnnnnnnnnnnnnnnnnnnnnnnnnnnnnnnnnnnnnnnnnnnnnnnnnnnnnnnnnnnnnnnnnnnnnnnnnnnnnnnnnnnnnnnnnnnnnnnnnnnnnnattgaatacaccatagtgagtaggacagctcaagacacaggtcagcctggcagcctccagctccttattgtcatttgctcactcctcttgtattcttgaagtcaaatcttttttcgcaccttcaagattctacgttcacaactaaacactaagtgccctttcttgtttcctcctaaagaagaaacagattcttgagagagcagagacaaaaaaatagaactaggcagcgtagatgaaacaactgcatgacatgggaagaagacagctaaaccccgaggagaatgcactggaatggacagttgctcttataccctacccagagggcctcccccagctggaccctcatacgcagtgtgtgtatccgaaaggccatcgctatttcagcaaatatttgttgggtacttctccatgccagacatttgggaaagagaagtgaacgacacaagcaatgcccctcccctgtgggccttacattgtagtcaaggtaacagaatcaataagccaacacatgaataaagaactacaaacagtgataagaactctgacaaacgcaaggtattttggtcaagaaggaatgtagggtgggcattggggaacataaattatcatcagaaagtcctccctggggagatggg

SEQ ID NO: 27159 - DNA, 561 bp, Macaca Mulatta
aagagcgggagcctcgcccacagtcggtggctctgactaagcctgggctgcctctccgctgtgctccctggactggcttcccccgcatccatgtgagagactggagtatgattctcagtgggaggacaaacaaaagtagtgattgtgtccaccccatcctgccctcagtccagatctgttttcaacttgaggattcacctgccttgtctttgctaaaacaccttcagcctgtggtcaggggaaactgggaacaggtgctgggagacccaggacattgcaagttgcttctctggctggcactcagaggtacgtgaaccctctgccaaccccaggaagggaaaggagggtgcctggtggtgggctgaagctccagccagcagacaggggcagaaggaccaggcctggtccagtgggggcccaggatgtttttcttggcaagtcctcatactttccacatagctgtttcttctgagataagaatgatcatctccactgtatctctaaggaatcggcttcctgagataacacagtaacccagaatgacaaagctgttccctcctc

SEQ ID NO: 27160 - DNA, 907 bp, Macaca Mulatta
tgcagcggctgctctggctgcggggccgtggccgcctgcgccacgtcaacctagggctctgctccctggtgtacgaggcgcccttcgacgcccaggccagcctctaccaggcgcgctgccgctacctgcagccccgctggaccgacttccccggccgggtcctggacgtgggcttcgtgggtcgctggtgggtgctgggggcccggatgcgcgactgcgacatcaacgacgacgaattcctgcacctgccggcgcatttgcgggtggtcgggccccagcagctgcattccgagaccaacgagcggctcttcgatgagaagtacaagcctgtcgtgctcaccgacgatcaggtggaccaggcgctgtgggaggagcaggtcttgcagaaggaaaaaaaggacaggctcgccctgagccaggcccactcgctggtgcaggcggaggccccgagatgaaacccggaggcccccgagtcctggcaaactgcttgcctggggtagtgcagctgtgagtgtgcctcacctgcagaacaactgagacagatgatgtgcaaagtgttttctcactggatttgcgcaagtttggggagcctttctgccccccgtctttgttctttattagctgaagctaattccgagccaccttggtccaggagttgggacagcagaacgacttgacacatgttcatcactggcagagctggtcatgagccttttatataagcctttttcattgggcctcagaggccctccttaaggaggtaccacagtggtcaggtgacttgcaaactcttctaagaccacttagattctctttttaaagtttggggttgtggcctgggcgtggtgatgcacgtctgtaatcccagcattttccaaattgaggcaagaggatcgcttgaggccag

SEQ ID NO: 27161 - DNA, 464 bp, Macaca Mulatta
  misc_feature (1)...(464): n = A,T,C or G
aggtatggcgctcacagtggatgtggccgggccagcgccctggggcttccgtatcacagggggcagggattaccacacgcccatcatggtgannnnnnnnnnnnnnnnnnnnnnnnnnnnnnnnnnnnnnnnnnnnnnnnnnnnnnnnnnnnnnnnnnnnnnnnnnnnnnnnnnnnnnnnnnnnnnnnnnnnnnnnnnnnnnnnnnnnnnnnnnnnnnnnnnnnnnnnnnnnnnnnnnnnnnnnnnnnnnnnnnnnnnnnnnnnnnnnnnnnnnnnnnnnnnnnnnnnnnnnnnnnnnnnnnnnnnnnnnnnnnncagggctccgtgaggacacacactgagagtcattcctccctaaggtcctcctactccagcccaacctccctcagcccgagggctggcagccccttctcaccaccacccttcagtagccccctcgctggagaggcggccatcagccgcag

SEQ ID NO: 27162 - DNA, 304 bp, Macaca Mulatta
ctgctactcctgtgtcagttggcgtgatggtggtgggctacctggccctagtgcacggcttttcccatctcacccctcaggatctgggcctctgcccctgcctcccatcctgacaaaccactctctctaagagcagagctttaatttcagaagttttagtgtatttacaaaagtccacagctccagctgaaggccccattgttccgtgctcgcccccgccttgggacagttcagcttgctttgtgcttgtccaggcagagggcataggactgccaagtttctattagtgtaacatgattgattt

SEQ ID NO: 27163 - DNA, 96 bp, Macaca Mulatta
aggtgaaggacttaactaagtacttggatcccagtgggctcggcgtgatcagctttgaagacttctaccaagggatcacagccatcagaaacggag

SEQ ID NO: 27164 - DNA, 722 bp, Macaca Mulatta
  misc_feature (1)...(722): n = A,T,C or G
ggggagactgtaaatgtcttctctaaaacccagtctctctgcaccaagtcctgaatacctgtccagcgtgtatgtttgtgtgtcacctagacctttatgtgaccacgtggaaagttccacgcactctcctctcctcagtctcctttccccagcacccccacctcacggcgggccttgcacagaacactgtcggacgagagcatttacagtagccagagggagcactttttcacctccagggcatcacttctggaccaagccctgcccaacgatgtcctcttcagtagcacgtacccttctctccccaagtcactcccattgaggaggccttcttacaccttaggaatgaaatcgctgcatggagagttctcggcctccgacagctccctcactgacatccaggagacccgcaggcagcctatgcccgaccctggcctgatgcccctgcctgacactgctgcggacttggattggtccaacctggtagatgctgccaaagcctacgaggtccagagagcctcgttttttgctgctagtgatgaaaaccatcgccccttgagtgctgcatcccacagtgatcagctggaggaaccagctctggnccagatgaagcctttcagcagcagtaaagatccnntctccactctgggctcttaangtgnacanctggaangtatgctgaaaatgcttcnggaagattnngagaangaanangaagacan

SEQ ID NO: 27165 - DNA, 2408 bp, Macaca Mulatta
  misc_feature (1)...(2408): n = A,T,C or G
gtggtacagccatcatgcaagatggtaacacgatgcgcaacaattacgggtgtgacctggatgcgctgggcacaggtgcacgcattggcatgatgcgaactgccaagggcgatctgcactacttcatcaacggccaggaccaaggcgctgcctgctcgggcctgcctccgggtaaagnagaggtgtatgcagtagtcgatctctatggccagtgtgtccaagtgtccatcaccaatgccaccggccccatggacaacagcctggcaaccagcaacactgccaccgagaagtccttcccactgcactccccagnnnnnnnnnnnnnnnnnnnnnnnnnnnnnnnnnnnnnnnnnnnnnnnnnnnnnnnnnnnnnnnnnnnnnnnnnnnnnnnnnnnnnnnnnnnnnnnnnnnnnnnnnnnnnnnnnnnnnnnnnnnnnnnnnnnnnnnnnnnnnnnnnnnnnnnnnnnnnnnnnnnnnnnnnnnnnnnnnnnnnnnnnnnnnnnnnnnnnnnnnnnnnnnnnnnnnnnnnnnnnnnnnnnnnnnnnnnnnnnnnnnnnnnnnnnnnnnnnnnnnnnnnnnnnnnnnnnnnnnnnnnnnnnnnnnnnnnnnnnnnnnnnnnnnnnnnnnnnnnnnnnnnnnnnnnnnnnnnnnnnnnnnnnnnnnnnnnnnnnnnnnnnnnnnnnnnnnnnnnnnnnnnnnnnnnnnnnnnnnnnnnnnnnnnnnnnnnnnnnnnnnnnnnnnnnnnnnnnnnnnnnnnnnnnnnnnnnnnnnnnnnnnnnnnnnnnnnnnnnnnnnnnnnnnnnnnnnnnnnnnnnnnnnnnnnnnnnnnnnnnnnnnnnnnnnnnnnnnnnnnnnnnnnnnnnnnnnnnnnnnnnnnnnnnnnnnnnnnnnnnnnnnnnnnnnnnnnnnnnnnnnnnnnnnnnnnnnnnnnnnnnnnnnnnnnnnnnnnnnnnnnnnnnnnnnnnnnnnnnnnnnnnnnnnnnnnnnnnnnnnnnnnnnnnnnnnnnnnnnnnnnnnnnnnnnnnnnnnnnnnnnnnnnnnnnnnnnnnnnnnnnnnnnnnnnnnnnnnnnnnnnnnnnnnnnnnnnnnnnnnnnnnnnnnnnnnnnnnnnnnnnnnnnnnnnnnnnnnnnnnnnnnnnnnnnnnnnnnnnnnnnnnnnnnnnnnnnnnnnnnnnnnnnnnnnnnnnnnnnnnnnnnnnnnnnnnnnnnnnnnnnnnnnnnnnnnnnnnnnnnnnnnnnnnnnnnnnnnnnnnnnnnnnnnnnnnnnnnnnnnnnnnnnnnnnnnnnnnnnnnnnnnnnnnnnnnnnnnnnnnnnnnnnnnnnnnnnnnnnnnnnnnnnnnnnnnnnnnnnnnnnnnnnnnnnnnnnntggggtggaccagggggtagctgtaccagatgtgccccagccctgccacgcgcttgtggacctctatgggcagtgtgagcaggtngcaggtgacaatcgtgaaccctgagccaggggctgccagtgggaaaagtgctggaacccaaggggacatggagaaagcagacatggtggacggtnggtatcaaagagagtgtgtgctggggcccaccacccgccgctagtcctctaaagagctgcgagtaccatgccctttgctctcgcttccgagaactcctgctgcttccngaagattatttcatgcctccgccaaagcgaagcctgtgctactgtgagtcttgccggaagctgcgaggagacgaggcccacaggcgcagaggggagcctccccgggaatacgcactgccctttggctggtgcaggttcaacctcagnagagtgaatccccgcctggaggctgggacactaaccaataagtggcacatggcctatcatgggagcaatgttgcagctgtacggagagtgctggaccgaggggagctgggagcaggtactgncaggtactgcttccatcctgagctgccgtcctttgaagggagagcctggggtagggttcgaggagcctggcgagaactgtgcacctcctcgggaggagcagccccctcctgtgctgctttccccctcnnnnnnnnnnnnnnnnnnnnnnnnnnnnnnnnnnnnnnnnnnttccgggaccccaaatcccagcggacgcaccaggctcaggtggcgttccaggtgtgtgtgcgccctggctcctacaccccgggacccccttccgctgcccttggagaacctcctgaccctcacttcagtccagccgaacttgagtgggtcactaaggagaagggggccacactcctctatgccctgctggtacgggtggaatgaggggtgacacacaaatactacaagcacagtcgggcctcgggcccatggactctggcgactgcctccacctcattcccgtgactcgtggcatgcgcaggtgctggagcttg

SEQ ID NO: 27166 - DNA, 1155 bp, Macaca Mulatta
  misc_feature (1)...(1155): n = A,T,C or G
caaacggtgattgccgacatttgccagagaatgggaattgggatggcagaatttttggataagcatgtgacctctgagcaggagtgggacaagtactgccactatgtcgctgggctggtaggaatcggcctttcccgcctcttctcggcttcagagttcgaagaccccttagttggtgaagatacggaacgtgccaactctatgggcctgtttctgcagaaaacaaacatcattcgtgactatctggaagaccagcaagaaggaagagagttttggcctcaagaggtttggagcaggtatgttaagaagttaggggattttgctaagcctgagaatattgacttggccgtgcagtgcctgaatgaacttataaccaatgcactgcaccacatcccagatgtcatcacctacctttcaagactcagaagaccagagtgtgtttaacttctgtgctattccacaggtgatggccattgccactttggctgcctgttacaataaccagcaggtgttcaaaggggcagtgaagattcggaaagggcaagcggtgaccctgatgatggatgccaccaatatgccagctgtcaaagccatcatatatcagtatatggaagagatttatcatagaatccccgaatcagacccatcttctagtaaaacaagggagatcatctccaccatccggacgcagaatcttcccaattgtcagctgatctcccgaagccactactcccccatctacctgtcgtttgtcatgctcttggctgccctgagctggcagtacctgaccacactctcccaggtcacagaagactatgttcagactggagaacactgatcccaaatttgtccatgggtgaagttcaccatcaaatggatttactttttttctttaaggatggatgttggcttctctttatttttttcctcctactttaatccctaaaagaactgtgtggctggggcctttaggaaagtgagatgcagctgagaagaatctaaacatgaaagcaaagggcgcctcaccccagcaacctgtccttgtgggtgatgatcactgtgcttcttgtgactcatggcagagcactctgtgccacagtttaggtgaaatggctgcgtatgtaactgtcatgagatcctatttagnntgtgatc

SEQ ID NO: 27167 - DNA, 74 bp, Macaca Mulatta
cggaatccagaggagaccgaaacccaggagtcgatggaacctctcactgcaaaatctccccgctttctgaggct

SEQ ID NO: 27168 - DNA, 801 bp, Macaca Mulatta
agagcagattttgctataatatctataatattcttggtagttggcatagtggtgattcaagaatctatggagatttttaggaataacaggaagttaaaatatctaggtataggagggggtggattacccgtgggtaaaaatagactggatcatccaggagcagaaataacattgtttctcttttccatctctctgctttagcactcctgtcctcatccctctgagattttgggcacattcaaatctatatcctgggaccctgtaaaggtccatgacatccgctggaactttgaaaagttcctggtggggcctgatggaatccctgtcatgcgctggtcccaccgggctaccgtcagctcagtcaagacagacatcctggcgtacttgaagcaattcaaaaccaaataggaaggtggagttaagggcaggagcaatcctacttctacttctcacctaatgacttgctccccctctccccgcaaaaaaggaatatccatcttctcaccacactctcttcctgcatgggctccacctgagcaaatcacctgcacatactgccagaattcccactctccacaaactagatttatatttggaaggatactgctcttttgcctctcaagagtatgtgggtgaagactgaaaaaaatggaaacctaaaatccctagacctctgttacaggttgaatcattcgtatccaccagagggaaatcatccttccacgacaatggttcagtcggccatcacatcctgaagaagaacattcctagacgttctgacgcttcaatgtctctccaccc

SEQ ID NO: 27169 - DNA, 747 bp, Macaca Mulatta
  misc_feature (1)...(747): n = A,T,C or G
gggggaaatattgccggctgtgtgatatccagttcaacaacctttcaaactttataactcacaagaagttttattgctcatcacatgcagcggaacatgtcaaatgaactaactgaataaacatcagtcacctctggtatcagtgtttagtatgttgttctaaccagtnnnnnnnnnnnnnnnnnnnnnatttgaattacatctgggcaatcaggagataattcattatggctgagttgaagacttgaggtgtaatttcattacagtccattagtaaagtgtattattggtgccannnnnnnnnnnnnnnnnnnnattttaccagcagtattcatagctgtggttatgttattttttatttaaaaactttatattaaagtcatttgtaatgttattgtatagttattgtgtagcacatatggtttgcactgtatagtagcttttaaagaaaatagtcacaaacaatacagaaaatcattttagaaatagcttcaaaagcacttgtgtatcttgattttttcttatatgctgttgcagatatatgtatgtgctaaaatataacttgcaaagatgttctaaatacacatgctataagttcgccttaagatttcaattcttggataatcaggctccgtttgcactttatattttaacagaaaacatctcttagtcactagggctttgcatttgtatgtacctgtatgtttctgtccatttttcttaatccaaaacctgtatgtttaaatg

SEQ ID NO: 27170 - DNA, 447 bp, Macaca Mulatta
  misc_feature (1)...(447): n = A,T,C or G
aaaggcttcacagagggttgatatgtaccattgtatggggcaattttaaggtcagctaatttaataacctgatgtatgaagacatcccagatttccaggaagctgttgaggtcctaggcaatggatgcagcagttggaataaatacaaacatctcacctaagtctccttttcttcatagcatagatactgacatgatagaaagctctcagcttagggaaacagaactaaattttaggttatagaacatggattcagaagtggctggaacaaattggcttattccttactggtaacctactattcttctggtattatccttcaggatttttcactaaagtttatttttcaaaaaatttacttcacatgattctnnnnnnnnnnnnnttgtcagtgttccagatgtatcttagctaaaactagtgaatgccttaacttagatggttttt

SEQ ID NO: 27171 - DNA, 1418 bp, Macaca Mulatta
  misc_feature (1)...(1418): n = A,T,C or G
ggtggatccataaagaacccagccaacccgcagagggaggggaggggctgagctgtgaggagagcggggcccaagaaccatgtctacgcgggagtcctttaacccggaaagttacgaattggacaaaagcttccggctaaccagattcactgaactgaagggcacaggctgcaaagtgccccaagatgtcctgcaaaaattgctggaatctttacaagagaaccacnnnnnnnnnnnnnnnnnnnnnnnnnnnnnnnnnnnnnnnnnnnnnnnnnnnnnnnnnnnnnnnnnnnnnnnnnnnnnnnnnnnnnnnnnnnnnnnnnnnnnnnnnnnnnnnnnnnnnnnnnnnnnnnnnnnnnnnnnnnnnnnnnnnnnnnnnnnnnnnnnnnnnnnnnnnnnnnnnnnnnnnnnnnnnnnnnnnnnnnnnnnnnnnnnnnnnnnnnnnnnnnnnnnnnnnnnnnnnnnnnnnnnnnnnnnnnnnnggaaagggataaagtgatgcctctgattatccaaggttttaaagacgcagctgaggaagcaggaacgtctgtaacgggcggccaaacagtactaaacccctggattgtcctgggaggagttgctaccactgtctgtcagcccaatgaatttatcatnnnnnnnnnnnnnnnnnnnnnnnnnnnnnnnnnnnnnnnnnnnnnnnnnnnnnnnnnnnnnnnnnnnnnnnnnnnnnnnnnnnnnnnnnncctgagaaatggaataagatcaaactagtggtcacccaagaagatgtagagctggcctaccaggaggcaatgatgaacatggcgaggctcaacaggacannnnnnnnnnnnnnnnnnnnnnnnnnnnnnnnnnnnnnnnnnnnnnnnnnnnnnnnnnnnnnnnnnnnnnnnnnnnnnnnnnnnnnnnnnnnnnnnnnnnnnnnnnnnnnnnnnnnnnnnnnnnnnnnnnnnnnnnnnnnnnnnnnnnnnnnnnnnnnnnnnnnnnnnnnnnnnnnnnnnnnnnnnnnnnnnnnnnnnnnnnnnnnnnnnnnnnnnnnnnnnnnnnnnnnnnnnnnnnnnnnnnnnnnnnnnnnnnnnnnnnnnnnnnnnnnnnnnnnnnnnnnnntgaaggccaccaagcatgattattgggattgtagagaagggcaaccacacagccagaatcatagacaaaccctggatcatcaagattgcaccacaagtggccactcaaaatgtgaatcccacacctggggccacctcttaatctagacagaaatagctgtttggttttgtttttaaatagatctatttccgttatcgtcacttcaattaaagactataagcaacaaaaatctcattatatctacacatcgggtgaccttaggtcggtttgtaagtggatacaattaataaaataaaatccattgc

SEQ ID NO: 27172 - DNA, 482 bp, Macaca Mulatta
aggggcaaggaaatctgctgaccccaagagacgctgtgaccatccaacttgggctcataagaacacccatgtgaggcgagaaagaaccagggagggaagcagctttcggaagagctttgggcgggacgcggatgacgggcagcttcccagagctgctccagaaaggacagacgccaagcccacggcttttgcttgtcagatgctcacgaagtgttgtgggcagcggccgggccgcagagagcaccggaagcagtgcgcaatggagctgtccttcatctgcggcacgtgcgggaaggcgctcagctgccacagccggttgctcgctcaccagacggtgcacacggtgaccaaggccttcaagtgccccgagtgcggccagaccttccggtgggcttcaaacctgcagcgtcaccagaataaccacacgcacgagaagcccttctgctgcgaggcatgcgggcaggcgttcagcctgaaggacc

SEQ ID NO: 27173 - DNA, 640 bp, Macaca Mulatta
  misc_feature (1)...(640): n = A,T,C or G
ggccaacgtggaacctgttgtgtcgtcggaggcttcagagccggtgcccagggtgctttctggggacccccagaacctgtnnacgtggacgccttcaatctgctcctggagatgaagctaaagcggcggcgtcagcagcccaacctgccgcgcactgtgacccagctggtggctgaagatgggagcagggtgtacgtggtggggacagcccacttcagcgacgacagcaagagggacgtcgtgaagnagaccatccgggaggtgcagcctgacgtggtggtcgtggagctctgccagtaccgtgtgtccatgctgaagatggatgaaagcacactgctgcgggaggcgcaggagctcagcctggagaagctgcannnnnnnnnnnnnnnnnnnnnnnnnnnnnnnnnnnnnnnnnnnnnnnnnnnnnnnnnnnnnnnnnnnnnnnnnnnnnnnnnnnnnnnnnnnnnnnnnnnnnnnnnnnnnnnnnnnnnnnnnnnnnaggccagcaaggtgcctttctgcaagttccacctgggtgaccggcccatccctgtcaccttcaagagggccatcgctgcgctctccttctggcagaaggtcaggctggcttggggcctgtgcttcctgtcagaccccatca

SEQ ID NO: 27174 - DNA, 903 bp, Macaca Mulatta
atagaagacatgcagtggggtaaaggagtccgagagatacctccctcagtgtgcacactaccatgtaagcctggacagagaaagaagacacagaaaggaactccttgctgttggacctgtgagccttgcgatggttaccagtaccagtttgatgagatgacatgccagcattgtccctatgaccagaggcccaatgaaaatcgaaccggatgccaagatattcccatcatcaaactggagtggcactccccctgggctgtgattcctgtcttcctggcaatgttggggatcattgccaccatctttgttatggccactttcatccgctacaatgacacgcccattgtccgggcatctgggcgggaactcagctatgttcttttgacgggcatctttctttgctacatcatcactttcctgatgattgccaaacctgatgtggcagtgtgttctttccggcgtgttttcttgggcttgggtatgtgcatcagttatgcagccctcttgacgaaaacaaatcggatttatcgcatatttgagcagggcaagaaatcggtaacagctcccagactcataagcccaacatcacaactggcaatcacttccagtttaatatcagttcagcttctaggggttttcatttggtttggtgttgatccacccaacatcatcatagactatgatgaacataagacgatgaaccctgagcaagccagaggagttctcaagtgtgacattacagatctccaaatcatttgctccttgggatatagcattcttctcatggtcacatgtactgtgtatgccatccagactcggggtgtaccagagaattttaatgaagccaagcccattgggatcactatgtacacgacatgtatagtatggcttgccttcattcca

SEQ ID NO: 27175 - DNA, 4253 bp, Macaca Mulatta
  misc_feature (1)...(4253): n = A,T,C or G
gagggcgggagccggctctcgggcggcggcgctgaagtttccttcccgccgcgctctcaccccgggctggtgcccggtgccatgcgggagcgctggggcggcggggcaacatgaagggcggcgacagggcttacacccgaggtccctctttggggtggctctttgctaagtgctgctgttgcttcccgtgcagagnnnnnnnnnnnnnnnnnnnnnnnnnnnnnnnnnnnnnnnnnnnnnnnnnnnnnnnnnnnnnnnnnnnnnnnnnnnnnnnnnnnnnnnnnnnnnnnnnnnnnnnnnnnnnnnnnnnnnnnnnnnnnnnnnnnnnnnnnnnnnnnnnnnnnnnnnnnnnnnnnnnnnnnnnnnnnnnnnnnnnnnnnnnnnnnnnnnnnnnnnnnnnnnnnnnnnnnnnnnnnnnnnnnnnnnnnnnnnnnnnnnnnnnnnnnnnnnnnnnnnnnnnnnnnnnnnnnnnnnnnnnnnnnnnnnnnnnnnnnnnnnnnnnnnnnnnnnnnnnnnnnnnnnnnnnnnnnnnnnnnnnnnnnnnnnnnnnnnnnnnnnnnnnnnnnnnnnnnnnnnnnnnnnngtcctcctctttgctagcagcccggcaggcttccactgaagtacctactgctgcagnnnnnnnnnnnnnnnnnnnnnnnnnnnnnnnnnnnnnnnnnnnnnnnnnnnnnnnnnnnnnnnnnnnnnnnnnnnnnnnnnnnnnnnnnnnnnnnnnnnnnnnnnnnnnnnnnnnnnnnnnnnnnnnnnnnnnnnnnnnnnnnnnnnnnnnnnnnnnnnnnnnnnnnnnnnnnnnnnnnnnnnnnnnnnnnnnnnnnnnnnnnnnnnnnnnnnnnnnnnnnnnnnnnnnnnnnnnnnnnnnnnnnnnnnnnnnnnnnnnnnnnnnnnnnnnnnnnnnnnnnnnnnnnnnnnnnnnnnnnnnnnnnnnnnnnnnnnnnnnnnnnnnnnnnnnnnnnnnnnnnnnnnnnnnnnnnnnnnnnnnnnnnnnnnnnnnnnnnnnnnnnnnnnnnnnnnnnnnnnnnnnnnnnnnnnnnnnnnnnnnnnnnnnnnnnnnnnnnnnnnnnnnnnnnnnnnnnnnnnnnnnnnnnnnnnnnnnnnnnnnnnnnnnnnnnnnnnnnnnnnnnnnnnnnnnnnnnnnnnnnnnnnnnnnnnnnnnnnnnnnnnnnnnnnnnnnnnnnnnnnnnnnnnnnnnnnnnnnnnnnnnnnnnnnnnaggacttcctgagatacagtgagaaggctggtttggagtgctcagatatnnnnnnnnnnnnnnnnnnnnnnnnnnnnnnnnnnnnnnnnnnnnnnnnnnnnnnnnnnnnnnnnnnnnnnnnnnnnnnnnnnnnnnnnnnnnnnnnnnnnnnnnnnnnnnnnnnnnnnnnnnnnnnnnnnnnnnnnnnnnnnnnnnnnnnnnnnnnnnnnnnnnnnnnnnnnnnnnnnnnnnnnnnnnnnnnnnnnnnnnnnnnnnnnnnnnnnnnnnnnnnnnnnnnnnnnnnnnnnnnnnnnnnnnnnnnnnnnnnnnnnnnnnnnnnnnnnnnnnnnnnnnnnnnnnnnnnnnnnnnnnnnnnnnnnnnnnnnnnnnnnnnnnnnnnnnnnnnnnnnnnnnnnnnnnnnnnnnnnnnnnnnnnnnnnnnnnnnnnnnnnnnnnnnnnnnnnnnnnnnnnnnnnnnnnnnnnnnnnnnnnnnnnnnnnnnnnnnnnnnnnnnnnnnnnnnnnnnnnnnnnnnnnnnnnnnnnnnnnnnnnnnnnnnnnnnnnnnnnnnnnnnnnnnnnnnnnnnnnnnnnnnnnnnnnnnnnnnnnnnnnnnnnnnnnnnnnnnnnnnnnnnnnnnnnnnnnnnnnnnnnnnnnnnnnnnnnnnnnnnnnnnnnnnnnnnnnnnnnnnnnnnnnnnnnnnnnnnnnnnnnnnnnnnnnnnnnnnnnnnnnnnnnnnnnnnnnnnnagcagaacgacctgggaggctgcaatgggacctcgtccatggccgtgatcaaagattactacgcactgaaggagaatgaaatctgtgtgagccaaggtgaggtggtccaggtcctcgccgtcaaccagcagaacatgtgtctggtgtaccagcctgccagcgaccattcccccgccgccgagggctgggtcccaggcagcatcctggcgcccctcaccaaagccacagcagcagaaagtagtgacgggagcatcaagnnnnnnnnnnnnnnnnnnnnnnnnnnnnnnnnnnnnnnnnnnnnnnnnnnnnnnnnnnnnnnnnnnnnnnnnnnnnnnnnnnnnnnnnnnnnnnnnnnnnnnnnnnnnnnnnnnnnnnnnnnngagacgaacagttccgaggaatcagagtgtgatgatcttgaccctaatactagcatggagnnnnnnnnnnnnnnnnnnnnnnnnnnnnnnnnnnnnnnnnnnnnnnnnnnnnnnnnnnnnnnnnnctgcttgctgggggacacagtggtactgcagtgcaaagtctgtgggcggccaaagcccaccatcacctggaagggtccagaccagaacatccttgacactgacaacagctcagccacatacaccgtctcctcttgnnnnnnnnnnnnnnnnnnnnnnnnnnnnnnnnnnnnnnnnnnnnnnnnnnnnnnnnnnnnnnnnnnnnnnnnnnnnnnnnnnnnnnnnnnnnnnnnnnnnnnnnnnnnnnnnnnnnnnnnnnnnnnnnnnnnnnnnnnnnnnnnnnnnnnnnnnnnnnnnnnnnnnnnnnnnnnnnnnnnnnnnnnnnnnnnnnnnnnnnnnnnnnnnnnnnnnnnnnnnnnnnnnnnnnnnnnnnnnnnnnnnnnnnnnnnnnnnnnnnnnnnnnnnnnnnnnnnnnnnnnnnnnnnnnnnnnnnnnnnnnnnnnnnnnnnnnnnnnnnnnnnnnnnnnnnnnnnnnnnnnnnnnnnnnnnnnnnnnnnnnnnnnnnnnnnnnnnnnnnnnnnnnnnnnnnnnnnnnnnnnnnnnnnnnnnnnnnnnnnnnnnnnnnnnnnnnnnnnnnnnnnnnnnnnnnnnnnnnnnnnnnnnnnnnnnnnnnnnnnnnnnnnnnnnnnnnnnnnnnnnnnnnnnnnnnnnnnnnnnnnnnnnnnnnnnnnnnnnnnnnnnnnnnnnnnnnnnnnnnnnnnnnnnnnnnnnnnnnnnnnnnnnnnnnnnnnnnnnnnnnnnnnnnnnnnnnnnnnnnnnnnnnnnnnnnnnnnnnnnnnnnnnnnnnnnnnnnnnnnnnnnnnnnnnnnnnnnnnnnnnnnnnnnnnnnnnnnnnngatggatgatggccgcctcttagactaccttatgaatcatgatgaactgatggaggaaaaagtagctttctatattcgagacatcatggaggctctgcagtaccttcacaactgcagggttgcacatttggacataaagnagcctgaaaacctgctcattgacctacggattccagtgcctcgagtgaagctcatcgactgggaggatgctgtccagatttcggggtcacttccaccattcaccacctgctggggaaccctgagtttgctgccccagaagtcatccaaggcatccccgtctccctggggacagacatctggagcatcggggttctgacatatgtcatgctgagtggggtctcccccttcttggatgagagcaaagaggagacatgtatcaatgtatgcagggtggatttcagcttcccccatgaatacttctgtggtgtgagcaacgctgccagagatttcatcaatgtgatcttacaggaggactttcggaggcggcccacggcagccacatgcttacagcatccatggctgcagccccataatggcagctactctaagatccccctggacacctcccgcctagcatgcttcatagaacgccgcaaacaccagaatgatgtgcggcctattcccaatgtcaagagctacattgtcaaccgggtgaaccaagggacgtagccatctcccagcccctatggtttcacatagaagtgcagtgtgaaccaaagcaagactgaatgtgattgtaaataattctgttcatcatttcactccgtgcagttctctgaattgagagatgtacctcttaaacctcatcagtggttattcagggtctgagcagcagtaaaagtcaccctaaatccaggggctttccagaaggtcattctgaagaaataaagaggcaaagagtcacagaagtgttcagaagaaggacaaagatgagaac

SEQ ID NO: 27176 - DNA, 124 bp, Macaca Mulatta
aagatgattcaagatgcccaaggataaagaaaagcacatatttccgtgatgaggaagaaacttagtgattaaaatcttgctctagcacagtaataaaaattaagatttgttagtaacaatcttg

SEQ ID NO: 27177 - DNA, 575 bp, Macaca Mulatta
tgagaataatagatattcttgaccttctattcctccaacaagatggcattacactaaacacatgcatatgcttgggtatttgtgggaaatgcggttgaagaatcagactacatctcaatggtcatttcatttattaggtagtcgtttaatttttgtgtgaacttcttgttcattacgcttaatattatgcctcatttggaatctgctgtgaagctatacagcgtggtttcttctggacacaactttataaattcttgttacaaattacaggtttgatcattccggcaaattgtgtgtctcctcttgtaaatctcctatcaacttcagaccagtctcaacagcttgcggtccaacagaaacagctatggcaacagcatcaccctcagagcatcaccaacttgagcaacgcataaagaacagacaggtttcaacatggatggatctgaaatgctgttgaagcatatcatttgcataaaaatcagggacagtttccaaagaattatatatttttttcagtttgtgctctctctagttagtttttttggaagtaaggacaaacctggaatagatagcaa

SEQ ID NO: 27178 - DNA, 162 bp, Macaca Mulatta
atcttgctgtcctcgccttaaattcttcgcctggaagagaattgtcttgagctcagcatgcttccccagagcatcctcagtgattcccagatctgtctgcttgctgtggaaggcaatctttttgaaataaagaaacttcgagaactggaaggctatgataag

SEQ ID NO: 27179 - DNA, 805 bp, Macaca Mulatta
  misc_feature (1)...(805): n = A,T,C or G
gggatggtcatgccttgttagcggaaagaatagagaagtcactagttgaaccaaaagaagatgaaaaaggtggtgatgtcgatgaccctgaaaaccagaactcagccctggttgatactgatgcctcaggaggcttaaccaaagagtccccagatacaaatggaccaaaacaaaaagagaaggaagatgcccaggaagcagaatttcaggaaggaaaagtgcacagtgaatcagataaagctatcacaacccaagcacaggaggaggtacagaaacaagagagagaatctgcaaagtccgaacttacagaatcttaaaacatcatgcagttaaactcattgtctatttggaagaccagaatgtgaagacaagtagtagaagaaaatgaacgctgctgctgagactgaagaccagtatttcagaacttcgagaattggagagcaggcacatcaactgatgtcatttctagagagcccctgacaatcctgaggcttcatcaggagctagagccatttaacatttcctcttcncaagaccaacctactattttcccttgataaccacataaattctgatttacggtcctaaattcttaacctggaactggagttggcaatacctagttctgcttctcaaactggagtatcattctttatgtatttatatgtatgttttaagtaatcctcctcctgtatctattgtatatttttttcctaatgtttaaggaaatgtgcaggatactacatgctttttgtatcacacagtatatgacggggcatgtgccataaccgcacccttgggggac

SEQ ID NO: 27180 - DNA, 765 bp, Macaca Mulatta
  misc_feature (1)...(765): n = A,T,C or G
ggttatatgaaatcctcatgttcttttaaatttcctaactaaattgtgtgttcctatgaatacacacatacacaagagcattttatttcatattggtgaaatctatgttgtttaggatatagataatgacattgtacttatcagaatagtcttttcctctattcaaaatagatgctattggctttnnnnnnnnnnnnnnnnnnnnntttaaacaaggtgtcaccnnnnnnnnnnnnnnnnnnnnnnnnnnnnnnatgcaagcaatcatctcgcctcgatcannnnnnnnnnnnnnnnnnnnnnnngaggacaccatgcccagccacactgttgtttttaaatgtcagttttctttaagaattctcatagtacttttctgcttcagagtttatagcacatccatccatcctttcagtaggcactcatggaaatgtaagtccatgctcaagttctgttctgattagtcttacgatttttcagaacccctttttgctaatccctcttggccattttattaataatgtatttgacagagattgaatcanggaacgtgacatttcagttaactagtattacctgttttgtagaatctctggttggaacatccgactatgaaaagacaagtgctaacaaggtaaattcataattaccgtttggggggaattaattgtaaaagttaacattcccatggcctatttcctttgaattttgccccaagaaagttatccaggacccctttaatttcttgttggccagaaacttaan

SEQ ID NO: 27181 - DNA, 921 bp, Macaca Mulatta
  misc_feature (1)...(921): n = A,T,C or G
ggcatcaggtgctccgaatctctgcagccgatgaggctcaggtgcagaaggtgaaggagctggaggacctggagcatctgcannnnnnnnnnnnnnnnnnnnnnnnnnnnnnnnnnnnnnnnnnnnnnnnnnnnnnnnnnnnnnnnnnnnnnnnnnnnnnnnnnnnnnnnnnnnnnnnnnnnnnnnnnnnnnnnnnnnnnnnnnnnnnnnnnnnnnnnnnnnnnnnnnnnnnnnnnnnnnnnnnnnnnnnnnnnnnnnnnnnnnnnnnnnnnnnnnnnnnnnnnnnnnnnnnnnnnnnnnnnnnnnnnnnnnnnnnnnnnnnnnnnnnnnnnnnnnnnnnnnnnnnnnnnnnnnnnnnnnnnnnnnnnnnnnnnnnnnnnnnnnnnnnnnnnnnnnnnnnnnnnnnnnnnnnnnnnnnnnnnnnnnnnnnnnnnnnnnnnnnnnnnnnnnnnnnnnnnnnnnnnnnnnnnnnnnnnnnnnnnnnnnnnnnnnnnnnnnnnnnnnnnnnnnnnnnnnnnagatcactcaagactatgggcaggatgcagctttcaccgccattctcgacaccatggacatcttcctggagatcgtcaccaaccctgatggctttgccttcacccacagcnnnnnnnnnnnnnnnnnnnnnnnnnnnnnnnnnnnnnnnnnnnnnnnnnnnnnnnnnnnnnnnnnnnnnnnnnnnnnnnnnnnnnnnnnnnnnnnnccggagccagcagcaacccctgctcgcagacttaccatggcaagtttgccaattccaaagtggaggtcaagtccatcgtggactttgtgaaggaccatgggaacatcaaggccttcatctccatccacagctactcccagctcctcctgtatccctatggctacaaaacagaaccggcccctgaccaggatgagctg

SEQ ID NO: 27182 - DNA, 299 bp, Macaca Mulatta
ggactacactttgttatatgaagaggcaaaatattttcagcttcagcccatgttgttggagatggaaagatggaaacaggacagagaaactggtcgcttttcaaggccctgtgagtgcctcgtcgtgcgtgtggccccagacctcggagaaaggatcacactaagcggtgacaaatccttgatagaagaagtatttccagaaatcggcgacgtgatgtgtaactctgtcaatgcacgctggaatcacgactcgacccacgtcatcaggtttccactaaatggctattgtcacctcaact

SEQ ID NO: 27183 - DNA, 313 bp, Macaca Mulatta
ccagagaggggcaggctggtcccctgacaagttgaggcaagtagacgcccaggagccccgggagggggctgcagttgccttccttcctttccccgcagcgctctgcgcccccctcgccccgcctgcgctagcggaggtgatcgccgcggcgatgccggaggagggttccggctgcgcggtgcggcgcaggccctatgcgtgcgtcctgcgggctgctgtggttccattggtcgcgggcttggcgatctgcctcgtggtctgcgtccagcgcctctcacgggctcagcagcagctgccgctcgagtcacttggg

SEQ ID NO: 27184 - DNA, 122 bp, Macaca Mulatta
  misc_feature (1)...(122): n = A,T,C or G
ggacagaacttacaaaaagcgtggtgctccctgaattaatagaactttctagggatgaaggcagcagtgtacgacttgcagcttttgaaactttggttaatctgcttgacatatntgataca

SEQ ID NO: 27185 - DNA, 730 bp, Macaca Mulatta
  misc_feature (1)...(730): n = A,T,C or G
ctcgctcagcagtcctgcgttggggtctgcgccctaggatgcactgagatggtacatcaggataactgctcgtatcagnnnnnnnnnnnnnnnnnnnnnnnnnnnnnnnnnnnnnnnnnnnnnnnnnnnnnnnnnnnnnnnnnnnnnnnnnnnnnnnnnnnnnnnnnnnnnnnnnnnnnnnnnnnnnnnnnnnnnnnnnnnnnnnnnnnnnnnnnnnnnnnnnnnnnnnnnnnnnnnnnnnnnnnnnnnnnnnnnnnnnnnnnnnnnnnnnnnnnnnnnnnnnnnnnnnnnnnnnnnnnnnnnnnnnnnnnnnagcaaacagagttcttcctattctgatagagacactactgaagaggagtctgaatccttggatgacatggacttccttacaaggcaaaagaaattgcaagctgaagccaaaatggcccttgccatggccaaaccaatggccaaaatgcaagtagaagtggagaaacagaacaggaaaaagtctcccgtcgctgatcttnnnnnnnnnnnnnnnnnnnnnnnnnnnnnnnnnnnnnnnnnnnnnnnnnnnnnnnnnnnnnnnnnnnnnnnnnnnnnnnnnnnnnnnnnnnnnnnnnnnnnnnnnnnnnnnnnnnnnnnnnnnnnngcttgaatgaagagttggtccagctgcttctcatccgagatgagctgcacacagagcaggatgccatgctggtggacatcgaagacttgacca

SEQ ID NO: 27186 - DNA, 269 bp, Macaca Mulatta
  misc_feature (1)...(269): n = A,T,C or G
ggtgctggagatgtgcatgaaccactgtggggagaagttccacagtgaggtggccaaatttcgtttcctgaacgagctgatcaaagtgttgtccccaaannnnnnnnnnnnnnnnnnnnnnnnnnnnnnnnnnnnnnnnnnnnnnnnnnnnnnnnnnnnnnnnnnnnnnnnnnnnnnnnnnnnnnnnnnnnnnnnnnnnnnnnnnnnnnnnnnnnnnnnnnggaattataaaacaagaccctaaactaccagtggataaaatcttaccc

SEQ ID NO: 27187 - DNA, 580 bp, Macaca Mulatta
  misc_feature (1)...(580): n = A,T,C or G
tttttttgtttttacaccccgggtttttaaaaaatgggggaaaatttaatttcccctaaaatttttttaatcccctggccccctttttgggggggaaaggggacttggttttaaacggggggttttttcccaatcccccccgcttttgggaaaagcttgccccatttggggccttnnnnnnnnnnnnnnnnnnnnnnnctcgggggttttgataaagagggtttttaaccaggaccatttttgagctttcttagtttttccccgggcacagtatttgaatggcaaagggaggggttcattctttaacagggtacactcccagaggtgataatctggattgtgactgtgcacatttcctctagttcatttctgtagtccctatagaacgatctgtaataaaatagtatactggactgtgcatcaaagggatgtaaaattacagtattccaaaggttgaagttctgctgttttgttataatgcctgatacacatcttgaataaagtcttaacatttttcttttaaaaactatctttgtaatgttgggcttaaaaggaaaaaggaaatatttcttttcaaccc

SEQ ID NO: 27188 - DNA, 264 bp, Macaca Mulatta
agaagactgcatgactttcctctgtaacagaggtaatatatgagacaatcaacaccattccaaaggcctgaaaataattttcagataaagagactccaaggttgactttagtttgtgagttactcatgtgactatttgaggattttgaaaacatcagatttgctgtggtatgggaaaaaggatatgtacttattattttagatctttctgtagtatttacattttttactatgtgtacatttgtacttctatttgacacataag

SEQ ID NO: 27189 - DNA, 4512 bp, Macaca Mulatta
  misc_feature (1)...(4512): n = A,T,C or G
ctttgtttcagaccgagaagatcaatccatcctgtgcannnnnnnnnnnnnnnnnnnnnnnnnnnnnnnnnnnnnnnnnnnnnnnnnnnnnnnnnnnnnnnnnnnnnnnnnnnnnnnnnnnnnnnngctgcccggccttcactgtgcccctgggttccttgcagggtgagctggagcggcagctgctgcaggccaaccccattctggaggccttcgggaacgccaagaccgtgaagaatgacaactcttcccgcttcgnnnnnnnnnnnnnnnnnnnnnnnnnnnnnnnnnnnnnnnnnnnnnnnnnnnnnnnnnnnnnnnnnnnnnnnnnnnnnnnnnnnnnnnnnnnnnnnnnnnnnnnnnnnnnnnnnnnnnnnnnnnnnnnnnnnnnnnnnnnnnnnnnnnnnnnnnnnnnnnnnnnnnnnnnnnnnnnnnnnnnnnnnnnnnnnnnnnnnnnnnnnnnnnnnnnnnnnnnnnnnnnnnnnnnnnnnnnnnnnnnnnnnnnnnnnnnnnnnnnnnnnnnnnnnnnnnnnnnnnnnnnnnnnnnnnnnnnnnnnnnnnnngcctgctgcgggtcatctcaggggttcttcagctcggcaacatcgtcttcaagaaggagcggaacactgaccaggcgtccatgcccgacaacacagnnnnnnnnnnnnnnnnnnnnnnnnnnnnnnnnnnnnnnnnnnnnnnnnnnnnnnnnnnnnnnnnnnnnnnnnnnnnnnnnnnnnnnnnnnnnnnnnnnnnnnnnnnnnnnnnnnnnnnnnnnnnnnnnnnnnnnnnnnnnnnnnnnnnnnnnnnnnnnnnnnnnnnnnnnnnnnnnnnnnnnnnnnnnnnnnnnnnnnnnnnnnnnnnnnnnnnnnnnnnnnnnnnnnnnnnnnnnnnnnnnnnnnnnnnnnnnnnnnnnnnnnnnnnnnnnnnnnnnnnnnnnnnnnnnnnnnnnnnnnnnnnnnnnnnnnnnnnnnnnnnnnnnnnnnnnnnnnnnnnnnnnnnnnnnnnnnnnnnnnnnnnnnnnnnnnnnnnnnnnnnnnnnnnnnnnnnnnnnnnnnnnnnnnnnnnnnnnnnnnnnnnnnnnnnnnnnnnnnnnnnnnnnnnnnnnnnnnnnnnnnnnnnnnnnnnnnnnnnnnnnnnnnnnnnnnnnnnnnnnnnnnnnnnnnnnnnnnnnnnnnnnnnnnnnnnnnnnnnnnnnnnnnnnnnnnnnnnnnnnnnnnnnnnnnnnnnnnnnnnnnnnnnnnnnnnnnnnnnnnnnnnnnnnnnnnnnnnnnaggtggattacaaagctgacgagtggctgatgaagaacatggaccccctgaatgacaacatcgccacgctgctccaccagtcctctgacaagtttgtctcggagctgtggaaggatnnnnnnnnnnnnnnnnnnnnnnnnnnnnnnnnnnnnnnnnnnnnnnnnnnnnnnnnnnnnnnnnnnnnnnnnnnnnnnnnnnnnnnnnnnnnnnnnnnnnnnnnnnnnnnnnnnnnnnnnnnnnnnnnnnnnnnnnnnnnnnnnnnnnnnnnnnnnnnnnnnnnnnnnnnnnnnnnnnnnnnnnnnnnnnnnaggccggcaagctggacccgcatcttgtgctggaccagctgcgctgcaacggcgtccttgagggcatccgcatctgccgccagggcttccccaacagggtggtcttccaggagtttcggcagannnnnnnnnnnnnnnnnnnnnnnnnnnnnnnnnnnnnnnnnnnnnnnnnnnnnnnnnnnnnnnnnnnnnnnnnnnnnnnnnnnnnnnnnnnnnnnnnnnnnnnnnnnnnnnnnnnnnnnnnnnnnnnnnnnnnnnnnnnnnnnnnnnnnnnnnnnnnnnnnnnnnnnnnnnnnnnnnnnnnnnnnnnnnnnnnnnnnnnnnnnnnnnnnnnnnnnnnnnnnnnnnnnnnnnnnnnnnnnnnnnnnnnnnnnnnnnnnnnnnnnnnnnnnnnnnnnnnnnnnnnnnnnnnnnnnnnnnnnnnnnnnnnnnnnnnnnnnnnnnnnnnnnnnnnnnnnggtcaagccgctgctgcaggtgagccggcaggaggaggagatgatggccaaggaggaggagctggtgaaggtccgagagaagcagctggctgcggagaacaggctcacggagatggagacactgcagtcnnnnnnnnnnnnnnnnnnnnnnnnnnnnnnnnnnnnnnnnnnnnnnnnnnnnnnnnnnnnnnnnnnnnnnnnnnnnnnnnnnnnnnnnnnnnnnnnnnnnnnnnnnnnnnnnnnnnnnnnnnnnnnnnnnnnnnnnnnnnnnnnnnnnnnnnnnnnnnnnnnnnnnnnnnnnnnnnnnnnnnnnnnnnnnnnnnnnnnnnnnnnnnnncaggagcttgaggagcagctggaggaggaggagagcgcccggcagaagctgcagctggagaaggtgaccactgaggcgaagctgaagaagctggaggaggagcagatcatcctggaggaccagaactgcaagctggccaagnnnnnnnnnnnnnnnnnnnnnnnnnnnnnnnnnnnnnnnnnnnnnnnnnnnnnnnnnnnnnnnnnnnnnnnnnnnnnnnnnnnnnnnnnnnnnnnnnnnnnnnnnnnnnnnnnnnnnnnnnnnnnnnnnnnnnnnnnnnnnnnnnnnnnnnnnnnnnnnnnnnnnnnnnnnnnnnnnnnnnnnnnnnnnnnnnnnnnnnnnnnnnnnnnnnnnnnnnnnnnnnnnnnnnnnnnnnnnnnnnnnnnnnnnnnnnnnnnnnnnnnnnnnnnnnnnnnnnnnnnnnnnnnnnnnnnagagtggaagaggaagctgcccagaagaacatggcccttaagaagatccgggagctggaatctcagatctcggaactccaggaagacctggagtctgaacgtgcttccagaaataaagctgagaagcagaaacgggaccttggggaagagctagaggcgctgaaaacagagttggaggacacgctggataccacagctgcccagcaggagctcaggtncaggtcgaaacgtgagcaggaggtgaacatcctgaagaagaccttggaggaggaggccaagacccacgaggcccagatccaggagatgagacagaagcactcgcaggccgtggaggagctggcggagcagctggagcagacgaagcgggtgnaagccaacctcgagaaggcaaagcagaccttggagaatgagcggggggagctggccaatgaggtgaaggtgctgctgcagggcaaaggggactcggagcacaagcgcaagaaagtggaggcgcagctgcaggagctgcaggtcaagttcaacgagggagagcgcgtgcgcacggagctggccgacaaggtcaccaagctgcaggtgntgcaggtggagctggacaacgtgaccgggcttctcagccagtccgacagcaagtccagcaagctcaccaaggacttctccgcgctggagtcccagctgcaggacactcaggnaggagctgctgcaggaggagaaccggcagaagctgatcctgagcaccaagctcaagctggtggaggacgagaagaattccttccgggagcannnnnnnnnnnnnnnnnnnnccaagcacaacctggagaagcagatcgccaccctccatgcccaggnnnnnnnnctgcccaggtggccgacatgaagaagaagatggaggacagtgtggggtgcctggaaaccgctgaggaggtgaagaggaagctccagaaggacctggagggcctgagccagcggcacgaggagaaggtggccgcctacgacaagctggagaagaccaagacgcgactgcagcaggagctggatgacctgctggtggacctggaccatcaacgccagagcgcgtgcaacctggagaagaagcagaagaagtttgaccannnnnnnnnnnnnnnnnnnnnnnnnnnnnnnnnnnnnnnnnnnnnnnnnnnnnnnnnnnnnnnnnnnnnnnnnnnnnnnnnnnnnnnnnnnnnnnnnnnnnnnnnnnnnnnnnnnnnnnnnnnnnnnnnnnnnnnnnnnnnnnnnnnnnnnnnnnnnnnnnnnnnnnnnnnnnnnnnnnnnnnnnnnnnnnnnnnnnnnnnnnnnnnnnnnnnnnnnnnnnnnnnnnnnnnnnnnnnnnnnnnnnnnnnnnnnnnnnnnnnnnnnnnnnnnnnnnnnnnnnnnnnnnnnnnnnnnnnnnnnnnnnnnnnnnnnnnnnnnnnnnnnnnnnnnnnnnnnnnnnnnnnnnnnnnnnnnnnnnnnnnnnnnnnnnnnnnnnnnnnnnnnnnnnnnnnnnnnnnnnnnnnnnnnnnnnnnnnnnnnnnncaggtgcgggagatggaggcagagctggaggatgagaggaagcagcgctcgatggcagtggccgcccggaaaaaaaaggagatggacctgaaggacctggaggctcacatcgactcagccaacaagaaccgggaggaagccatcaaacagctacggaagctgcag

SEQ ID NO: 27190 - DNA, 879 bp, Macaca Mulatta
gggtaaaaatggcagttgtgttctggacctctccaagtgtcttttcattcagggaaaactgttgtttgctgagcccaaggatgcgggctttccatttagccaggatatcaatagccatttggccagtctctcaatggttagaaacacgggccccacaccagaccccactgttagagaggctttgtgcgccacggataacttaaatgccagcattgaaagtgagggccagattaagatgtacatcaatgaagtgtgtcaggagactgtgtcacattgctgcaactcatttctgcagcaggccggattaaatttgttaataagcatgacagttattaataacatgcttgccaagtccgtttcagacttgaagtttcctttgatatcagagggaagtggatgtgctaaggttcaggttttgaaaccactgatgggtttgtctgaaaagccagtcttggcgggggagttagtcggtgcccagatgctcttctcattcatgtccctctttatcagaaaaggaaacagagagattctcctggaaacccctgccccataaacggccctctggaacacaatgggacggaatccacccacaacgcgcttggtttgcagatgtcaaagaatctgcagagggtgctactgaagatccagccttagccaatcaccacctcattgggtgaaagttcccagggctcaatccaggaccacactcttattggccaggcaggggctcccacagagctttgagtaacttgttggttgtgcagtctgcaggcaatgttggcactgtcaattcctcccttgtcggctccttcatgtggtgaggggatcacttcagctggctgctgtgggccccgcaactcccatttcagctattgttgc

SEQ ID NO: 27191 - DNA, 1074 bp, Macaca Mulatta
  misc_feature (1)...(1074): n = A,T,C or G
acaactacaaatccaagcagactgactctcaaaaataatcttaaatattgcaaatagtcccaaccaagattcagtcaatatgtttgttttgcaagtttaggagagtagttggctttgagtcacacatggaagctttaagaggtgaaacgctggcttcattctggactagacaggaacttggcctcagcgtgagatcctgccatgcagtgttacggtggcactgaagaagtatgaatgtgaaggcgtgggcttggggccagagcaccactctgctgccccaccacgcagcttgtgaggagccactaaacctttccgtgcctagacctccccatctgaggaatggggtcaataccacctacctcacaggggtgttgtgaggactgagaagaacaatgtcaaatgtttttaatacttggatgtgggggcgacatcaatgaaatctgtactgtataaaagctacacaaaaatgggcagacatttggttaattgtaccagatacctaaaatgtatgttcagaaaagcattttatcaactcagagatacgacgtgtttctagatttcatggcttaatgaattttttcattgttatatataccaaagaggcttacgggttcattgatnnnnnnnnnnnnnnnncagacggccaggcacggtggctcacgcctgtaatcccagcaatttgggaagccaaggtgggtggatcatgaggtcaggagttcaagaccagcctggccaacatgataaaaccccgtctctactaaaaatacaaaaaatagctggatgtggtggcgggtgcctgtaatcccagctactcaggaggctgaggcaggagaatcctttgaacccaggaggcggaggttgcagtgagctgagccattggacttcagcctgggcaacagggtgagannnnnnnnnnnnnnnnnnnnnnnnnnnnnnnnnnnnnnnnnnnnnnnnnnnnnnnnnnnnnnnnnnnnnnnaaaaccagacagacttgcccatcggccctcacaacatgcatgcagtgggactctagccaaggcggtggccaagccatcagtaacaatttatctggag

SEQ ID NO: 27192 - DNA, 1399 bp, Macaca Mulatta
  misc_feature (1)...(1399): n = A,T,C or G
gggaggaagacagagaaacagcgaggattatattttcctttgaagagttgctggaacctnnctaggagaaccggagccttaccatcaaacttcggaaacggaagccagagaaaaaggtggaatggacaagtgacaccgtggacaatgaacacatgggccgccgctcatcaaaatgctgctgtatttatgagaaacctcgggcctttggcgagagctccacggaaagtgatgaggaggaagaagagggctgtggtcatacacactgtgtacgtggccaccgcaaaggacggcgtcgtgcaaccctaggaccgacnnnnnnnnnnnnnnnnnnnnnnnnnnnnnnnnnnnnnnnnnnnnnnnnncaatgcagcactaaattcctctctcctccaccattcctgtgtctgtctggccctgaatgtattcatgtggctacttctccagccccttccttccctctcttctgcctgatagaggaaagaggaagaggagggtgaacagagatcctggaattatgacttgctgctattccaacccagcctcctgggttcccccagtcctcatttttcctcccaatacccacccttctctctcaagggatctagtcagcttggtcnnnnnnnnnnnnnnnnnnnnnnnnnnnnnnnnnnnnnnnnnnnnnnnnnnnnnnnnnnnnnnnnnnnnnnnnnnnnnnnnnnnnnnnnnnnnnnnnnnnnnnnnnnnnnnnnnnnnnnnnnnnnnnnnnnnnnnnnnnnnnnnnnnnnnnnnnnnnnnnnnnnnnnnnnnnnnnnnnnnnnnnnnnnnnnnnnnnnnnnnnnnnnnnnnnnnnnnnnnnnnnnnnnnnnnnnnnnnnnnnnnnnnnnnnnnnnnnnnnnnnnnnnnnnnnnnnnnnnnnnnnnnnnnnnnnnnnnnnnnnnnnnnnnnnnnnnnnnnnnnnnnnnnnnnnnnnnnnnnnnnnnnnnnnnnnnnnnnnnnnnnnnnnnnnnnnnnnnnnnnnnnnnnnnnnnnnnnnnnnnnnnnnnnnnnnnnnnnnnnnnnnnnnnnnnnnnnnnnnnnnnnnnnnnnnnnnnnnnnnnnnnnnnnnnnnnnnnnnnnnnnnnnnnnnnnnnnnnnnnnnnnnnnnnnnnnnnnnnnnnnnnnnnnnnnnnnnnnnnnnnngagcaaagagattggggtatatcccctgtgctacactcttacctcttaattcctagactttgatttctctgccagcccagatgttcagttctcttggccctctctaccccttactgggatttggttttcattttccagtccttttgccatacacagttgcagagatcagtcaaatccataccaccgctgagatctcatttattgccacaggtgcacaaaataaataacccaaaatcacaaa

SEQ ID NO: 27193 - DNA, 1303 bp, Macaca Mulatta
  misc_feature (1)...(1303): n = A,T,C or G
ttgctgcacaagctaaagctcttcagtcaccagttgccaccatttgggattatatccacaaaaccacctcaattggaatttatggacccaaatatatccatcctagttttactgttgttttaacagtttgtggacacaattatatgccaggacagcttacaatttctgatattaagaagggtgaaaaaaacgtatctccagtcgtgtttcagctctggggaaagcagtcatttttacttgacgagccacaagatttaagtgtttctgttgtttcctgtgatcctgattttgaagtaaagacagaaggagaaaggaaagaaattaaacaaaaccagttggaagcaggtgaagtagttcatcaacaatttttattttctttagttgagcacagagagatgcacttgtttgatttttgtgttcaggtggaacctcccaatggtgaaccagttgcacagttctctgtcactactcctgatccaactccaaacctaaaaaggctctcnnnnnnnnnnnnnnnnnnnnnnnnnnnnnnnnnnnnnnnnnnnnnnnnnnnnnnnnnnnnnnnnnnnnnnnnnnnnnnnnnnnnnnnnnnnnnnnnnnnnnnnnnnnnnnnnnnnnnnnnnnnnnnnnnnnnnnnnnnnnnnnnnnnnnnnnnnnnnnnnnnnnnnnnnnnnnnnnnnnnnnnnnnnnnnnnnnnnnnnnnnnnnnnnnnnnnnnnnnnnnnnnnnnnnnnnnnnnnnnnnnnnnnnnnnnnnnnnnnnnnnnnnnnnnnnnnnnnnnnnnnnnnnnnnnnnnnnnnnnnnnnnnnnnnnnnnnnnnnnnnnnnnnnnnnnnnnnnnnnnnnnnnnnnnnnnnnnnnnnnnnnnnnnnnnnnnnnnnnnnnnnnnnnnnnnnnnnnnnnnnnnnnnnnnnnnnnnnnnnnnnnnnnnnnnnnnnnnnnnnnnnnnnnnnnnnnnnnnnnnnnnnnnnnnnnnnnnnnnnnnnnnnnnnnnnnnnnnnnnnnnnnnnnnnnnnnnnnnnnnnnnnnnnnnnnnnnnnnnnnnnnnnnnnnnnnnnnnnnnnnnnnnnnnnnnnnnnnnnnnnnnnnnnnnnnnnnnnnnnnnnnnnnnnnnnngctcttctgaaaatggattgccaatggttagttgcacgtctcatccaagaagctgctattctgacttcagctgtcaagcttggaaaaggctggagggaactagctgaaaagttagtacgactcacaaagcaacaaatggaggcatatgaaatttctcatcgaggaaacactggagatgttgctgttgag

SEQ ID NO: 27194 - DNA, 784 bp, Macaca Mulatta
  misc_feature (1)...(784): n = A,T,C or G
gtttaatattgtgggttgttttattcttgttgtccttttaattatctattggtgtgctggccatatgacatgtcttgccgggtgtttctgttaaatatttatagatngggtgtatcatgtttggtgtataaaataaataattctttgttaggtttattattgtgttttttatattgtcatttcccgtcnnnnnnnnnnnnnnnnnnnnnttaatatcccgcnnnnnnnnnnnnnnnnnnnnnnnnncaaaaggggaaagcccaaaaaggttaagttcaccttttttaccattattacaaaagcaattggtacccatgtccataaaggcagcaacaaagctgcttgtctattgaagattactactgcaaattggactgcattcaatgctagttgtaaaaacaccagcttttcagaagttggtatctgtacaaaattgcagcttattttcttcacttctgtcccttcaagtctttacacagtaatgctaaaacacccagctttgagatcctgagtcaatatattgccactttctttttggtagcttgagcttcatagtgtcaactgaccttgtgtatccatttttaatacagtctcttcctgtagcatgggcaaatatgttaaatctttttcttccaaaaaaatgttttaagttatgatgttacaatggcaggactttttctttagggaaggaattcagttgtgctgcaatgtattagattctataggtggagcagagtcatatagtgtatctgtatcatgtgtaggctcaccagctaatgtaccc

SEQ ID NO: 27195 - DNA, 817 bp, Macaca Mulatta
cagcagtgtgtttgacatagggctttggtttgtgcagactgggatgtattggttagaatcaaatctctctttgtaatggagggctaaattgagtgtactttccttcttcactttcacttgctccttgcagatattgctttaggggtatttgatgtggtggtgacagacccctcttgcccagcctcggtgctgaagtgtgctgaagcattgcagctgcctgtcgtgtcacaagagtgggtgatccagtgcctcattgttggggagagaattggattcaagcagcatccaaaatataaacacgattatgtttctcactaaagatacttggtcttactggttttattccctgctatcgtggagattgtgttttaaccaggttttaaatgtgtcttgtgtgtaactggattccttgcatggatcttgtatatagttttatttgctgaacttttatgataaaataaatgttgaatctctttggttgtagtaactgggatttcttcatctgtttctttgagcttaatctcagaacaaatgacaagacaaacagtactttctcgaggttttcaataggcttattcactttaggaggacagctagtcaaggaaattgcaaagttaagagtgaactttattctgtggcatcattcccaaaaggttattccagggtgtctaaaatgctgtgcttgcaaaaactcagtttaaagtaggtgaaggcccagattaacagttgtgccaaaagttgagcagaattgggcacagctctgtttcctgacagtttaagaaagaaatcatgctgtctctctttagagctgagatca

SEQ ID NO: 27196 - DNA, 386 bp, Macaca Mulatta
  misc_feature (1)...(386): n = A,T,C or G
ngcctacaaagagaagatgaaggagcttccgctggtttccttgttctgctcctgcttcctggccgatcccctgaataagtcttcctacaaatatgaagnnnnnnnnnnnnnnnnnnnnnnnnnnnnnnnnnnnnnnnnnnnnnnnnnnnnnnnnnnnnnnnnnnnnnnnnnnnnnnncagacacggtggacctgaattggtgcgtcatttccgacatggaatgcatcgagctgaacaaatgcacctcgggccagtccttcgaagtcatcctgaagccaccctcctttgatggggtgcccgagttcaacgcctccctgcccaggcggcgagacccatccctggaagagatccagaagaaactagaagcggctgaggagcgaaggaag

SEQ ID NO: 27197 - DNA, 2440 bp, Macaca Mulatta
  misc_feature (1)...(2440): n = A,T,C or G
agctcactccatcactcgatgctataatataagatttctgctttggagaggccaagtttaatgaagannnnnnnnnaaaagaagttgcaagacacgaataaaatctgctgcaccttgaaaatgctctaactggacatgaaggannnnnnnnnnnnnnnnnnntgggatttttggtgcaagtagcacatggtttaaatatgaatgaacaaacctgtgatctagtccttgtcttgtaattgtggattaatgtcaacgttaatcagccccctcaaagggagagaaaagctggaccttttcccttgctgtaccatattcagcatttgatttccatgggctccaccatttatgtgtaaaatttgaaatggttgtcacctctctgaggagagagcttgaagcctccacaccagctgctgctggagagtcaaagcccaactgtgggtccaagagggaagctggctgggctggctgaagaatgaggaccactggactctccgttaatctctaaggggtctgctccccaggagcgtttccgaacaatggggactttgttggtagccatttggtagatgttcttttctatttataagtgactttaaacttttccttggctgttaagaagtttgttatagatttagctatttattgttcgatgcctgcatgctgaaacaatgcctacagctgtcttcacatgtatggacgtgtgtgaatggttgtatgttttgcacattttgtggctgtggagatgtgctttgctgcacaaacatgaaaacttttgagttacaatttggaatataactggagggtgggtggggaggggnnnnnnnnnnnnnnnnnnnnnnnnnnnnnnnnnnnnnnnnnnnnnnnnnnnnnnnnnnnnnnnnnnnnnnnnnnnnnnnnnnnnnnnnnnnnnnnnnnnnnnnnnnnnnnnnnnnnnnnnnnnnnnnnnnnnnnnnnnnnnnnnnnnnnnnnnnnnnnnnnnnnnnnnnnnnnnnnnnnnnnnnnnnnnnnnnnnnnnnnnnnnnnnnnnnnnnnnnnnnnnnnnnnnnnnnnnnnnnnnnnnnnnnnnnnnnnnnnnnnnnnnnnnnnnnnnnnnnnnnnnnnnnnnnnnnnnnnnnnnnnnnnnnnnnnnnnnnnnnnnnnnnnnnnnnnnnnnnnnnnnnnnnnnnnnnnnnnnnnnnnnnnnnnnnnnnnnnnnnnnnnnnnnnnnnnnnnnnnnnnnnnnnnnnnnnnnnnnnnnnnnnnnnnnnnnnnnnnnnnnnnnnnnnnnnnnnnnnnnnnnnnnnnnnnnnnnnnnnnnnnnnnnnnnnnnnnnnnnnnnnnnnnnnnnnnnnnnnnnnnnnnnnnnnnnnnnnnnnnnnnnnnnnnnnnnnnnnnnnnnnnnnnnnnnnnnnnnnnnnnnnnnnnnnnnnnnnnnnnnnnnnnnnnnnnnnnnnnnnnnnnnnnnnnnnnnnnnnnnnnnnnnnnnnnnnnnnnnnnnnnnnnnnnnnnnnnnnnnnnnnnnnnnnnnnnnnnnnnnnnnnnnnnnnnnnnnnnnnnnnnnnnnnnnnnnnnnnnnnnnnnnnnnnnnnnnnnnnnnnnnnnnnnnnnnnnnnnnnnnnnnnnnnnnnnnnnnnnnnnnnnnnnnnnnnnnnnnnnnnnnnnnnnnnnnnnnnnnnnnnnnnnnnnnnnnnnnnnnnnnnnnnnnnnnnnnnnnnnnnnnnnnnnnnnnnnnnnnnnnnnnnnnnnnnnnnnnnnnnnnnnnnnnnnnnnnnnnnnnnnnnnnnnnnnnnnnnnnnnnnnnnnnnnnnnnnnnnnnnnnnnnnnnnnnnnnnnnnnnnnnnnnnnnnnnnnnnnnnnnnnnnnnnnnnnnnnnnnnnnnnnnnnnnnnnnnnnnnnnnnnnnnnnnnnnnnnnnnnnnnnnnnnnnnnnnnnnnnnnnnnnnnnnnnnnnnnnnnnnnnnnnnnnnnnnnnnnnnnnnnnnnnnnnnnnnnnnnnnnnnnnnnnnnnnnnnnnnnnnnnnnnnnnnnnnnnnnnnnnnnnnnnnnnnnnnnnnnnnnnnnnnnnnnnnnnnnnnnnnnnnnnnnnnnnnnnnnnnnnnnnnnnnnnnnnnnnnnnnnnnnnnnnnnnnnnnnnnnnnnnnnnnnnnnnnnnnnnnnnnnnnnnnnnnnnnnnnnnnnnnnnnnnnnnnnngaccattctcaccctgtgaccgtacccacactttgaagcaaatacaattcacagcacagtacacacaaaaaccttggcataagacagagaaggttcttcttattttgtgggctggttgctgtagaaacacataacaaagggcagccctccacttctggtataattgtgtagccgcttttctctgggcttgacacctgtcttgaataagagtgattagagccgcataatgtccctctcttggctattgaccatgtggttcacgtacaaaact

SEQ ID NO: 27198 - DNA, 736 bp, Macaca Mulatta
  misc_feature (1)...(736): n = A,T,C or G
ggatactaactcttctcgtaaaagtattgcatcaggaaccttttaagaagtgcttaaattcagattcacttgtccctagtaattcattcataaagcacaggggttcatttaaatgtatgttgtaatccattcggaaaatctaaaatgttgtttttgctgaatatggtggacctaagcgtttgcttttttccccccttatatgagaaaattgaaaggatatgctttggaattacctttgttctaaaaaaatggggggtgggtatgttnnnnnnnnnnnnnnnnnnnnnnnnnnctcagctttcaaataatgaggagtatgggcaaatagcattactgcccattgagctgaacacatgattatttttagttccatattttttccttcatcagcgtttttgttgggggtagaatattaataacaagtaagaatggtggctgccatgcacagatggccctaggggtgacctccagttttgcgtgtgaaccataggcctttttccagctgaatgaccaaaattataagccttttagtcccactgacattacccaggctcctattgaggcctccacagcacattgtgctgtcccctgcctcctgtgagcaatggggggaatttggggaatcttgttttaagtgcccccaattaaagtctaaatggaagggtttcatccttaatttctttcgacaaaccccaaacccttacaatgccccctaagcacacggcaaattaagaat

SEQ ID NO: 27199 - DNA, 475 bp, Macaca Mulatta
cacacgtgctctggggctgacagatcatctctataccctgaccttggcccccgtgtacccccaggtcggcttcttcaagcggaaccggccacccctggaagaagatgatgaagagggggagtgatggtgcagcctatactgttctagcaggagggttgggcgtgctacctgcaccaccccttctccaatgagttgcctccaagctttgggttggagctgttccatggggtcctcttggtgtcatttccctcccaacagagctgggtcaccccctcctgctgcctaataaagagactgagccctgatgccgagcatgctgcctccttttggggccagaggagagaggaccaaagaaatgttttggacagggacctagggctggtggaagtgtgaacagagaaggtctctgccagggcaaagtgtgcaaatcactgtctttggggagtatcagggagtgcagagttggggtggcagg

SEQ ID NO: 27200 - DNA, 687 bp, Macaca Mulatta
  misc_feature (1)...(687): n = A,T,C or G
ggggtttgaacataattggagaacctttccttcaagcagaaacaagcaactgagggaaaaagaaacacaacaatagtttaannnnnnnnnnnnnnnnnnnnnnnnnnnnnnnnnnnggaagactggacaaaacaaagggtgaaaggaaagaaactgaagaaagaagataatagaccagcaattgcagcacttacaatcactaattcccttaaggttgaaactgtaatgacataaaaagggtcgatgatatttcactgatggtagatcgcagcccctgcaacgtagcctttgttacatgaagtccgctgggaaatagatgttctgtctctatgacaatatattttaactgactttctagatgccttaatatttgcatgataagctagttttattggtttagtattcttgttgtttacgcatggaatcactattcctggttatctcaccaacgaaggctaggaggcggcgtcagaggtgctgggtgacagagccatgagccagccattttataagcactctgatttctaagagttaaaaaaatatataaaatctctgtagcctttagttatcagtacagatttattaaattttggcccttaacccagccttttccagtgtgtaacccagtttgaaatctgncgnanntaatgaaagaaaaaaaaaancncccttgtcggccggcttcgg

SEQ ID NO: 27201 - DNA, 3138 bp, Macaca Mulatta
  misc_feature (1)...(3138): n = A,T,C or G
tggaaaaatgcattgatgatgctttaagaaaaaatgatttcaaacctttgaaaacacttttgcaaattgatatttgtgaagatgtgaagattaaatgcagcaaacaatttttccacaaggtggacaaccttatatgcagggnnnnnnnnnnnnnnnnnnnnnnnnnnnnnnnnnnnnnnnnnnnnnnnnnnnnnnnnnnnnnnnnnnnnnnnnnnnnnnnnnnnnnnnnnnnnnnnnnnnnnnnnnnnnnnnnnnnnnnnnnnnnnnnnnnnnnnnnnnnnnnnnnnnnnnnnnnnnnnnnnnnnnnnnnnnnnnnnnnnnnnnnnnnnnnnnnnnnnnnnnnnnnnnnnnnnnnnnnnnnnnnnnnnnnnnnnnnnnnnnnnnnnnnnnnnnnnnnnnnnnnnnnnnnnnnnnnnnnnnnnnnnnnnnnnnnnnnnnnnnnnnnnnnnnnnnnnnnnnnnnnnnnnnnnnnnnnnnnnnnnnnnnnnnnnnnnnnnnnnnnnnnnnnnnnnnnnnnnnnnnnnnnnnnnnnnnnnnnnnnnnnnnnnnnnnnnnnnnnnnnnnnnnnnnnnnnnnnnnnnnnnnnnnnnnnnnnnnnnnnnnnnnnnnnnnnnnnnnnnnnnnnnnnnnnnnnnnnnnnnnnnnnnnnnnnnnnnnnnnnnnnnnnnnnnnnnnnnnnnnnnnnnnnnnnnnnnnnnnnnnnnnnnnnnnnnnnnnnnnnnnnnnnnnnnnnnnnnnnnnnnnnnnnnnnnnnnnnnnnnnnnnnnnnnnnnnnnnnnnnnnnnnnnnnnnnnnnnnnnnnnnnnnnnnnnnnnnnnnnnnnnnnnnnnnnnnnnnnnnnnnnnnnnnnnnnnnnnnnnnnnnnnnagctgcaaataccatcagatgaaaaacttgaggaattttggattgattttaatcttgggagtcagactctctcattctacattgctggagataatgatnnnnnnnnnnnnnnnnnnnnnnnnnnnnnnnnnnnnnnnnnnnnnnnnnnnnnnnnnnnnnnnnnnnnnnnnnnnnnnnnnnnnnnnnnnnnnnnnnnnnnnnnnnnnnnnnnnnnnnnnnnnnnnnnnnnnnnnnnnnnnnnnnnnnnnnnnnnnnnnnnnnnnnnnnnnnnnnnnnnnnnnnnnnnnnnnnnnnnnnnnnnnnnnnnnnnnnnnnnnnnnnnnnnnnnnnnnnnnnnnnnnnnnnnnnnnnnnnnnnnnnnnnnnnnnnnnnnnnnnnnnnnnnnnnnnnnnnnnnnnnnnnnnnnnnnnnnnnnnnnnnnnnnnnnnnnnnnnnnnnnnnnnnnnnnnnnnnnnnnnnnnnnnnnnnnnnnnnnnnnnnnnnnnnnnnnnnnnnnnnnnnnnnnnnnnnnnnnnnnnnnnnnnnnnnnnnnnnnnnnnnnnnnnnnnnnnnnnnnnnnnnnnnnnnnnnnnnnnnnnnnnnnnnnnnnnnnnnnnnnnnnnnnnnnnnnnnnnnnnnnnnnnnnnnnnnnnnnnnnnnnnnnnnnnnnnnnnnnnnnnnnnnnnnnnnnnnnnnnnnnnnnnnnnnnnnnnnnnnnnnnnnnnnnnnnnnnnnnnnnnnnnnnnnnnnnnnnnnnnnnnnnnnnnnnnnnnnnnnnnnnnnnnnnnnnnnnnnnnnnnnnnnnnnnnnnnnnnnnnnnnnnnnnnnnnnnnnnnnnnnnnnnnnnnnnnnnnnnnnnnnnnnnnnnnnnnnnnnnnnnnnnnnnnnnnnnnnnnnnnnnnnnnnnnnnnnnnnnnnnnnnnnnnnnnnnnnnnnnnnnnnnnnnnnnnnnnnnnnnnnnnnnnnnnnnnnnnnnnnnnnnnnnnnnnnnnnnnnnnnnnnnnnnnnnnnnnnnnnnnnnnnnnnnnnnnnnnnnnnnnnnnnnnnnnnnnnnnnnnnnnnnnnnnnnnngatattgttataaataaaaaacttactaaacaaaaatcatcctcatcaatatctgatgataattctgaaaaaacaggaaaagtgaaatataagaacgaacgaaccgaccatctcaaaatagataaagcagaagtagaagttngcaaaaaacacaatcaacaacaaaatcatcctaaatatccagggcagaaaagtactgaaaacgccaagcagagtgattggcctgttgaatctgaaactacttttaaatcggttctccttaataagacaattgaagaatcgctgatttataggaagaaatacgtattgtcaaaagatgtgaatactgctacttgcgataaaaatccttctgctagcaaaaatatgcaaagtcatagaaaagcagggaaagaattgacttctgagcttaattcctgggatttgaaacnnnnnnnnnnnnnnnnnnnnnnnnnnnnnnnnnnnnnnnnnnnnnnnnnnnnnnnnnnnnnnnnnnnnnnnnnnnnnnnnnnnnnnnnnnnnnnnnnnnnnnnnnnnnnnnnnnnnnnnnnnnnnnnnnnnnnnnnnnnnnnnnnnnnnnnnnnnnnnnnnnnnnnnnnnnnnnggaaaaagttcagaaaaaaagctacagaaaactgaagactacttttgtcaatgttacttctgaatgcccannaatgatgtttacaattttaatttgaacggagccgatgaccctatcataaaacttggaatccaagagtttcaagctgcagctaaagaagcctgtgcggataagtcgattagattnnnnnnnnnnnnnnnnnnnnnnnnnnnnnnnnnnnnnnnnnnnnnnnnnnnnnnnnnnnnnnnnnnnnnnnnnnnnnnnnnnnnnnnnnnnnnnnnnnnnnnnnnnnnnnnnnnnnnnnnnnnnnnnnnnnnnnnnnnnnnnnnnnnnnnnnnnnnnnnnnnnnnnnnnnnnnnnnnnnnnnnnnnnnnnnnnnnnnnnnnnnnnnnnnnnnnnnnnnnnnnnnnnnnnnnnnnnnnnnnnnnnnnnnnnnnnnnnnnnnnnnnnnacccagtaaaaatatcaccaaaaagatggacaagacagttccggaaggaagaatcagacttccacgaaaagcaaccaaaacaaaaaaaaattataaagatctctcaaattcagaatcagagtgtgaacaagaattttcacattcatttaaagagaacttgctagtaaag

SEQ ID NO: 27202 - DNA, 2290 bp, Macaca Mulatta
  misc_feature (1)...(2290): n = A,T,C or G
gttgcagcatgccgttgggaatggagagtaaagcaatatcagatgcacagattactgcttcatcctacttcaccagatatgtttgccacctggtctccttcaaaaggtagacttaacctccaaggaaggagtaatgcctggagacctcaggnnnnnnnnnnnnnnnnnnnnnnnnnnnnnnnnnnnnnnnnnnnnnnnnnnnnnnnnnnnnnnnnnnnnnnnnnnnnnnnnnnnnnnnnnnnnnnnnnnnnnnnnnnnnnnnnnnnnnnnnnnnnnnnnnnnnnnnnnnnnnnnnnnnnnnnnnnnnnnnnnnnnnnnnnnnnnnnnnnnnnnnnnnnnnnnnnnnnnnnnnnnnnnnnnnnnnnnnnnnnnnnnnnnnnnnnnnnnnnnnnnnnnnnnnnnnnnnnnnnnnnnnnnnnnnnnnnnnnnnnnnnnnnnnnnnnnnnnnnnnnnnnnnnnnnnnnnnnnnnnnnnnnnnnnnnnnnnnnnnnnnnnnnnnnnnnnnnnnnnnnnnnnnnnnnnnnnnnnnnnnnnnnnnnnnnnnnnnnnnnnnnnnnnnnnnnnnnnnnnnnnnnnnnnnnnnnnnnnnnnnnnnnnnnnnnnnnnnnnnnnnnnnnnnnnnnnnnnnnnnnnnnnnnnnnnnnnnnnnnnnnnnnnnnnnnnnnnnnnnnnnnnnnnnnnnnnnnnnnnnnnnnnnnnnnnnnnnnnnnnnnnnnnnnnnnnnnnnnnnnnnnnnnnnnnnnnnnnnnnnnnnnnnnnnnnnnnnnnnnnnnnnnnnnnnnnnnnnnnnnnnnnnnnnnnnnnnnnnnnnnnnnnnnnnnnnnnnnnnnnnnnnnnnnnnnnnnnnnnnnnnnnnnnnnnnnnnnnnnnnnnnnnnnnnnnnnnnnnnnnnnnnnnnnnnnnnnnnnnnnnnnnnnnnnnnnnnnnnnnnnnnnnnnnnnnnnnnnnnnnnnnnnnnnnnnnnnnnnnnnnnnnnnnnnnnnnnnnnnnnnnnnnnnnnnnnnnnnnnnnnnnnnnnnnnnnnnnnnnnnnnnnnnnnnnnnnnnnnnnnnnnnnnnnnnnnnnnnnnnnnnnnnnnnnnnnnnnnnnnnnnnnnnnnnnnnnnnnnnnnnnnnnnnnnnnnnnnnnnnnnnnnnnnnnnnnnnnnnnnnnnnnnnnnnnnnnnnnnnnnnnnnnnnnnnnnnnnnnnnnnnnnnnnnnnnnnnnnnnnnnnnnnnnnnnnnnnnnnnnnnnnnnnnnnnnnnnnnnnnnnnnnnnnnnnnnnnnnnnnnnnnnnnnnnnnnnnnnnnnnnnnnnnnnnnnnnnnnnnnnnnnnnnnnnnnnnnnnnnnnnnnnnnnnnnnnnnnnnnnnnnnnnnnnnnnnnnnnnnnnnnnnnnnnnnnnnnnnnnnnnnnnnnnnnnnnnnnnnnnnnnnnnnnnnnnnnnnnnnnnnnnnnnnnnnnnnnnnnnnnnnnnnnnnnnnnnnnnnnnnnnnnnnnnnnnnnnnnnnnnnnnnnnnnnnnnnnnnnnnnnnnnnnnnnnnnnnnnnnnnnnnnnnnnnnnnnnnnnnnnnnnnnnnnnnnnnnnnnnnnnnnnnnnnnnnnnnnnnnnnnnnnnnnnnnnnnnnnnnnnnnnnnnnnnnnnnnnnnnnnnnnnnnnnnnnnnnnnnnnnnnnnnnnnnnnnnnnnnnnnnnnnnnnnnnnnnnnnnnnnnnnnnnnnnnnnnnnnnnnnnnnnnnnnnnnnnnnnnnnnnnnnnnnnnnnnnnnnnnnnnnnnnnnnnnnnnnnnnnnnnnnnnnnnnnnnnnnnnnnnnnnnnnnnnnnnnnnnnnnnnnnnnnnnnnnnnnnnnnnnnnnnnnnnnnnnnnnnnnnnnnnnnnnnnnnnnnnnnnnnnnnnnnnnnnnnnnnnnnnnnnnnnnnnnnnnnnnnnnnnnnnnnnnnnnnnnnnnnnnnnnnnnnnnnnnnnnnnnnnnnnnnnnnnnnnnnnnnnnnnnnnnnnnnnnnnnnnnnnnnnnnnnnnnnnnnnnnnnnnnnnnnnnnnnnnnnnnnnnnnnnnnnnnnnnnnnnnnnnnnnnnnnnnnnnnnnnnnnnnnnnnnnnnnnnnnnnnnnnnnnnnnnnnnnnnnnnnnnnnnnnnnnnnnnnnnnnnnnnnnnnnnncctgttatgtttaacttggcaatcttgtttgggcattcttttcccattgactatatacatctctatttctcaaatgttaatggaactagttcttttattttcctgctggtttcttcagtaatgagttaaataaaacattgacacatacaaacaa

SEQ ID NO: 27203 - DNA, 3002 bp, Macaca Mulatta
  misc_feature (1)...(3002): n = A,T,C or G
ttccatagagactgcactcccagctcttgttgttcccatcttggagccctgtggtaattcagagtgtctgcacatttttgtagatttgcattctggaatgtttcaattgatgctttatggacttgnnnnnnnnnnnnnnnnnnnnnnnnnnnnnnnnnnnnnnnnnnnnnnnnnnnnnnnnnnnnnnnnnnnnnnnnnnnnnnnnnnnnnnnnnnnnnnnnnnnnnnnnnnnnnnnnnnnnnnnnnnnnnnnnnnnnnnnnnnnnnnnnnnnnnnnnnnnnnnnnnnnnnnnnnnnnnnnnnnnnnnnnnnnnnnnnnnnnnnnnnnnnnnnnnnnnnnnnnnnnnnnnnnnnnnnnnnnnnnngttgtggagatgttggaggttcccaataaacccacacaactgtcgtacaagtactactttatgtctgtgaatgctgcagatcgtgaagacagtcctgcaatggcattgctgctacagcagttcaaggaaaacatccaggacttggtttttcgtacaaaaaccgggaaacagaccagaaccaatgccaagcgcaannnnnnnnnnnnnnnnnnnnnnnnnnnnnnnnnnnnnnnnnnnnnnnnnnnnnnnnnnnnnnnnnnnnnnnnnnnnnnnnnnnnnnnnnnnnnnnnnnnnnnnnnnnnnnnnnnnnnnnnnnnnnnnnnnnnnnnnnnnnnnnnnnnnnnnnnnnnnnnnnnnnnnnnnnnnnnnnnnnnnnnnnnnnnnnnnnnnnnnnnnnnnnnnnnnnattcctccctgtaagggtataagtgaggaaacccaaaaggctctggaccgctgtcttcttgattgcactttccgattacaaggtagaaataaccgcacttgggtagcagagttagtgtttgcaaattgtccacttaatggcacttctaccagggagcaaggnccatcccggcacgtttacctgacatatgaaaatctgttgtctgagcctgttggtggtagaaaagtggttgaaatgtttcttaatgactggaatagcattgcacgattatatgagtgtgtgttggaatttgcacgttctctaccagnnnnnnnnnnnnnnnnnnnnnnnnnnnnnnnnnnnnnnnnnnnnnnnnnnnnnnnnnnnnnnnnnnnnnnnnnnnnnnnnnnnnnnnnnnnnnnnnnnnnnnnnnnnnnnnnnnnnnnnnnnnnnnnnnnnnnnnnnnnnnnnnnnnnnnnnnnnnnnnnnnnnnnnnnnnnnnnnnnnnnnnnnnnnnnnnnnnnnnnnnnnnnnnnnnnnnnnnnnnnnnnnnnnnnnnnnnnnnnnnnnnnnnnnnnnnnnnnnnnnnnnnnnnnnnnnnnnnnnnnnnnnnnnnnnnnnnnnnnnnnnnnnnnnnnnnnnnnnnnnnnnnnnnnnnnnnnnnnnnnnnnnnnnnnnnnnnnnnnnnnnnnnnnnnnnnnnnnnnnnnnnnnnnnnnnnnnnnnnnnnnnnnnnnnnnnnnnnnnnnnnnnnnnnnnnnnnnnnnnnnnnnnnnnnnnnnnnnnnnnnnnnnnnnnnnnnnnnnnnnnnnnnnnnnnnnnnnnnnnnnnnnnnnnnnnnnnnnnnnnnnnnnnnnnnnnnnnnnnnnnnnnnnnnnnnnnnnnnnnnnnnnnnnnnnnnnnnnnnnnnnnnnnnnnnnnnnnnnnnnnnnnnnnnnnnnnnnnnnnnnnnnnnnnnnnnnnnnnnnnnnnnnnnnnnnnnnnnnnnnnnnnnnnnnnnnnnnnnnnnnnnnnnnnnnnnnnnnnnnnnnnnnnnnnnnnnnnnnnnnnnnnnnnnnnnnnnnnnnnnnnnnnnnnnnnnnnnnnnnnnnnnnnnnnnnnnnnnnnnnnnnnnnnnnnnnnnnnnnnnnnnnnnnnnnnnnnnnnnnnnnnnnnnnnnnnnnnnnnnnnnnnnnnnnnnnnnnnnnnnnnnnnnnnnnnnnnnnnnnnnnnnnnnnnnnnnnnnnnnnnnctcttgaccctagttccccatacactatggtgtcaccaagtggacgagcagggaactggccaggatctcctcaagtgtccggcccctcaccagcagcacgcatgcctggaatgtcaccagccaacccctcactacattctccggttccagatgcttctcattcccctcgagctggaacaagtnnnnnnnnnnnnnnnnnnnnnnnnnnnnnnnnnnnnnnnnnnnnnnnnnnnnnnnnnnnnnnnnnnnnnnnnnnnnnnnnnnnnnnnnnnnnnnnnnnnnnnnnnnnnnnnnnnnctccaacgccaggccttgtgcctggtctggcaggtagttacctttgttctccacttgagagattccttggatcagtcatcatgagacgacatcttcaaagaattattcaacaagaaacnnnnnnnnnnnnnnnnnnnnnnnnnnnnnnnnnnnnnnnnnnnnnnnnnnnnnnnnnnnnnnnnnnnnnnnnnnnnnnnnnnnnnnnnnnnnnnnnnnnnnnnnnnnnnnnnnnnnnnnnnnnnnnnnnnnnnnnnnnnnnnnnnnnnnnnnnnnnnnnnnnnnnnnnnnnnnnnnnnnnnnnnnnnnnnnnnnnnnnnnnnnnnnnnnnnnnnnnnnnnnnnnnnnnnnnnnnnnnnnnnnnnnnnnnnnnnnnnnnnnnnnnnnnnnnnnnnnnnnnnnnnnnnnnnnnnnnnnnnnnnnnnnnnnnnnnnnnnnnnnnnnnnnnnnnnnnnnnnnnnnnnnnnnnnnnnnnnnnnnnnnnnnnnnnnnnnnnnnnnnnnnnnnnnnnnnnnnnnnnnnnnnnnnnnnnnnnttcaactaactcagaaaacatcggtccctccccaagaacctgttagtattatagttccaatcatttatgacatggcttcaggtacaacccagcaggcagacattcccagacagcagaactcttctgttgctgctcccatgatggtcagcaacattctgaagaggtttgcagagatgaatccaccacgacaaggt

SEQ ID NO: 27204 - DNA, 729 bp, Macaca Mulatta
acatcagggacagagacagcagatgggccccacctccccgggagcctgtgtccccagctggctcccaccaccacaggccacgagtggcaagcgcctcgggtggccccatccgcggccacaggaactgaggtctacacaggggtcttgcctcctgaaccagagaaggcttcttgcacgtctcctgggggcgacggggttctactcaaataaaactgacacctacacgttaagcctgtcctgcctgggtgatcacagccatgtgttcccgactttgacagagaagttcccaatacacttggtttccctgcagaggtggtggcttctgtctgtgccatgctagggcacaggaaagggctcagcgtccgctccttctgagtgcggcttccagaatggctgtacctggaggaggctggcagggacgtggaggaccccctcttctccctgtccagggagaaaccgtgtctggtttctaagctggatcacgacccagagccttcaggacgtgtaaggacagcaaaccctatggcgaccccaccgggtctggctcactgcatccccgttctcactaaggtaacttctgtactgctgtaggggctgggtctgcaggggcctcacggcctgaggggctggtaggctcccctgaggctggaggagtgatggatcccagcagcctccctgccccgtggtagcctgggaatgtggggtgtcctgtactggccctgggtcaga

SEQ ID NO: 27205 - DNA, 123 bp, Macaca Mulatta
aggattgacaagcccaaggccctatcgctactgctccatgctgctgacatcagccacccaaccaagcagtggtcggtccacagccgctggaccaaggccctcatggaggaattcttccgccag

SEQ ID NO: 27206 - DNA, 248 bp, Macaca Mulatta
aggcaacaaaggaaaacctaagaccacagaacctaccacttgtgaaccagccttgtcagagggaatctcacttcagggacaactgacagaaggaaactcagtggactcccagttggggcaagccgaggatcaggatgggctatcagaaatgcaggaaggacacttcagaccaggagtagatccccaggagaagcctcctgggaaaatgagccctgaatgtgatggtttagggacagctgacggtgtgt

SEQ ID NO: 27207 - DNA, 2228 bp, Macaca Mulatta
  misc_feature (1)...(2228): n = A,T,C or G
gttcctgattgtccttgggtgcttgattctggctgtcctgaccacgttcaaggagtatgagactgtctcgggagactggcttctgttactggnnnnnnnnnnnnnnnnnnnnnnnnnnnnnnnnnnnnnnnnnnnnnnnnnnnnnnnnnnnnnnnnnnnnnnnnnnnnnnnnnnnnnnnnnnnnnnnnnnnnnnnnnnnnnnnnnnnnnnnnnnnnnnnnnnnnnnnnnnnnnnnnnnnnnnnnnnnnnnnnnnnnnnnnnnnnnnnnnnnnnnnnnnnnnnnnnnnnnnnnnnnnnnnnnnnnnnnnnnnnnnnnnnnnnnnnnnnnnnnnnnnnnnnnnnnnnnnnnnnnnnnnnnnnnnnnnnnnnnnnnnnnnnnnnnnnnnnnnnnnnnnnnnnnnnnnnnnnnnnnnnnnnnnnnnnnnnnnnnnnnnnnnnnnnnnnnnnnnnnnnnnnnnnnnnnnnnnnnnnnnnnnnnnnnnnnnnnnnnnnnnnnnnnnnnnnnnnnnnnnnnnnnnnnnnnnnnnnnnnnnnnnnnnnnnnnnnnnnnnnnnnnnnnnnnnnnnnnnnnnnnnnnnnnnnnnnnnnnnnnnnnnnnnnnnnnnnnnnnnnnnnnnnnnnnnnnnnnnnnnnnnnnnnnnnnnnnnnnnnnnnnnnnnnnnnnnnnnnnnnnnnnnnnnnnnnnnnnnnnnnnnnnnnnnnnnnnnnnnnnnnnnnnnnnnnnnnnnnnnnnnnnnnnnnnnnnnnnnnnnnnnnnnnnnnnnnnnnnnnnnnnnnnnnnnnnnnnnnnnnnnnnnnnnnnnnnnnnnnnnnnnnnnnnnnnnnnnnnnnnnnnnnnnnnnnnnnnnnnnnnnnnnnnnnnnnnnnnnnnnnnnnnnnnnnnnnnnnnnnnnnnnnnnnnnnnnnnnnnnnnnnnnnnnnnnnnnnnnnnnnnnnnnnnnnnnnnnnnnnnnnnnnnnnnnnnnnnnnnnnnnnnnnnnnnnnnnnnnnnnnnnnnnnnnnnnnnnnnnnnnnnnnnnnnnnnnnnnnnnnnnnnnnnnnnnnnnnnnnnnnnnnnnnnnnnnnnnnnnnnnnnnnnnnnnnnnnnnnnnnnnnnnnnnnnnnnnnnnnnnnnnnnnnnnnnnnnnnnnnnnnnnnnnnnnnnnnnnnnnnnnnnnnnnnnnnnnnnnnnnncagaattctacaattccgtctctataaaaaaaaattcaaggagactttgaggccttatgacgtgaaggatgtgattgagcagtattctgctgggcatctcgacatgctttccaggataaagtaccttcagacgagnagaatagatatgattttcactcctggacctccctccacgccaaaacacaagaagtctcagaaagggtcagcgttcaccttcccatcccagcagtctcccaggnnnnnnnnnnnnnnnnnnnnnnnnnnnnnnnnnnnnnnnnnnnnnnnnnnnnnnnnnnnnnnnnnnnnnnnnnnnnnnnnncaggttcaggacatggggaagaagctggacttcctcgtggatatgcacatgcaacatatggaacggttgcaggtgcaggtcacggagtattacccaaccaagggcacttcctcgccagctgaggcagagaagaaagaggacaacaggtattctgatttgaaaaccatcatctgcaactattctgagacaggccccccggaaccgccctacagcttccaccaggtgcccattgacaaagtcagcccctatgggttttttgcacatgaccctgtgaacctgccccgagggggacccagtactggaaaggttcaggcagctcctccttcctcggcaacaacgtatgcagagaggcccacggttcttcctatcctgactcttctcgactcccgagtgagctgccactcccaggctgacctgcagggcccctattctgaccgaatctccccccagcagagacgtagcatcacgcgggacagcgacacacctctgtccctgatgtcggtcaaccacgaggagctggagaggtctccaagtggcttcagcatctcccaggacagagatgattatgtgtttggccccaatggggggtcgagctggatgagggagaagcggtacctcgccgagggtgagacggacacagacacggaccccttcacgcccagcggatccatgcctctgtcgtccacaggggatgggatttctgattcagtgtggaccccttccaacaagcccattt

SEQ ID NO: 27208 - DNA, 1619 bp, Macaca Mulatta
  misc_feature (1)...(1619): n = A,T,C or G
agagcagcctgtacagcgaggagggcctgggtgtgacagcgctcagcaccctctatggaggcatgctcctgtcctccatgttcctcccaccgctcctcattgagaggctgggctgcaaggggaccatcatcctctccatgtgtggctacgtggccttctccgtgggcaactttttcgccagctggtacnnnnnnnnnnnnnnnnnnnnnnnnnnnnnnnnnnnnnnnnnnnnnnnnnnnnnnnnnnnnnnnnnnnnnnnnnnnnnnnnnnnnnnnnnnnnnnnnnnnnnnnnnnnnnnnnnnnnnnnnnnnnnnnnnnnnnnnnnnnnnnnnnnnnnnnnnnnnnnnnnnnnnnnnnnnnnnnnnnnnnnnnnnnnnnnnnnnnnnnnnnnnnnnnnnnnnnnnnnnnnnnnnnnnnnnnnnnnnnnnnnnnnnnnnnnnnnnnnnnnnnnnnnnnnnnnnnnnnnnnnnnnnnnnnnnnnnnnnnnnnnnnnnnnnnnnnnnnnnnnnnnnnnnnnnnnnnnnnnnnnnnnnnnnnnnnnnnnnnnnnnnnnnnnnnnnnnnnnnnnnnnnnnnnnnnnnnnnnnnnnnnnnnnnnnnnnnnnnnnnnnnnnnnnnnnnnnnnnnnnnnnnnnnnnnnnnnnnnnnnnnnnnnnnnnnnnnnnnnnnnnnnnnnnnnnnnnnnnnnnnnnnnnnnnnnnnnnnnnnnnnnnnnnnnnnnnnnnnnnnnnnnnnnnnnnnnnnnnnnnnnnnnnnnnnnnnnnnnnnnnnnnnnnnnnnnnnnnnnnnnnnnnnnnnnnnnnnnnnnnnnnnnnnnnnnnnnnnnnnnnnnnnnnnnnnnnnnnnnnnnnnnnnnnnnnnnnnnnnnnnnnnnnnnnnnnnnnnnnnnnnnnnnnnnnnnnnnnnnnnnnnnnnnnnnnnnnnnnnnnnnnnnnnnnnnnnnnnnnnnnnnnnnnnnnnnnnnnnnnnnnnnnnnnnnnnnnnnnnnnnnnnnnnnnnnnnnnnnnnnnnnnnnnnnnnnnnctctctacggcgttctgtttgagaagagcaaggaagctgcctttgccaattaccgcctgtgggaggccctgggatacgtcattgcctttgggtacagcacatttttgtgtgtgcgagtcaagctctacattctgctgggggtcctgagcctgaccatggtggcatatgggcttgtggagtgtgtggaatccaagaacgcgatcagaccccacgctgcaggacaggcgaaccaggcagaagatgaagaaatagaaacaaaaatgtgagagcagcgaggtccgaggaggatgaactcagaaagcaccagccagaaagttttcttagaagatgcctcaggacatggagcgactcatcgtcaccatctcagtacaatttggccactgtgaagatatcatattatttcactctttatgtatttttttctattctaacaattttttagtccaccatcttatcaacagagatcaagtgtatacgtgaaggtatcagttaatttaattttagatacaaaagaaaaaagtacaatcagccaattagaatttgcctgaaatcataggctcaccctagttttattgctgtagttgtttttcagaattg

SEQ ID NO: 27209 - DNA, 680 bp, Macaca Mulatta
gcttgtccccagtatgacatcagcaacggtggacagcctggtgggggaggagagtatgaagttcaggtgagcaggccaggggtgggctggccaatgccctacagggaactcctgggctctgctgcccacgacccccaccccaggcctcagtgtgctcacctgcatgtcggcccaggggacgagctgactggtgcttcctgtactgctggggttaggcagggccagtgcccctggggagagagcccacagcccccaccaagggtctggggcttccccagaaaccgggccccactgccctgcctctcccaggagggttttggctggacgaatggcgtggtcctgatgctgctggaccgctatggtgaccggctgacctcagggtcccagctggctttcctggagccccactgcctggcggccacccttctgcccagcctcctgttcagcctcctgccgtggtgacagccctcccctcttcacctggccccagctcctgtcccattaaacctctgcaccagttcccatcttccgcctgcctcttcatgccctcctacctcccagcctgtcctcagagtcaagtggggggcaggttcatgacctggaggtcatgggttagggcctagctccctcctggaaccttgaacagggtggaaatcctgctctagggggaagacctatcc

SEQ ID NO: 27210 - DNA, 1108 bp, Macaca Mulatta
  misc_feature (1)...(1108): n = A,T,C or G
acaaaatgaaaatcaaatgccgtttccagaaggcctatcggagggctttggaccatgaggaggaggccctgtcatcgggcagtgtacaanagaggcagaagccatgttagatgagcctcaggagcaagcggagggctccctgactgtgtatgtgatctctgaacactcctcacttcttccccagnnnnnnnnnnnnnnnnnnnnnnnnnnnnnnnnnnnnnnnnnnnnnnnnnnnnnnnnnnnnnnnnnnnnnnnnnnnnnnnnnnnnnnnnnnnnnnnnnnnnnnnnnnnnnnnnnnnnnnnnnnnnnnnnnnnnnnnnnnnnnnnnnnnnnnnnnnnnnnnnnnnnnnnnnnnnnnnnnnnnnnnnnnnnnnnnnnnnnnnnnnnnnnnnnnnnnnnnnnnnnnnnnnnnnnnnnnnnnnnnnnnnnnnnnnnnnnnnnnnnnnnnnnnnnnnnnnnnnnnnnnnnnnnnnnnnnnnnnnnnnnnnnnnnnnnnnnnnnnnnnnnnnnnnnnnnnnnnnnnnnnnnnnnnnnnnnnnnnnnnnnnnnnnnnnnnnnnnnnnnnnnnnnnnnnnnnnnnnnnnnnnnnnnnnnnnnnnnnnnnnnnnnnnnnnnnnnnnnnnnnnnnnnnnnnnnnnnnnnnnnnnnnnnnnnnnnnnnnnnnnnnnnnnnnnnnnnnnnnnnnnnnnnnnnnnnnnnnnnnnnnnnnnnnnnnnnnnnnnnnnnnnnnnnnnnnnnnnnnnnnnnnnnnnnnnnnnnnnnnnnnnnnnnnnnnnnnnnnnnnnnnnnnnnnnnnnnnnnnnnnnnnnnnnnnnnnnnnnnnnnnnnnnnnnnnnnnnnnnnnnnnnnnnnnnnnnnnnnnnnnnnnnnnnnnnnnnnnnnnnnnnnnnnnnnngttgctctttgggattgctcagccccaggtgcctccaaaatgcctgctttcagggcctaagagtgaagggctaatgacctgggagctagaccggctgctctgggctcggtcagtggagaatctggccacagccaccaccaccctcacctccctggcacagcttctgggcaagatcagcaacattgtcattaaggacgatgtggcatctgaggt

SEQ ID NO: 27211 - DNA, 1292 bp, Macaca Mulatta
  misc_feature (1)...(1292): n = A,T,C or G
agatgagaacacagacatcgctgaaaacctctatcagaaagttaaaattctttgctgggttatgaccggccctcaaaacctagagaaaaaggccaaacatgtcaaagctacatgggcccagcgttgtaacaaagtgttgtttatgagttcagaagaaaataaagacttccctgctgtgggattgaaaaccaaagaaggcagagatcaactatactggaaaacaattaaagcttttcagtatgttcatgaacattatttagaagatgctgattggtttttgaaagcagaagatgacacatatgtcatactagacaatttgaggtggcttctatcgaaatacgaccctgaagaacccattnnnnnnnnnnnnnnnnnnnnnnnnnnnnnnnnnnnnnnnnnnnnnnnnnnnnnnnnnnnnnnnnnnnnnnnnnnnnnnnnnnnnnnnnnnnnnnnnnnnnnnnnnnnnnnnnnnnnnnnnnnnnnnnnnnnnnnnnnnnnnnnnnnnnnnnnnnnnnnnnnnnnnnnnnnnnnnnnnnnnnnnnnnnnnnnnnnnnnnnnnnnnnnnnnnnnnnnnnnnnnnnnnnnnnnnnnnnnnnnnnnnnnnnnnnnnnnnnnnnnnnnnnnnnnnnnnnnnnnnnnnnnnnnnnnnnnnnnnnnnnnnnnnnnnagggtcctggttgctgttctgatcttgcagtttcttttcactatgttgattctacaactatgtatgagttagaatacctcgtttatcatcttcgtccatatggttatttatacagatatcaacctaccttacctgaagatatactaaaggaaattagtcaagcaaacaaaaaggaagatacaaaagtgaagttaggaaacccttgaaagaaaatcatgagtgaacaaaggtaaaatgtctagcattgcactgagaaaggatttctgcatttctgacatagaacactggaatcccagtgaggagttctaagtgaacattccttatagaaacctttcacatgaatgactataaactgaagctttaaatgagctgtgaagtctgttaaaatgtgttttgatacagtnnnnnnnnnnnnnnnnnnnnnnnnnnngaacttgtgtttttaaaatggtggccaggtagaggaattagaaaagagattttgttgcctgttttctgaccgtctgtattattgtcactgagaaactaaaataattaaatttactaaaactacactgcaccatgttagtaataaacagatctgccttaaagaaaattttagaaagaaatattgttgctcagtgtt

SEQ ID NO: 27212 - DNA, 625 bp, Macaca Mulatta
  misc_feature (1)...(625): n = A,T,C or G
agaggaaagaaccctgggaagggccggccaggggagaatgagctggggatgggagaagtcgcatgaagaatcctctgcccggagcctgcagactccaacccctcagctggagagtcaggagccccacagtccccacagcaataggaagcaccagctcctggtcccgaaaaaggagggccccagctccaggaactgcggcctgccagggagctgagaacacgcgcactctagggaaaggacagggctccagggaccctgaagcgaagtcgctccgagcaccgggaaatgtggctgcctcagcggcagagctggaagggccctcgaatgccattcacaggaacagcccggggacccagggacgtcagaagggctggtttgtccgaaaagtgagaggaggaggaagagagnagcctgcgagatcaagttacagactacatgagcttctacctccagatgtgtcagggtgcatctcnnnnacttggattttagccaggcacgatggctcaggcctgtaatcccagctctggaagctgaaggatagcctgagcccaggagttcgaggctgcagtgagctatgatctcaccactacactccagcctgggtgacagaaagagaccttgtctc

SEQ ID NO: 27213 - DNA, 820 bp, Macaca Mulatta
  misc_feature (1)...(820): n = A,T,C or G
aaagcaaaataataagaaggaaaaattccaggaggaaaaatgaattgtcttcactcttcattctttgaaggatttactgcaaaaagtacatgaagagcagctggtcaacctgctcactgttctgtctccaaatgagacacattaaagggtagcctacaaatgttttcaggcttctttcaaagtgtaagcacttctgagctctttagcattgaagtgttgaaagcaacccacatggaaagaccgtttcttatttgtgatttgtggctgccagggtgtggcctgtactgggttgtccaggaagacccagtgctgtttcttccgcatattcacatatgtgtctgtgtgtatatatgtattttcaatttaagggttagtatggaatcagctgctacaagaatgnnnnnnnnnnnnnnnnnnnnnnnnnnnnnnnnnnnnnnnnttttcgtgagctgagtgatatagtgtaataaacaaaatcatggagctgaggaggtaccttgtcaatgtaaaggggcatataaatgaaagagatacttgtgttgataaagagagccgcggtcctagacatagttctgtcacaaagtagttgtccctttgtggacaagtttcccaaactccctggacctctgcttccccatctgttaaatgagaggatagagcatggttgattcccagcattcagtggtcctgtcaagcagcctcacaggtgagctctaattcccgttgggtagatgaggggatgacaaagaacagtttttaagttatataggaaacatggttattagtgtagcgctattgagatttcagttgaattcatgtg

SEQ ID NO: 27214 - DNA, 530 bp, Macaca Mulatta
aggtcactccccagaatggtacagcaaaggctttggacatctgtgtgcggccgaagttgccaggattagaaactctttccagcccctccttgctgagggcccagaaactaaaatctgagttttccccagtgtgacatcaaactcagggaagaggaaactaaagtaacgcgtatggcagagagtgtgcacgtgagaaagcgagagaaagaggaactgacggacgtggttaatgcctaaaaatggaaacgttaagaagttggaatgttggagatgcaagaatttccaagaactttcttagccttcctggagatggctatatccctactaatataattttaaaatgagaacatttatctatattacttaaaattaaatggattattccttgtgcattgcctaatttgctatttaaaggcttctaagaagcgtatatacttaactgtaaataaatgtatgtataacgtatgtacatatgtgtgtatatctccatctttactgtatataggtaaaataccaattttatatagaat

SEQ ID NO: 27215 - DNA, 850 bp, Macaca Mulatta
gcctccttgacatcctgcctcccctgtatccttcctcaagtcttccccctcctgcctccttctccccagacccctcacctgtccccaccacatgcactgtgtcaccgtccttccccaggattgcctacctgtccccactaactgggtcttcttgcctgttctccctcacatgctctttttcacctctcctcaggtgagggagcgccccggggccttggaggctgagctggccctgacgctgaaagtcctggaggctgccgctgacactgactcggccctagaggtcgtcctagaccagccccttcacaccctgaagcacatcctttcccagctccaggcctgtgtgagtcatcggggcctgggcactcaggtctgtgagttctgagcagcatccttcccctgtggtggctcaggctccgcctcacacaccgccctcctctgcccacagatccaggctcagcccacagcagggcccaggacccggggccgcctccaccactggctacaccggctccaggaggcctccgaaaaggtgagcaacccaggaagagaagaaccagggtctgaggagccaataggagcccagaccccggacagcccgtgacccatcccctcctcccctacaggagtcccctggctgccttgaggcgtctgtcaccttcaacctcttccgcctactcatacgggacctgacatgtgtcgccaatggggacctgtgtctgagaacgtcaacccaccccgaatccacctgacaccccacaccttatttatgcactgagccctactccttccttaaattatttcctctcaccctttatttatgaagctacagccctgactgagacatagg

SEQ ID NO: 27216 - DNA, 755 bp, Macaca Mulatta
gggaaggtcagaggtcgcggggcagaggcgttgcagccgctggcccagtcactatgtagtggaggggcagacaccctctcacaaattctggaaggttcttagtctcgactagggcagtagccccaggactcctagtcgccggcttcaggtcactgccggctgaacggagctgccgtcgccatgtttggctgcttggtggcggggaggctggtgcaaacagctgcacagcaagtggcagaggataaatttgtttttgacttacctgattatgaaagtatcaaccatgttgtggtttttatgctgggaacaatcccatttcctgagggaatgggaggatctgtctacttttcttatcctgattccaatggaatgccagtatggcaactcctaggatttgtcacgaatgggaagccaagtgccatcttcaaaatttcaggtcttaaatctggagaaggaagccaacatccttttggagccatgaatattgtccgaactccatctgttgctcagattggaatttcagtggaattattggacagtatggctcagcagactcccgtaggtaatgctgctgtatcctcagttgactcattcactcagttcacacaaaagatgttggacaatttctacaattttgcttcatcatttgctgtctctcaggcccagatgacaccaagcccatctgaaatgttcattccagcaaatgtgggttctgaaaagggtatgaaaaaactttccaaagacgacttagcact

SEQ ID NO: 27217 - DNA, 609 bp, Macaca Mulatta
  misc_feature (1)...(609): n = A,T,C or G
ctgtcggttacaattgcatattgaatattacaacaaggagtgctaactctnaaattacgaggccaaactgaagctctttatatactaacaaaatgtaacagtactcgttttgaatttatatttacaaatttggttcctggaagccctagactttttacttctgtgatggcagtacacagnnnnnnnnnnnnnnnnnnnnnnnnnnnnnnnnnnnnnnnnnnnnnnnnnnnnnnnnnnnnnnnnnnnnnnnnnnnnnnnnnnnnnnnnnnnnnnnnnnnnnnnnnnnnnnnnnnnnnnnnnnnnnnnnnnnnncagggcaatttaggaaccttttttattaccaatgtgagaattgtatggcatgcaaatatgaatgacagttttaatgtcagtataccatatctgcaaattnnnnnnnnnnnnnnnnnnnnnnnnnnnnnnnnnnnnnnnnnnnnnnnnnnnnnnnnnnnnnagagtggtggatatgttcttggctttaaaatagatcctgtggaaaaactacaagaatcagttaaggaaatcaattcacttcacaaagtctattctgccagtcccatatttggagttgattatgagatggaagaaaag

SEQ ID NO: 27218 - DNA, 978 bp, Macaca Mulatta
ggggcctttctcgcttcctcggcgctgcctacggaggtggcaggcatctcctcctcgaaggcatcagggccgcgctcggaccccttgtgaagcccaagatcgtcaagaaaagaacgaagaagttcatccggcaccaggcagaccgatatgtcaaaattaggcggaactggcggaaacccagaggcattgacaacagggttcgtggaagattcaagggccagatcttgatgcccaacattggttatgggagcaacaaagaaacaaagcacatgctgcccagtggcttccggaagttcctggtccacaacgtgaaggagttggaagtgctgctgatgtggaacaaatcttagtgtgccgagattgctcacaatgtttcttccaagaaccgcaaagccgtcgtggaaagagctgcccagctggccatcagggtcaccaaccccagcgccaggctgcgcagtgaagaaaatgagtagacaggtggtgtgcacgttttctgtttaaataaatgtaaaaggtgccatcttccctaaaatatcctttaacacaatagacttgttctggcccctcacgcccctccaaaaatctttttagaaccaattcaggtttggcgcacaaggggcccggataaggtagggtagaaaaatgggttaaataaccttgtttgcctaagggaaaatcccgtggaacaataaaacaaaatggcctttggaggttcctcaaccataaataaaaaaacaccccggcgggcaaacggagcgtttctgaaacaatcccaaaaggggatttctgaagggccattaacgggaatccatatcaaagaggatggccaacgccaaactctgaataataaaataaagccccccgtcccttgccaatttattggaaaaaaatgggtggtgaatttccactttaaggcctttcttcgccaaaattgtgagaacccatctccaaaagagcgcatttgattgaaacccctaa

SEQ ID NO: 27219 - DNA, 918 bp, Macaca Mulatta
  misc_feature (1)...(918): n = A,T,C or G
atgacctgcggatcaggatttggtggccgcgccttcagctgcatctcggcctgcgggccccggcctggccgctgctgcatcaccgccgccccctaccgtggcatctcctgctaccgcggcctctctgggggctttggcagccacagcgtgtgcggaggctatagggccggctcctgcggacgcagcttcggctaccgctctgggggcgtgtggggacccagccccccatgcatnnnnnnnnnnnnnnnnnnnnnnnnnnnnnnnnnnnnnnnnnnnnnnnnnnnnnnnnnnnnnnnnnnnnnnnnnnnnnnnnnnnnnnnnnnnnnnnnnnnnnnnnnnnnnnnnnnnnnnnnnnnnnnnnnnnnnaggtgcgcttcctggagcagcagaacaagctgctggagacaaagctgcagttcttccagaaccgcgagtgttgccagagcaacctggagcccctgttcgagggctacatcgagactctgcggcgggaggccgagtgcgtggaggctgacagtgggaggctggcctcagagctcaaccacgtgcaggaggtgctggagggctacaagaagaagtnnnnnnnnnnnnnnnnnnnnnnnnnnnnnnnnnnnnnnnnnnnnnngagctctaacactccccacctttccaggatgtggactgcgcctacctccgcaagtcagacctggaggccaacgtggaggccctgatccaggagatcgacttcctgaggcggctgtatgaggaggnnaggagatccgcgttctccagtcccacatctcagacacctctgtggttgtcaagctggacaacagccgggacctgaacatggactgcatcgtcgccgagatcaaggcacagtacgacgacattgtcacccgcagccgggccgaggccgagtcctggtaccgcagcaag

SEQ ID NO: 27220 - DNA, 114 bp, Macaca Mulatta
gaaagcccgcttatctaccattttatttactgacaactgtgaagtaacccatgaccagctgtgtgaattgcttaagtatgcagttctgggcaaatccaatgttccaaaacccag

SEQ ID NO: 27221 - DNA, 511 bp, Macaca Mulatta
cccaggcagcccccactggatccccaggctcctgcagagatggaagcagggtgggtggccctgggccagcaggcagaggggcaggctcagacaggcaccttcctctgcctgggcagattatcagtgccctggaggaggaccctgtgggccagaagctgcagctggcctgccgcttgcagcaggttgccgccctggtggagaacaaagtgactgacctgtgagctctggctcagacagcagcaagccggatccaccaccaccgcagtgccttatgatcccggaaccgagccagccactgaggggagctggcagagcctgggggcgcagggtgcacagccaggcgctgtgcccagcagtgggctccctgcctgccacctcccctgccagcccacccactttccccccacatgggattatttctaatttataaggaccccccccttcttccccctctccccactatatttatttgcctgctggaaaatcacatctggaaataaaatagaaatat

SEQ ID NO: 27222 - DNA, 382 bp, Macaca Mulatta
agatttggatcctacaaagaaggacacaattatgaaaacaaccatcattttcatatgaatactcctaaatactttttatgaaacatttaaaacaagaagctattggctgggcaaatctaagaaaaaaagtatgtaagatgaaaagaagagattaatgaaagtgggaaagtacatatgaacaacctcaacttaaaaacaaacatggtatctatacagtgggaaattacctcaatttataaaccatgttgcttaataaaaacatttctccaaattgttttccctaaattttgataaaaaatagaatgtggggtaatataagaaagtttcaccatggagttaaaataattaaaaacgtcttatctttttaaggtttagaaatagg

SEQ ID NO: 27223 - DNA, 448 bp, Macaca Mulatta
  misc_feature (1)...(448): n = A,T,C or G
ctcagcattcatagacagacgctgttaaaattttggcatatttcctgctgatttttttctacctgctgatttttgcacagctgagataattttgaacagagaattttgtatctnnnnnnnnnnnnnnnnnnncacacaaaaacaaaacaagatataaaaatggatcataaatatttttctaaatcctgaaaaatgcatagacatattttagtgcctgtatttcacgggacggacataccataatttacttacccagtcctttttgttagatgtttaaattgttttcaagcttctcagtactggaaataatactgagatagacatttttagttgaagttatttcatttcaggttatattctcttgggtcagagaatgaatggttctaaggcttttcaaaagagctggtcagtgtttatgcctctggcagtttttgagagtgcttaatca

SEQ ID NO: 27224 - DNA, 413 bp, Macaca Mulatta
ctgatattcacctctccacccccaccccctaaaagggtgtagcagttcctgatgtgatggactatgactgtatcatgtattagatccttccctgtccctccaccttcctcatctgttacagttcaggttttttgggtggagaagtagaagccagctaaggtggcctgacttctattacaaatttgttccagagctagggtaatgggagagtctattttcaacacccagcccagcactaagttttaccccacatcacctccatcatggtgcacatgggacagaagagcttacagactgctaagggtagctcaggaagatggccagatgggggaggctgccaggattccaagagcaggagttctggggcactgaagaaaaagcaattaaatcacaaaggagtcaggtgtatgttc

SEQ ID NO: 27225 - DNA, 1178 bp, Macaca Mulatta
  misc_feature (1)...(1178): n = A,T,C or G
naggattcaggggacaagggcagccccttcctgaacatttactgcgactatgagcccggctctgagtacaaccttgactccattgccnnnnnnnnnnnnnnnnnnnnnnnnnnnnnnnnnnnnnnnnnnnnnnnnnnnnnnnnnnnnnnnnnnnnnnnnnnnnnnnnnnnnnnnnnnnnnnnnnnnnnnnnnnnnnnnnnnnnnnnnnnnnnnnnnnnnnnnnnnnnnnnnnnnnnnnnnnnnnnnnnnnnnnnnnnnnnnnnnnnnnnnnnnnnnnnnnnnnnnnnnnnnnnnnnnnnnnnnnnnnnnnnnnnnnnnnnnnnnnnnnnnnnnnnnnnnnnnnnnnnnnnnnnnnnnnnnnnnnnnnnnnnnnnnnnnnnnnnnnnnnnnnnnnnnnnnnagaggttctgcagatgtggtcggtcctgcaggacggccccatctccagagtgatcgtgttcagcctctcggcccccaagnnnnnnnnnnnnnnnnnnnnnnnnnnnnnnnnnnnnnnnnnnnnnnnnnnnnnnnnnnnnnnnnnnnnnnnnnnnnnnnnnnnnnnnnnnnnnnnnnnnnnnnnnnnnnnnnnnnnnnnnnnnnnnnnnnnnnnnnnnnnnnnnnnnnnnnnnnnnnnnnnnnnnnnnnnnnnnnnnnnnnnnnnnnnnnnnnnnnnnnnnnnnnnnnnaggaactgctgtgttataagtaccagggcccagagtcggggctccctgaggcccagcacgggttccgcctgctgtggcagcggggcttctccagtcccctgctggccatggctcacgtggacctgaccggggacgggctgcaggagcttgccgtggtctccctgaagggcgtgcacatcctgcagnnnnnnnnnnnnnnnnnnnnnnnnnnnnnnnnnnnnnnnnnnnnnnnnnnnnnnnnnnnnnnnnnnnnnnnnnnnnnnnnnnnnnnnnnnnnnnnnnnnnnnnnnnnnnnnnnnnnnnnnnnnnnnnnnnnnnnnnnnnnnnnnnnnnnnnnnnnnnnnnnnnnnnnnnnnnnnnnnnnnnnnnnnnnnnnnnnnnnnnnnnnnnnnnnnnnnnnnnnnnnnnnnnnnnnnnnnnnnnnnnnnnnnnnnnnnnnnnnnnccccagctaacccacttctctctctgtgcctcagtgtccctatttg

SEQ ID NO: 27226 - DNA, 4415 bp, Macaca Mulatta
  misc_feature (1)...(4415): n = A,T,C or G
gttcctgcgtgtgctgagccggtcgctgccgctcttcctgacgctggcctggatctactccgtgacgctgacggtgaaggccgtggtgcgggagaaggagacacggctgcgggacaccatgcgcgccatggggctcagccgcggggtgctctggctcggctggttcctcagctgcctcgggcccttcctgctcagcgccgcgctgctggttctnnnnnnnnnnnnnnnnnnnnnnnnnnnnnnnnnnnnnnnnnnnnnnnnnnnnnnnnnnnnnnnnnnnnnnnnnnnnnnnnnnnnnnnnnnnnnnnnnnnnnnnnnnnnnnnnnnnnnnnnnnnnnnnnnnnnnnnnnnnnnnnnnnnnnnnnnnnnnnnnnnnnnnnnnnnnnnnnnnnnnnnnnnnnnnnnnnnnnnnnnnnnnnnnnnnnnnnnnnnnnnnnnnnnnnnnnnnnnnnnnnnnnnnnnnnnnnnnnnnnnnnnnnnnnnnnnnnnnnnnnnnnnnnnnnnnnnnnnnnnnnnnnnnnnnnnnnnnnnnnnnnnnnnnnnnnnnnnnnnnnnnnnnnnnnnnnnnnnnnnnnnnnnnnnnnnnnnnnnnnnnnnnnnnnnnnnnnnnnnnnnnnnnnnnnnnnnnnnnnnnnnnnnnnnnnnnnnnnnnnnnnnnnnnnnnnnnnnnnnnnnnnnnnnnnnnnnnnnnnnnnnnnnnnnnnnnnnnnnnnnnnnnnnnnnnnnnnnnnnnnnnnnnnnnnnnnnnnnnnnnnnnnnnnnnnnnnnnnnnnnnnnnnnnnnnnnnnnnnnnnnnnnnnnnnnnnnnnnnnnnnnnnnnnnnnnnnnnnnnnnnnnnnnnnnnnnnnnnnnnnnnnnnnnnnnnnnnnnnnnnnnnnnnnnnnnnnnnnnnnnnnnnnnnnnnnnnnnnnnnnnnnnnnnnnnnnnnnnnnnnnnnnnnnnnnnnnnnnnnnnnnnnnnnnnnnnnnnnnnnnnnnnnnnnnnnnnnnnnnnnnnnnnnnnnnnnnnnnnnnnnnnnnnnnnnnnnnnnnnnnnnnnnnnnnnnnnnnnnnnnnnnnnnnnnnnnnnnnnnnnnnnnnnnnnnnnnnnnnnnnnnnnnnnnnnnnnnnnnnnnnnnnnnnnnnnnnnnnnnnnnnnnnnnnnnnnnnnnnnnnnnnnnnnnnnnnnnnnnnnnnnnnnnnnnnnnnnnnnnnnnnnnnnggtgggatgcaacggaagctgtctgtggccattgcctttgtgggtggctcccaagttgttttcctggacgagcctacagctggtgtggatcctgcttcccgccgcggcatttgggagctgctgctcaaataccgagaaggtnnnnnnnnnnnnnnnnnnnnnnnnnnnnnnnnnnnnnnnnnnnnnnnnnnnnnnnnnnnnnnnnnnnnnnnnnnnnnnnnnnnnnnnnnnnnnnnnnnnnnnnnnnnnnnnnnnnnnnnnnnnnnnnnnnnnnnnnnnnnnnnnnnnnnnnnnnnnnnnnnnnnnnnnnnnnnnnnnnnnnnnnnnnnnnnnnnnnnnnnnnnnnnnnnnnnnnnnnnnnnnnnnnnnnnnnnnnnnnnnnnnnnnnnnnnnnnnnnnnnnnnnnnnnnnnnnnnnnnnnnnnnnnnnnnnnnnnnnnnnnnnnnnnnnnnnnnnnnnnnnnnnnnnnnnnnnnnnnnnnnnnnnnnnnnnnnnnnnnnnnnnnnnnnnnnnnnnnnnnnnnnnnnnnnnnnnnnnnnnnnnnnnnnnnnnnnnnnnnnnnnnnnnnnnnnnnnnnnnnnnnnnnnnnnnnnnnnnnnnnnnnnnnnnnnnnnnnnnnnnnnnnnnnnnnnnnnnnnnnnnnnnnnnnnnnnnnnnnnnnnnnnnnnnnnnnnnnnnnnnnnnnnnnnnnnnnnnnnnnnnnnnnnnnnnnnnnnnnnnnnnnnnnnnnnnnnnnnnnnnnnnnnnnnnnnnnnnnnnnnnnnnnnnnnnnnnnncagggctctgggccagacaccgtgggccgggtacagggctgggcactgacccgccagcagctccaggcactgcttctcaagcgctttctgcttgcccgccgcagccgccgcggcctgtnnncccagatcgtgctgcctgccctctttgtgggcctggcccttgtgttcagcctcatcgtgcctcctttcgggcactacccggctctgcggctcagtcccaccatgtacggtgctcaggtgtctttcttcannnnnnnnnnnnnnnnnnnnnnnnnnnnnnnnnnnnnnnnnnnnnnnnnnnnnnnnnnnnnnnnnnnnnnnnnnnnnnnnnnnnnnnnnnnnnnnnnnnnnnnnnnnnnnnnnnnnnnnnnnnnnnnnnnnnnnnnnnnnnnnnnnnnnnnnnnnnnnnnnnnnnnnnnnnnnnnnnnnnnnnnnnnnnnnnnnnnnnnnnnnnnnnnnnnnnnnnnnnnnnnnnnnnnnnnnnnnnnnnnnnnnnnnnnnnnnnnnnnnnnnnnnnnnnnnnnnnnnnnnnnnnnnnnnnnnnnnnnnnnnnnnnnnnnnnnnnnnnnnnnnnnnnnnnnnnnnnnnnnnnnnnnnnnnnnnnnnnnnnnnnnnnnnnnnnnnnnnnnnnnnnnnnnnnnnnnnnnnnnnnnnnnnnnnnnnnnnnnnnnnnnnnnnnnnnnnnnnnnnnnnnnnnnnnnnnnnnnnnnnnnnnnnnnnnnnnnnnnnnnnnnnnnnnnnnnnnnnnnnnnnnnnnnnnnnnnnnnnnnnnnnnnnnnnnnnnnnnnnnnnnnnnnnnnnnnnnnnnnnnnnnnnnnnnnnnnnnnnnnnnnnnnnnnnnnnnnnnnnnnnnnnnnnnnnnnnnnnnnnnnnnnnnnnnnnnnnnnnnnnnnnnnnnnnnnnnnnnnnnnnnnnnnnnnnnnnnnnnnnnnnnnnnnnnnnnnnnnnnnnnnnnnnnnnnnnnnnnnnnnnnnnnnnnnnnnnnatggcctcctcggtggatgtcctcgtctccatctgtgtggtctttgccatgtccttcgtcccggccagcttcactcttgtcctcattgaggagcgagtcacccgagccaagcacctgcagctcatggggggcctgtcccccaccctctactggctaggcaactttctctgggacatgnnnnnnnnnnnnnnnnnnnnnnnnnnnnnnnnctcatctttctggccttccagcagagggcatatgtggcccctgccaacctgcctgctctcctgctgttgctactactgtatggnnnnnnnnnnnnnnnnnnnnnnnnnnnnnnnnnnnnnnnnnnnnnnnnnnnnnnnnnnnnnnnnnnnnnnnnnnnnnnnnnnnnnnnnnnnnnnnnnnnnnnnnnnnnnnnnnnnnnnnnnnnnnnnnnnnnnnnnnnnnnnnnnnnnnnnnnnnnnnnnnnnnnnnnnnnnnnnnnnnnnnnnnnnnnnnnnnnnnnnnnnnnnnnnnnnnnnnnnnnnnnnnnnnnnnnnnnnnnnnnnnnnnnnnnnnnnnnnnnnnnnnnnnnnnnnnnnnnnnnnnnnnnnnnnnnnnnnnnnnnnnnnnnnnnnnnnnnnnnnnnnnnnnnnnnnnnnnnnnnnnnnnnnnnnnnnnnnnnnnnnnnnnnnnnnnnnnnnnnnnnnnnnnnnnnnnnnnnnnnnnnnnnnnnnnnnnnnnnnnnnnnnnnnnnnnnnnnnnnnnnnnnnnnnnnnnnnnnnnnnnnnnnnnnnnnnnnnnnnnnnnnnnnnnnnnnnnnnnnnnnnnnnnnnnnnnnnnnnnnnnnnnnnnnnnnnnnnnnnnnnnnnnnnnnnnnnnnnnnnnnnnnnnnnnnnnnnnnnnnnnnnnnnnnnnnnnnnnnnnnnnnnnnnnnnnnnnnnnnnnnnnnnnnnnnnnnnnnnnnnnnnnnnnnnnnnnnnnnnnnnnnnnnnnnnnnnnnnnnnnnnnnnnnnnnnnnnnnnnnnnnnnnnnnnnnnnnnnnnnnnnnnnnnnnnnnnnnnnnnnnnnnnnnnnnnnnnnnnnnnnnnnnnnnnnnnnnnnnnnnnnnnnnnnnnnnnnnnnnnnnnnnnnnnnnnnnnnnnnnnnnnnnnnnnnnnnnnnnnnnnnnnnnnnnnnnnnnnnnnnnnnnnnnnnnnnnnnnnnnnnnnnnnnnnnnnnnnnnnnnnnnnnnnnnnnnnnnnnnnnnnnnnnnnnnnnnnnnnnnnnnnnnnnnnnnnnnnnnnnnnnnnnngacgagccgaccacaggcatggccttcaacgcacggcgcttcctctggaacagccttttggccgtggtgcgggagggtcgttcagtgatgctcacctcccanagcatggaggagtgtgaagcgctctgctcacgcctggccatcatggtgaatgggcggttctgctgcctgggcagcccgcaacatctcaagggca

SEQ ID NO: 27227 - DNA, 167 bp, Macaca Mulatta
agcataacctgtttgtgaaactgcaaaagggttgacatggctgaagcagaagatgggttggtactgaatggttgggagagagatgtaggggctgaccctgaaggatgttgcattccatgctaaggagacctgattttatcttgtaagaggtgggcaacccctgaagc

SEQ ID NO: 27228 - DNA, 715 bp, Macaca Mulatta
ggagcatgttagagagaagctcaccagaagtgatgaagggaggccttcgtttgtgaatgacagtgttctcctggcaaagaggaacttcacatgcatgctcggtggcaaggattttactggtgattcagatcttcaacaacaggcttttcccagtgggtggaagccacacagagacactcgtggtgtggaggcctttcaaagtggacagaatgattacagcaacaaacaatgtggaaaagacttttgccgccagcgtatgctgtttgagcaccagaaaatcctcacagaggaaaggccttatgagtgcagtgaatgtggcaaattttttaggtacaactccgaccttattaaacatcagcgaaatcatactggagaaaggccttataagtgtagtgaatgtggaaaagccttcagcctcaaatataatgttgttcaacaccagaaaattcacactggagaaaggccttatgagtgcagtgaatgtgggaaagctttccttagaaagtctcacctacttcagcaccagagaattcacaccaggccaaggccttatctgtgtagtgaatgtgggaagactttccttacacaggctcaccttgttggtcaccagaaaattcatactggagaacggccttatggatgcaatgaatgtgggaaatactttatgtacagttcagcactcattagacatcagaaagttcacacaggagaaagg

SEQ ID NO: 27229 - DNA, 547 bp, Macaca Mulatta
cttggccccgcgcagcgcctggtcactcgctctcctctggggactgcagagaagcaggacctcgggccatggggtgttttgaatgctgtatcaaatgcctgggaggcattccctatgcttctctgattgccaccatcctgctctatgcgggtgtcgccctgttctgtggctgcggtcatgaagccctttctggaactgtcaacattctgcaaacctactttgagatggcaagaactgctggagacacactggatgtttttaccatgattgacatctttaagtatgtgatctacggcatcgcagctgcgttctttgtgtatggcattttgctgatggtggaaggcttcttcacgactggggccatcaaagatctctatggggatttcaaaatcaccacttgtggcagatgtgtgagcgcttggttcattatgctgacataccttttcatgttggcctggctgggagtcacggctttcacctcactgccagtttacatgtacttcaatctgtggaccatctgccggaacaccacattagtggagggagc

SEQ ID NO: 27230 - DNA, 283 bp, Macaca Mulatta
cgagagtctgggagtttacctccaaataaattgaataaattgttacagaggtttcctaacaaacctcacctcagctgaaaatggacaagtattttcaatgactgaaatatagcttctgacaactatgcggaggcattttagagacattggcattgccatgccctctttggagggtagaagagacaaaacacttttttcaccctttgaaatcatagtatgggtagaagttatgatatatcttgaaatgaaatcctctgaagagaacttggccttttgttgtgaa

SEQ ID NO: 27231 - DNA, 557 bp, Macaca Mulatta
  misc_feature (1)...(557): n = A,T,C or G
gatggcttccctgttatgttgtcatgaggcatgtggcacaagtgtcatcgtaggggtacctcctgattcccagaacctctcaataaaccctatgctgctactgactggacgcacctggaagggagctatttttggtgnnnnnnnnnnnnnnnnnnnnnnnnnnnnnnnnnnnnnnnnnnnnnnnnnnnnnnnnnnnnnnnnnnnnnnnnnnnnnnnnnnnnnnnnnnnnnnnnnnnnnnnnnnnnnnnnnnnnnnnnnnnnnnnnnnnnnnnnagtatccgtaccatcctaacgttttgagacaatacagatgttttccattgtggcagtcttcagcctcctatactctacctgatctgcagcaacagctgggaaatatcattaattctgctcttcagagatgttatcaataaattacatgtgggggctttccaaagaaattgaaattgatgtaaaattatttttcaagcaaatgtctaaaatccaaatgagaactaaataaagtgttgaacatcagctggggaattgaagccaataaactgttcttctcaaccatt

SEQ ID NO: 27232 - DNA, 159 bp, Macaca Mulatta
tcttctgtattctctacataaatattgataatgtcataacacttttagactctacttgttctctatcatgttcactaaattcagcgcctggaggtactatgctctgttgcattgtactttaaatgtagagatttatttgatgaaatttagtgcatgcca

SEQ ID NO: 27233 - DNA, 3078 bp, Macaca Mulatta
  misc_feature (1)...(3078): n = A,T,C or G
tcccgcccgggggtcctggttcggagctcgccttgaagggagtcgcctcggtctctattggggcgcgcgcagatgtgagcgtgcgagagttgtgtagggggttttgttccctccgaaactgagacccagggcgcccagtgggcaccggtgccttgactctgtcctttctgaagccgctggtccgagctgtctggcctcagtttcccttcgacttttctccactctgccagccctcactgctgcccgtcattgttctcgcagttagatgggggtgctttgtgacggctgccaaggtggggtgtgttctctttgtcccatttttcaaacagaacaaggcctccaaggctgaccccagacaacccacccccttggaccccacttcaccttattgcactgattttttttatcaagtagtagtttattgtacaggagccacgccctgatttcttaaaggcgccttgcactctggccatgtgttatctctgcagctggtgtgtgggaggcctcttgtgagccacctgttttcccgcctccaccacgccctcgaggatttagggatgccaggggggaagaaggtggttgggggtggcagcagcggtgccactccaacatccgctgtgaccaccgccccctctggggtcaggcgtttggagaccagccaaggagcctcagcccagagagatgaggagccagaagaggaaggggnnnnnnnnnnnnnnnnnnnnnnnnnnnnnnnnnnnnnnnnnnnnnnnnnnnnnnnnnnnnnnnnnnnnnnnnnnnnnnnnnnnnnnnnnnnnnnnnnnnnnnnnnnnnnnnnnnnnnnnnnnnnnnnnnnnnnnnnnnnnnnnnnnnnnnnnnnnnnnnnnnnnnnnnnnnnnnnnnnnnnnnnnnnnnnnnnnnnnnnnnnnnnnnnnnnnnnnnnnnnnnnnnnnnnnnnnnnnnnnnnnnnnnnnnngtacaatcacacagggacacagttctttgaaattaagaagagcagacctctgacaggnnnnnnnnnnnnnnnnnnnnnnnnnnnnnnnnnnnnnnnnnnnnnnnnnnnnnnnnnnnnnnnnnnnnnnnnnnttacctcaccaacagcatgcccaccctggagcgcttccccatcagcttcaagacctacttctcagggaactacttccgccacatcgtgctgggggtgaacttcgcgggccgctacggcgcgctgggcatgagccggcgcgaggacctgatgtacaagccgcccgccttccgcacgctcagcgagctcgtgctggacttcgaggccgcctatggtcgctgctggcacgtgctcaagaaggtgaagctgggccagagcgtgtcgcacgacccgcacagcgtggagcagatcgagtggaagcactcggtgctggacgtggagcgcctgggccgcgatgacttccgcaaggagctggagcgccacgcccgcgacatgcggctcaannnnnnnnnnnnnnnnnnnnnnnnnnnnnnnnnnnnnnnnnnnnnnnnnnnnnnnnnnnnnnnnnnnnnnnnnnnnnnnnnnnnnnnnnnnnnnnnnnnnnnnnnnnnnnnnnnnnnnnnnnnnnnnnnnnnnnnnnnnnnnnnnnnnnnnnnnnnnnnnnnnnnnnnnnnnnnnnnnnnnnnnnnnnnnnnnnnnnnnnnnnnnnnnnnnnnnnnnnnnnnnnnnnnnnnnnnnnnnnnnnnnnnnnnnnnnnnnnnnnnnnnnnnnnnnnnnnnnnnnnnnnnnnnnnnnnnnnnnnnnnnnnnnnnnnnnnnnnnnnnnnnnnnnnnnnnnnnnnnnnnnnnnnnnnnnnnnnnnnnnnnnnnnnnnnnnnnnnnnnnnnnnnnnnnnnnnnnnnnnnnnnnnnnnnnnnnnnnnnnnnnnnnnnnnnnnnnnnnnnnnnnnnnnnnnnnnnnnnnnnnnnnnnnnnnnnnnnnnnnnnnnnnnnnnnnnnnnnnnnnnnnnnnnnnnnnnnnnnnnnnnnnnnnnnnnnnnnnnnnnnnnnnnnnnnnnnnnnnnnnnnnnnnnnnnnnnnnnnnnnnnnnnnnnnnnnnnnnnnnnnnnnnnnnnnnnnnnnnnnnnnnnnnnnnnnnnnnnnnnnnnnnnnnnnnnnnnnnnnnnnnnnnnnnnnnnnnnnnnnnnnnnnnnnnnnnnnnnnnnnnnnnnnnnnnnnnnnnnnnnnnnnnnnnnnnnnnnnnnnnnnnnnnnnnnnnnnnnnnnnnnnnnnnnnnnnnnnnnnnnnnnnnnnnnnnnnnnnnnnnnnnnnnnnnnnnnnnnnnnnnnnnnnnnnnnnnnnnnnnnnnnnnnnnnnnnnnnnnnnnnnnnnnnnaaggacctctgagcagaaagttcccagggcctaaccgagtctacttgctcagtcccagctctgcctgttactgtagcccacgggctccctgcagagggtctgggcttggtggaggacccagaatggcactgaggccagcatggctatgggagctgagcagaccctgggcaccagtccaggagctgtggctgggcatgggttgatggggtgggatgcttgggcctgggtctttcccctggcagtgccaggagcccctgctggggaaatcaagaccagactaggatgcttgtgtcccaggcctgccttgcatcctttaacagcccatcttggcttggggttgcaatgatggctaggccagtcacttgtggcagggcatcagggccctggaagggaagaacctaggcacctggggttgtccccagcctgcccgtcagcatgagatacctggtgggaaagtgagaggatgcagagaggttggcacagccgggggtaggttctggtggcttaagcaacaaggaggtgcagggaaagggtgcagtgcagccactgaggagggacagctgggaactgggggatgcaagtgagaaagggatgtgggggagagtttaggatcaggctgcttgaggagtaatgggttgcctacagcaaggactagatggctgtttgtcaggaggcgtagaaaggtagaagggattcgggttatggaagggtaaatggatgagatgaccattaaggttttgtt

SEQ ID NO: 27234 - DNA, 705 bp, Macaca Mulatta
  misc_feature (1)...(705): n = A,T,C or G
gaggctcgtgccgggcaagtgcgtgaacnacacagcctgggctacagtgctactgcaagcagggcttctactacgacgggaacctgctggaatgcgtggacgtggacgaatgcctggacgagtccaactgccggaacggagtgtgtgagaacacgcgcggcggctaccgctgtgcctgcacgcccccagcggagtacagtcctgcgcagcgccagtgcctgagcccggaagagatggacgtggacgagtgtcaggacccggcagcctgccgccctggccgctgcgtcaacctgccgggctcctaccgctgcgagtgtcgcccgccctgggtgcccgggcccgccggccgcgattgccagctccccgagagcccggccgagcgcgccccggagcggcgcgacgtgtgctggagtcagcgcggagaggacggcatgtgcgcgggcccccaggccgggcctgcccttaccttcgacgactgctgctgccgccagggccgcggctggggcgcccagtgccgcccgtgcccgccgcgcggagcggggtcccagtgcccgacatcgcagagcgaaagcaattccttctgggacacgagccccctgctgctggggaagccccggagagatgaggacagttcagaggaggattcagacgagtgtcgctgtgtgagtggccgctgtgtgccgcggccaggcggcgccgtgtgcg

SEQ ID NO: 27235 - DNA, 468 bp, Macaca Mulatta
gcctttcgacattgttcatctcttgctcaacatcaaaaaactcacacagaagaaaaaccctaccagtgtaataaatgtgaaaagacctttagccagagctcccatctaactcagcatcaacgaattcacactggggagaagccctataagtgcaatgaatgtgacaaagcctttagccggagtactcatctgactgaacatcagaatactcatactggagagaaaccttataactgtaatgaatgcagaaagacttttagccagagcacatatctcattcagcaccagagaattcattcaggagagaagccttttggatgtaatgattgtggaaaatccttcagatatcgctctgctctcaacaaacatcagagactgcatcctggcatatgacaattccaggaacatcataaatttaggggatatatttactttagtttgtccttttgttaaggactgaagaatcac

SEQ ID NO: 27236 - DNA, 622 bp, Macaca Mulatta
gtgagctagcatctccacagcctgtcttcaaggcctcccttgtgtacacttcagtgagtgagctcacttcgatttttaatcccaccaccataagcacatactaattttatttatgattcaaacatgactcgtgccggccatccctgtaatagatggaaggtcagcccgggcttaaccacagagtactggcccttaatgcctgagctcagagctctggcctcctgctcagactgaaggcacctcctctggcctcacctaagcctcttctaaaatacgtgttgaatgaatccatgttctggaacccccagggcgggagaagtagggaggactttgtttaagcagcatacacctaaattgggggtttaaacatttaagtaggagcttggggtggaaagagggacggctggctgggccatctgagcagaaggtagtaatgaaacacctcagttgggctcttgagagcccttaggaagcaggagaggcaacacctctggctactctggtgtggccaagttcagaggaggtggtggtggggcaggcgtgatgtcagcaggagccctgcaggctgggtgggcaggacgtgtggttggggccactgaaactaggtctaggagggagaaca

SEQ ID NO: 27237 - DNA, 3786 bp, Macaca Mulatta
  misc_feature (1)...(3786): n = A,T,C or G
tgggtcgctcgggaaagttgccctctggtgtctcagctaagttgaagcgctggaagaaaggccacagcagcgacagcaatcccgccatctgccgccaccgccaggccgcccgcagccgcttcttcagccggccgtcaggnnnnnnnnnnnnnnnnnnnnnnnnnnnnnnnnnnnnnnnnnnnnnnnnnnnnnnnnnnnnnnnnnnnnnnnnnnnnnnnnnnnnnnnnnnnnnnnnnnnnnnnnnnnnnnnnnnnnnnnnnnnnnnnnnnnnnnnnnnnnnnnnnnnnnnnnnnnnnnnnnnnnnnnnnnnnnnnnnnnnnnnnnnnnnnnnnnnnnnnnnnnnnnnnnnnnnnnnnnnnnnnnnnnnnnnnnnnnnnnnnnnnnnnnnnnnnnnnnnnnnnnnnnnnnnnnnnnnnnnnnnnnnnnnnnnnnnnnnnnnnnnnnnnnnnnnnnnnnnnnnnnnnnnnnnnnnnnnnnnnnnnnnnnnnnnnnnnnnnnnnnnnnnnnnnnnnnnnnnnnnnnnnnnnnnnnnnnnnnnnnnnnnnnnnnnnnnnnnnnnnnnnnnnnnnnnnnnnnnnnnnnnnnnnnnnnnnnnnnnnnnnnnnnnnnnnnnnnnnnnnnnnnnnnnnnnnnnnnnnnnnnnnnnnnnnnnnnnnnnnnnnnnnnnnnnnnnnnnnnnnnnnnnnnnnnnnnnnnnnnnnnnnnnnnnnnnnnnnnnnnnnnnnnnnnnnnnnnnnnnnnnnnnnnnnnnnnnnnnnnnnnnnnnnnnnnnnnnnnnnnnnnnnnnnnnnnnnnnnnnnnnnnnnnnnnnnnnnnnnnnnnnnnnnnnnnnnnnnnnnnnnnnnnnnnnnnnnnnnnnnnnnnnnnnnnnnnnnnnnnnnnnnnnnnnnnnnnnnnnnnnnnnnnnnnnnnnnnnnnnnnnnnnnnnnnnnnnnnnnnnnnnnnnnnnnnnnnnnnnnnnnnnnnnnnnnnnnnnnnnnnnnnnnnnnnnnnnnnnnnnnnnnnnnnnnnnnnnnnnnnnnnnnnnnnnnnnnnnnnnnnnnnnnnnnnnnnnnnnnnnnnnnnnnnnnnnnnnnnnnnnnnnnnnnnnnnnnnnnnnnnnnnnnnnnnnnnnnnnnnnnnnnnnnnnnnnnnnnnnnnnnnnnnnnnnnnnnnnnnnnnnnnnnnnnnnnnnnnnnnnnnnnnnnnnnnnnnnnnnnnnnnnnnnnnnnnnnnnnnnnnnnnnnnnnnnnnnnnnnnnnnnnnnnnnnnnnnnnnnnnnnnnnnnnnnnnnnnnnnnnnnnnnnnnnnnnnnnnnnnnnnnnnnnnnnnnnnnnnnnnnnnnnnnnnnnnnnnnnnnnnnnnnnnnnnnnnnnnnnnnnnnnnnnnnnnnnnnnnnnnnnnnnnnnnnnnnnnnnnnnnnnnnnnnnnnnnnagggcagtggaggagggcctgacatacaaattccatgcggcctggagctccgtgttgcagctgctgtgtgtcttttttgaggtgtgtgggagacaggcccaccctgtgatgannngtgcctccagtccctgtgtgacctgcgcctctcccctcatttcccccacacggcggctctcgaccaggcagtgggggctgcggtgaccagtatgggacctgaggtggtgctgcaggctgtgcctttggaaattgatggctctgagnnnnnnnnnnnnnnnnnnnnnnnnnnnnnnnnnnnnnnnnnnnnnnnnnnnnnnnnnnnnnnnnnnnnnnnnnnnnnnnnnnnnnnnnnnnnnnnnnnnnnnnnnnnnnnnnnnnnnnnnnnnnnnnnnnnnnnnnnnnnnnnnnnnnnnnnnnnnnnnnnnnnnnnnnnnnnnnnnnnnnnnnnnnnnnnnnnnnnnnnnnnnnnnnnnnnnnnnnnnnnnnnnnnnnnnnnnnnnnnnnnnnnnnnnnnnnnnnnnnnnnnnnnnnnnnnnnnnnnnnnnnnnnnnnnnnnnnnnnnnnnnnnnnnnnnnnnnnnnnnnnnnnnnnnnnnnnnnnnnnnnnnnncagaggccgaccgtgttgaagtgagtcgttttgctaagaattttctgccaatcctcttcaacctgtatgggcagcccgtggcagccggggacactccagcccctcgccgggctgtgctggaaaccatcagaacttacctcaccatcactgacactcannnnnnnnnnnnnnnnnnnnnnnnnnnnnnnnnnnnnnnnnnnnnnnnnnnnnnnnnnnnnnnnnnnnnnnnnnnnnnnnnnnnnnnnnnnnnnnnnnnnnnnnnnnnnnnnnnnnnnnnnnnnnnnnnnnnnnnnnnnnnnnnnnnnnnnnnnnnnnnnnnnnnnnnnnnnnnnnnnnnnnnnnnnnnnnnnnnnnnnnnnnnnnnnnnnnnnnnnnnnnnnnnnnnnnnnnnnnnnnnnnnnnnnnnnnnnnnnnnnnnnnnnnnnnnnnnnnnnnnnnnnnnnnnnnnnnnnnnnnnnnnnnnnnnnnnnnnnnnnnnnnnnnnnnnnnnnnnnnnnnnnnnnnnnnnnnnnnnnnnnnnnnnnnnnnnnnnnnnnnnnnnnnnnnnnnnnnnnnnnnnnnnnnnnnnnnnnnnnnnnnnnnnnnnnnnnnnnnnnnnnnnnnnnnnnnnnnnnnnnnnnnnnnnnnnnnnnnnnnnnnnnnnnnnnnnnnnnnnnnnnnnnnnnnnnnnnnnnnnnnnnnnnnnnnnnnnnnnnnnnnnnnnnnnnnnnnnnnnnnnnnnnnnnnnnnnnnnnnnnnnnnnnnnnnnnnnnnnnnnnnnnnnnnnnnnnnnnnnnnnnnnnnnnnnnnnnnnnnnnnnnnnnnnnnnnnnnnnnnnnnnnnnnnnnnnnnnnnnnnnnnnnnnnnnnnnnnnnnnnnnnnnnnnnnnnnnnnnnnnnnnnnnnnnnnnnnnnnnnnnnnnnnnnnnnnnnnnnnnnnnnnnnnnnnnnnnnnnnnnnnnnnnnnnnnnnnnnnnnnnnnnnnnnnnnnnnnnnnnnnnnnnnnnnnnnnnnnnnnnnnnnnnnnnnnnnnnnnnnnnnnnnnnnnnnnnnnnnnnnnnnnnnnnnnnnnnnnnnnnnnnnnnnnnnnnnnnnnnnnnnnnnnnnnnnnnnnnnnnnnnnnnnnnnnnnnnnnnnnnnnnnnnnnnnnnnnnnnnnnnnnnnnnnnnnnnnnnnnnnnnnnnnnnnnnnnnnnnnnnnnnnnnnnnnnnagcattgaggagattttggctgactcagaggacgaggaggacaatgaggaggaggaaagaagccggggcaaggagcagcggaagctggcgcgacagaggagccaggcatggctgaaggagggtggtggggacgagcccctcaacttcctggatcccaaggtggcccagcgagtcctgnnnnnnnnnnnnnnnnnnnnnnnnnnnnnnnnnnnnnnnnnnnnnnnnnnnnnnnnnnnnnnnnnnnnnnnnnnnnnnnnnnnnnnnnnnnnnnnnnnnnnnnnnnnnnnnnnnnnnnnnnnnnnnnnnnnnnnnnnnnnnnnnnnnnnnnnnnnnnnnnnnnnnnnnnnnnnnnnnnnnnnnnnnnnnnnnnnnnnnnnnnnnnnnnnnnnnnnnnnnnnnnnnnnnnnnnnnnnnnnnnnnnnnnnnnnnnnnnnnnnnnnnnnnnnnnnnnnnnnnnnnnnnnnnnnnnnnnnnnnnnnnnnnnnnnnnnnnagaaagcaaaaggtgatgtgaagaagaaaggccgaccagatccctatgcctacatccccctcaacagaagcaagctcaaccgcag

SEQ ID NO: 27238 - DNA, 2585 bp, Macaca Mulatta
  misc_feature (1)...(2585): n = A,T,C or G
ctgaggagcctctcatcatctcccatggatttgtgatcagcgttgcagctctcccagcagccctggacagtgnnnnnnnnnnnnnnnnnnnnnnnnnnnnnnnnnnnnnnnnnnnnnnnnnnnnnnnnnnnnnnnnnnnnnnnnnnnnnnnnnnnnnnnnnnnnnnnnnnnnnnnnnnnnnnnnnnnnnnnnnnnnnnnnnnnnnnnnnnnnnnnnnnnnnnnnnnnnnnnnnnnnnnnnnnnnnnnnnnnnnnnnnnnnnnnnnnnnnnnnnnnnnnnnnnnnnnnnnnnnnnnnnnnnnnnnnnnnnnnnnnnnnnnnnnnnnnnnnnnnnnnnnnnnnnnnnnnnnnnnnnnnnnnnnnnnnnnnnnnnnnnnnnnnnnnnnnnnnnnnnnnnnnnnnnnnnnnnnnnnnnnnnnnnnnnnnnnnnnnnnnnnnnnnnnnnnnnnnnnnnnnnnnnnnnnnnnnnnnnnnnnnnnnnnnnnnnnnnnnnnnnnnnnnnnnnnnnnnnnnnnnnnnnnnnnnnnnnnnnnnnnnnnnnnnnnnnnnnnnnnnnnnnnnnnnnnnnnnnnnnnnnnnnnnnnnnnnnnnnnnnnnnnnnnnnnnnnnnnnnnnnnnnnnnnnnnnnnnnnnnnnnnnnnnnnnnnnnnnnnnnnnnnnnnnnnnnnnnnnnnnnnnnnnnnnnnnnnnnnnnnnnnnnnnnnnnnnnnnnnnnnnnnnnnnnnnnnnnnnnnnnnnnnnnnnnnnnnnnnnnnnnnnnnnnnnnnnnnnnnnnnnnnnnnnnnnnnnnnnnnnnnnnnnnnnnnnnnnnnnnnnnnnnnnnnnnnnnnnnnnnnnnnnnnnnnnnnnnnnnnnnnnnnnnnnnnnnnnnnnnnnnnnnnnnnnnnnnnnnnnnnnnnnnnnnnnnnnnnnnnnnnnnnnnnnnnnnnnnnnnnnnnnnnnnnnnnnnnnnnnnnnnnnnnnnnnnnnnnnnnnnnnnnnnnnnnnnnnnnnnnnnnnnnnnnnnnnnnnnnnnnnnnnnnnnnnnnnnnnnnnnnnnnnnnnnnnnnnnnnnnnnnnnnnnnnnnnnnnnnnnnnnnnnnnnnnnnnnnnnnnnnnnnnnnnnnnnnnnnnnnnnnnnnnnnnnnnnnnnnnnnnnnnnnnnnnnnnnnnnnnnnnnnnnnnnnnnnnnnnnnnnnnnnnnnnnnnnnnnnnnnnnnnnnnnnnnnnnnnnnnnnnnnnnnnnnnnnnnnnnnnnnnnnnnnnnnnnnnnnnnnnnnnnnnnnnnnnnnnnnnnnnnnnnnnnnnnnnnnnnnnnnnnnnnnnncgggaggagagtgcatggtgcagagggagctggggcgcacggagaagcaggtccctatattgaccaaggagttcgtggtacnnnnnnnnnnnnnnnnnagtaggcaaggactgcacgtttctttctctcctgattcttggttttcctgagtcctctggagctgccttctcatcaggttcactcttcatggaaagcaactcttgcccctacctcctctgggcacagggtgtgcgttcagatgacttggctcctactcaagggctttcttcccctttaactctctccttctggggatacatcctgcagcagctgagggggtgccctagcactggccaggagtggagaggcactgtggtgataagactccaaaggtctgtacatcacatacacatgcacacgtgcacacatggcaaaactcagaagtgaaaagacttgtccaaaatcacatggtgagaaggaggatgaangggaggagagagcttttgctctggggctccaggtgggaggagaggccctgcctcctgggtgagaagggtcagattttcccattttaattgctttcgggaagagcaagcagagtcatggccagggacacagctgagagatnnnnnnnnnnntgaatgctgagaccagagcttatcatcctggacaggcctggagggaggcaataagtgggaaaggtagggngagagaaggctggggagggctgggcagagagccaggcatagtgagtggcagagcaagacagggacagcaggatcagtgcctggaaggcaggtgtgcccgacaggggggagtggaactcatcaggcttgccaagaggttggaagggaaatggctctgggttggatctgtcttcccttggtccttctgggccaggccttggaggagagcagaggatgatccctgcctgtgagccacacttcctagctctgggggcaaaagggcttagtaaaggaatgctggatgtgtagagggtttagtcccaagctcaggaaatgagagtcaataagtatccggtacctgtttaaaagaaaagctcacggaacctctggaaaggacggggaggctgagttagccacataaatgaacccaagtcacactggaacacagagctggtctgggaactgggttggatgccaccagagcttctgaccctgttacctgtgaaatgaggcagtttccctcacggttgccatcagctaccaggagggatgcaggtggtcaccagcttctgatcctcatcctggccgtggccacagatggggggaacctggatt

SEQ ID NO: 27239 - DNA, 447 bp, Macaca Mulatta
tgctactaaatattctaaaagggtgttaggaaccctgcacatttcttggtcagctgctatggtaatacactgccattaagcagagtgggtgcacttggatttctagacatacattcctcaaaccttgtgcacaaagggtgatttgagtattgaccctttggaggtcaggattttcaaatgcagttttatctttttagctactttttgatgaaaaatataaagattgtttaaaaataacttaacctttggttttatactgcgttggcacagatatttttttctcattggcccactctttgcccaacggttcccttactgatttttacatatgcttcaaaataacttataacccagactggccaacatcctgtgcttcagcttctcagttttccagttctcccttgccctcttctgtgatagcacaacttcaaggcctacctcactctt

SEQ ID NO: 27240 - DNA, 1311 bp, Macaca Mulatta
  misc_feature (1)...(1311): n = A,T,C or G
gccgaggcagccgggcagacccccctccccacagtcacatggccacacggtcccgggagaatgcccggcgccggagcacccctgaacctgaggaagctgggcggcggggtgggannnnnnnnnnnnnnnnnnnnnnnnnnnnnnnnnnnnnnnnnnnnnnnnnnnnnnnnnnnnnnnnnnnnnnnnnnnnnnnnnnnnnnnnnnnnnnnnnnnnnnnnnnnnnnnnnnnnnnnnnnnnnnnnnnnnnnnnnnnnnnnnnnnnnnnnnnnnnnnnnnnnnnnnnnnnnnnnnnnnnnnnnnnnnnnnnnnnnnnnnnnnnnnnnnnnnnnnnnnnnnnnnnnnnnnnnnnnnnnnnnnnnnnnnnnnnnnnnnnnnnnnnnnnnnnnnnnnnnnnnnnnnnnnnnnnnnnnnnnnnnnnnnnnnnnnnnnnnnnnnnnnnnnnnnnnnnnnnnnnnnnnnnnnnnnnnnnnnnnnnnnnnnnnnnnnnnnnnnnnnnnnnnnnnnnnnnnnnnnnnnnnnnnnnnnnnnncccacaccaaggacatgcccttcacctgcgagacctgtggaaagtccttcaagcgcagcatgtccctcaaggtgcactccctgcagcactcaggggagaagccgttcagatgtgagnnnnnnnnnnnnnnnnnnnnnnnnnnnnnnnnnnnnnnnnnnnnnnnnnnnnnnnnnnnnnnnnnnnnnnnnnnnnnnnnnnnnnnnnnnnnnnnnnnnnnnnnnnnnnnnnnnnnnnnnnnnnnnnnnnnnnnnnnnnnnnnnnnnnnnnnnnnnnnnnnnnnnnnnnnnnnnnnnnngagcttcaccagccggcccaacatgaagcggcaccggcgcacgcacacgggcgagaagccgtacccatgcgacgtgtgtggccagcgcttccgcttctccaacatgctcaaggcccacaaggagaagtgcttccgcgtcagccaccccctggccggcgacggcacctccgctgccccaggcctgcccccaacccagccccaagcgcacgcannnnnnnnnnnnnnnnnnnnnnnnnnnnnnnnnnnnnnnnnnnnnnnnnnnnnnnnnnncctccgctcttccccaccactgccggcactggcgggaggatgaacgccaacaactagctgccgagctgcacccgtgcacccgctggggcctggagccagggcccactccaggagggacccactgcctttctggggagcacagcagtgcaggcccgggccctgccccacgtccagaagtggctggatgtgccctgcctgaggccccgactatgagggg

SEQ ID NO: 27241 - DNA, 888 bp, Macaca Mulatta
ggggcagttcggcggtcccgcgggtctgtctcttgcttcaacagtgtttggacggaacagatccggggactctttcttccagcctccgagcgccctccgatttcctctccacttgcaacctccgggaccatcttctcggccatctcctgcttctgggacctgccagcaccgtttttgtggttagctccgtcttgccgaccaaccatgagctcccagattcgtcagaattattccaccgacgtggaggcagccgtcaacagcctggtcaatatgtacctgcaggcctcctacacctacctctctctgggcttctatttcgaccgcgatgatgtggctctggaaggcgtgagccacttcttccgcgaattggccgaggagaagcgcgagggctacgagcgtctcctgaagatgcaaaaccagcgtggcggccgcgctctttttcaggacgtcaaagaagccagcctgaagatgagtggggtaaaccagactgagcctgatgaaaatgaaagcttgatagctgggcccgccttggatagaaaaaaaactgaattcacgggcgctttttttggaatcatttcatggccgccgtgggggtttcttgccccaaaaagggtgatcccccaatacttctgggtgaattttgcctggggaaaaattctccttttccttttatataaggtaaattggaaacctcctcaattcaaaataaaaatggggggtgaatacgacctgtgaaaccaaacctctattaaagggggttgggcccctggcccctggtaaggccttgggggccttggggcgacaagattttctcttgttcctaagaagggtgtcactttcttcaagagcaacgagaatctaataaaacttttcttgcaaaacagcagc

SEQ ID NO: 27242 - DNA, 313 bp, Macaca Mulatta
tatccagccccgggctgcagagaggttgattgccagggagccctgcaggaatctttgcatgcttaaagcacgttatgtcagcatcctgattttgttccttattaagtgtgtgccatgaggtggggtgctgtctggggcatctgtttttcattttgcatgtggtttgtgttgcagctgttgatagttgttctaaggattgttaggtatatgaaatccagtaaattaataaaaaatttttgattttccaataaacttcgcatgaggtgctgatatttcttctgggaggcttacttggtaacaccatgctttgttg

SEQ ID NO: 27243 - DNA, 105 bp, Macaca Mulatta
ccgcatctttctgcaggttccccggtcctctggcgaggatcctccaaggcgtctcacatgaaccggctcagaaacgccaaaatctacgtggagagagctgtcaag

SEQ ID NO: 27244 - DNA, 327 bp, Macaca Mulatta
ataccaggactcacccgctccgtgtacactatgccactggccaaccaccgcgacgacgagcacggtgaggaaagtgtggccagagtccctccgacccctgtcaagcatttcaccgtgcccctgaccctcaactttcccgccttccagaacacctttgcccaactcgcccttccccgcttgtctagccccagcccgtaaaaatccgtgtagaaatccctttgctcggccgtgcctcccctaggcgtggcatctatggtgagcgtccacgtggagcacccgcaggaggcgtcggtggtggtgcaccaggtggagcgtgtgtctggccct

SEQ ID NO: 27245 - DNA, 224 bp, Macaca Mulatta
tagacgatcagctgaacactctcttgaaggagttccagctaacagaggagaacactaagctccgatatctcacctgttctctcattgaagacatagccgctgcatattttccggactgcgtagtcagaccctttggctcctcagtcaatacttttgggaagttaggatgtgatttggacatgtttttggatctagatgaaacccgaaacctcagcactcacaag

SEQ ID NO: 27246 - DNA, 438 bp, Macaca Mulatta
  misc_feature (1)...(438): n = A,T,C or G
gccatcgactttctggagaagatcctgacctttnnnnnnnnnnnnnnnnnnnnnnnnnnnnnnnnnnnnnnnnnnnnnnnnnnnnnnnnnnnnnnnnnnnnnnnnnnnnnnnnnnnnnnnnnnnnnnnnnnnnnnnnnnnnnnnnnnnnnnnnnnnnnnnnnnnnnnnnnnnnnnnnnnnnnnnnnnnnnnnnnnnnnnnnnnnnnnnnnnnaggtaccctgtgagcctgtcgtcggacctggagtggcggccagaccggtgccaggacgccagcgaggtgcagcgcgacccgcgcgcgggttcggcgccgctggcagaggacgtgcaggtggacccgcgcaaggaatcgcacagcagctcccgagcgncttcctagagcagtcacactcgtccatggagcgcgccttcgaggcagactacgggcgctcctgcgacta

SEQ ID NO: 27247 - DNA, 848 bp, Macaca Mulatta
cctgtcagcgaggtggtgctgctgctggtgtgggctgagtggaccctgctcaggtggccagctcactcccaggaggctggtcagctccatggccaccatggctgcatctgctgtgccaagccattctctccagggtcctgggagtttctcttctctacaaataactacggcagaacaaaacatagcatcttcaaaatcaatgctccagttaatggagttgttgtccagagtcttgaaatctgcctttaaagactccgaaacaaactttttaacaagtattttatgaaacaggtgctagacacaattcacagccctgatcttgactcctccttcaaatccctaagggaaaggttttcctggaacgggaggagaagggctttctataggtcgatgagtccttcagcggtggaggagttgggtggttctgggttcaaatagagccccctttgcctcaccttcaaccctggtgggctggcccgggacccgacattccgctggaaggatgcacatgcccacatccgcatgggacaagcccccagcttccacctgctcagactcagcaaaatctcctctgtccttgcaggcgagctgaaggaaatcaagcaagacatctccagcctgcgctacgagcttcttgaggaaaagtctcaagctaccggtgagctggcagacctgattcaacaactcagcgagaagtttggaaagaacttaaacaaagaccacctgagggtgaacaagggcaaagacatttagcagcccacatcggcgtctgtgacttctaccagcattccaaggccagggtggatgccctggcccccatccctggtggggaggggtccccagcccac

SEQ ID NO: 27248 - DNA, 366 bp, Macaca Mulatta
ataagggaatgtctctccttcctatctatctgcaaaatggaaatctagacctccttcttcatccataagtggactgtgccagtacaatacatgcctcagcccccaagcctagaaggacctctagtctccttcctgtgtatggaatcttcctcactccacccctcccacgttgtctgtattgataatgtactcatgctgtactaggtgctgaagcctggacacccctggtgggtgggcctgtggtgatgatttgcatccttcctcctttgtcccaataaaagtatgggagttgaatgtgtgtctttcactgtgggtttcaggacataggctatgggggaggaggaaaaggacctcctatgggaggcg

SEQ ID NO: 27249 - DNA, 900 bp, Macaca Mulatta
ccgtcgtgggtgtgtatacagcgggtgtcattacatgctccttacgctaggtaggaggaccgaggtgcgcttatatgtcactacggtgacaatattaagaagtttcgagcgtctaccagcattagatcagattcttcttcactggtaaggatcagaactctctttttatcgattttatcgatctcggtatcttacagaagaggaaagataagagggaagtggcacttaacttttgaagatctaattttataaattgagaaatcccttgtagacgttaaatgtccaagtaaagatcgctcccaagaattccattacaggactctattctaaaaacagattaggaattccaccaagggaattttattattttcggaaaaaatccaaaaaatctatttatgggcccaagattctcctatgaaaacaatttatgactcattttcaggttacacttcatgggcacacggggccaaaaggaatagttttaaaaaagtttttcgaggggccggaggcggccaacaagttctatcttttccctacactttcttttctttgcagaggtctgaatgttcggttcacttgcaaaccacggctaaggtcaaacttgtagaaaataaaattccatgtaaatcccaaagatagggccccttggggtttcatccctttctctttctgtgagcccaagctcctctctttcccttggaaaaggagcctggcagaggccacagaaggaagcaggaggccaaatgctcctctctcactggggctctgggttggaggttggtgagttgttcaagatggcagcagcagcttccagacactctgacaacaccaaggccacgtcaacatcatacgaggtctcagcttcaagtacaggagttgcagcccactgtagggagcacc

SEQ ID NO: 27250 - DNA, 742 bp, Macaca Mulatta
  misc_feature (1)...(742): n = A,T,C or G
ggaggcccattttcccttttccccagctgatgaggagccggccccctcagttcccacttgcttgggttcctgggggttttctgatcactggtgcgcattgatgtacatattttcctccagtctggggaggagagagactggaaacgttcctggactgctgaagaggagacccagttggcttcactttttgagaagattcaccctgtaccccaaacccctttccagtattacccttaatgcttgagaacctaaagctggttatcctggagaacacccctacccttctattgcgggtccccacatgcacacagaactctgacacaggatcagctgcacttaagaaatcatcccagctcagttcattattcctcatggggtggggagatgggtgaagggtattgtatatnncngtggnctgaaagggttcaatcaggtggaattagagttcctgggaaaagcaattgttccccaaatcccgcccccaaaggagggggccccccccattggagagaccccttttttcaaaggggggaaacctttgaaacatgggttgattaaaaacacccgaatacagcgacccccctgggggaccccgtcccaaagggatcccagaaaacagtgggaaacaacaccaccaaaaatacgagaacatcaccacggggggcgaggaagtgttgattgaacaccgcggcacacctaagaggggggagaggaacacgcgcagcatcatggagcggcatgg

SEQ ID NO: 27251 - DNA, 337 bp, Macaca Mulatta
gacaggccttcatccagaaaactcatttgattgccaccgaagaattcatactggagagaagccatatgagtgcagtaactgtggcaaatccttcatttccaagtcacaacttcaggtccatcaacgcgttcacacgagagtgaagccctatatatgtaccgaatatgggaaggtcttcagcaataattccaacctcattacacataagaaagtccaaattagagagaaatcttccatatgtactgagtgtgggaaggcctttacctacaggtcagagttgattattcatcagagaattcacactggagagaaaccgtatgaatgcagtgactgtgga

SEQ ID NO: 27252 - DNA, 642 bp, Macaca Mulatta
  misc_feature (1)...(642): n = A,T,C or G
attttctacggtggattcccacagataaaatctntgtctcttgcccaaaacatagtaaagggtcaggtgtgactttttataattggaagaaaattctgcctttgtgagtgcacatgtccacatttcatccctccttccctcaaaagcctagagaggggcattaaagaattattgatgtatatgcaatgtctgttaagcatgcagtatgtatttcatcttcatttattgggtctgggactgaagtttttagccagcatggacctgacctactttttgggataaaattcactgttttgttacaggcagaattctggtgtggcatgtgccatggggtcatactgaatacattttttttctgtaattttatcattacatgatgtttgcaaaacatgctttgttttttaatttgaaagcaaacttttctactgttgaaagacattttttgacaacttcacccttcctagtattgagtactaagttgaggactgcatcttctcgtttttttacagtatagagaacaaaatgacattagtttgaaaaatacatatcacttggtatcgctgtcttggttgcagtggtgatacagaattggtttcattaattcctatatggttgggaatcactgatcaagaaagtggggga

SEQ ID NO: 27253 - DNA, 1083 bp, Macaca Mulatta
  misc_feature (1)...(1083): n = A,T,C or G
aggaagaggggaagcccctcggtggaagggacgagtttgaggacctggagtggtccgaggaggtccagaagctacaggagcagcagntgcgcagcgacctcctggaccagtaccgttccctgctgatggagcggaaccgctcccagcgctacaacctgtacctgcagcacaagatcttcgaggcgctgcgcaaaaagaagggcctggaggcggcggaggtgcctgaccggggcgcagaagcagaggcccccgagaaagagcaagcgtacctgcgccatctgggcatgctggaggacctgaagaagcagcaggcagacgacctgcagtggtaccaccaggagctgggccagttgaagcagcagtgccaggagaagctctcaagagtggagaaggagtggcggcgcttccaggcactcaagaagcaggtggtgatgcaggccatgggcagctgtcggatgaggggcgggcgccaggctgctctgcgagaggtggagcagatcctggcgttggaggataaaaaggagaaggagatgagcgccgtgcggctggagaacgtgcagctgaagcagagcctggtgcattttgaaaccaggatgaggacccaggaggacctgacccagggtctgcttcttattgactttgaacagctgaagattgagaaccagaccttcaatgagaaaattgaggaacgaaatgaggaacttttaaaacttcgcaacaaagtgaccaacagtgtgcaagtaataacccacatgaaggaaaagctgcacttcatggacacggagaacgcgtgcaaaaagnnnnnnnnnnnnnnncgaggcccaggtcgcccagggaagagacatcctgaccaagacgaagcaagcccgagaggggctgcggacagacaacatcaggctgaatcagaagtgcgggcttctaggcaacgactcacttcttcgggacttggaagaaaaagtggacaagacccaactgctccaccagcgcctggaatccctgaagcgccaccacgctgggctcactttgtcctgcagaggcgtgaggcaaaagatcagggaggccaaagcctttctcccctcttga

SEQ ID NO: 27254 - DNA, 258 bp, Macaca Mulatta
tttcaaagtcatggtctggtgccagatttgagaaactctaaccacctaatatttcataaccttcttcattaggtacttgtacagattaagttctaacatttcagcagtttaatatgtgtgcaatatgtgcattctttcattttagttttgcacttggttttctataaagtacgtttttactcagttcatgtgtgaacaatttaaaaaagtacagaataaggtacaaatgtagtgtatttaataaactgtcaagcaaag

SEQ ID NO: 27255 - DNA, 544 bp, Macaca Mulatta
aggtagagaactacttggagtaaggaggatgagtttggttacataataaggagaattgttcaagtgactgatagattttaaaattttagaatgtggttttaagtagttttcttagatagtgcttgataaacttttacagctgttttaacatttttgacatatttaatattttgtttttcttagaccattccaacgaaagacagacttgaaggtcttcttgcttttaaagagaaaaggccccctcgctataaaggagaataaaaggaagagaaattcttaagatgccaatgtactaaatgtacttctggaagtgtctttcgggtccactgtatgcctcagcacatggaatctcaatgaccaaagtgaagagcaaattattcatatagtgtagtaagcatctggaatggacccatccgtgtacttcattcaaatgtgtaaatgtcatattcattcagatttgtaaagctagtagtgtatattgtcagaaacagaatcaaagttagatatacatttttaaatatttactgcatatgcggctttctgt

SEQ ID NO: 27256 - DNA, 500 bp, Macaca Mulatta
catcctggcggcagccaagtgagccatgccccggaccggggtgctggggcttcctgccagcccagccctgcctccccggtctcccaccccgtcctccaagcctctgtaataaaccagcggacctccagcatcggggtgaggctctggggaaggacagacccagctcagtctgtctgctgtgaggcccccaacagacttgttccaggtcaagtcgttggaaactcggtttccccgatacagagcttcctctgtggccagttaagtcagctgaggccctcccacgctcaaggaaagaaatgtttccctccaaggggtagctccaggataggtgacccagtaacgcccgggatgctcagatgggactgaactgggtctcctacgcttcctgggtgggggaggctcagtctatagcctaggtggaaaacacagcaagaacagaacagtgaagaggcagagagaaaggtcaaggacagggaagaagagacaaagggagaaatgag

SEQ ID NO: 27257 - DNA, 4908 bp, Macaca Mulatta
  misc_feature (1)...(4908): n = A,T,C or G
gcagaactctcctgtccaaatgactgccatggccggggtcgctgtgtgaacgggcagtgtgtgtgccatgaaggattcatgggcaaagattgcaaggagcaaagatgtcccagtgactgtcatggccagggccgctgcatggacggccaatgcatctgccacgagggcttcacaggcctggactgtggccagcgctcctgccccagtgactgcagcaacttaggacaatgcgtctcaggccgctgcatctgcaacgagggctacgccggagaagactgctcagagnnnnnnnnnnnnnnnnnnnnnnnnnnnnnnnnnnnnnnnnnnnnnnnnnnnnnnnnnnnnnnnnnnnnnnnnnnnnnnnnnnnnnnnnnnnnnnnnnnnnnnnnnnnnnnnnnnnnnnnnnnnnnnnnnnnnnnnnnnnnnnnnnnnnnnnnnnnnnnnnnnnnnnnnnnnnnnnnnnnnnnnnnnnnnnnnnnnnnnnnnnnnnnnnnnnnnnnnnnnnnnnnnnnnnnnnnnnnnnnnnnnnnnnnnnnnnnnnnnnnnnnnacttgcctgcacctgaaggcctgaaattcaagtctatcaaggagacatctgtggaagtggagtgggatcctctagatatcgcttttgaaacctgggagatcatcttccggaatatnnnnnnnnnnnnnnnnnnnnnnnnnnnnnnnnnnnnnnnnnnnnnnnnnnnnnnnnnnnnnnnnnnnnnnnnnnnnnnnnnnnnnnnnnnnnnnnnnnnnnnnnnnnnnnnnnnnnnnnnnnnnnnnnnnnnnnnnnnnnnnnnnnnnnnnnnnnnnnnnnnnnnnnnnnnnnnnnnnnnnnnnnnnnnnnnnnnnnnnnnnnnnnnnnnnnnnnnnnnnnnnnnnnnnnnnnnnctgagatagacggcattgagctgacctacggcatcaaagacgtgccaggcgaccgtaccaccatcgatctcacagaggacgagaatcagtactccatcgggaacctgaagcccgacactgagtacgaggtgtccctcatctcccgcagaggcgacatatcaagcaacccagccaaagagaccttcacaacannnnnnnnnnnnnnnnnnnnnnnnnnnnnnnnnnnnnnnnnnnnnnnnnnnnnnnnnnnnnnnnnnnnnnnnnnnnnnnnnnnnnnnnnnnnnnnnnnnnnnnnnnnnnnnnnnnnnnnnnnnnnnnnnnnnnnnnnnnnnnnnnnnnnnnnnnnnnnnnnnnnnnnnnnnnnnnnnnnnnnnnnnnnnnnnnnnnnnnnnnnnnnnnnnnnnnnnnnnnnnnnnnnnnnnnnnnnnnnnnnnnnnnnnnnnnnnnnnnnnnnnnnnnnnnnnnnnnnnnnnnnnnnnnnnnnnnnnnnnnnnnnnnnnnnnnnnnnnnnnnnnnnnnnnnnnnnnnnnnnnnnnnnnnnnnnnnnnnnnnnnnnnnnnnnnnnnnnnnnnnnnnnnnnnnnnnnnnnnnnnnnnnnnnnnnnnnnnnnnnnnnnnnnnnnnnnnnnnnnnnnnnnnnnnnnnnnnnnnnnnnnnnnnnnnnnnnnnnnnnnnnnnnnnnnnnnnnnnnnnnnnnnnnnnnnnnnnnnnnnnnnnnnnnnnnnnnnnnngaacaagcccctgaactggaaaacctcaccgtgactgaggttggctgggatggcctcagactcaactggaccgcagctgaccaggcctacgagcactttgtcattcaagtgcaagaggccaacaaggtggaggcagctcagaacctcaccgtgcctggcaacctccgggctgtggacatcccgggcctcaaggctgccacgccttatacagtctccatctatggggtgatccagggctatagaacaccagtgctctctgctgaggnnnnnnnnnnnnnnnnnnnnnnnnnnnnnnnnnnnnnnnnnnnnnnnnnnnnnnnnnnnnnnnnnnnnnnnnnnnnnnnnnnnnnnnnnnnnnnnnnnnnnnnnnnnnnnnnnnnnnnnnnnnnnnnnnnnnnnnnnnnnnnnnnnnnnnnnnnnnnnnnnnnnnnnnnnnnnnnnnnnnnnnnnnnnnnnnnnnnnnnnnnnnnnnnnnnnnnnnnnnnnnnnnnnnnnnnnnnnnnnnnnnnnnnnnnnnnnnnnnnnnnnnnnnnnnnnnnnnnncagaggaggttccagatatgggaaacctcacagtgaccgaggttagctgggatgctctcagactgaactggaccacgccagatggaacctatgaccagtttaccattcaggtccaggaggctgaccaggtggaagaggctcannnnnnnnnnnnnnnnnnnnnnnnnnnnnnnnnnnnnnnnnnnnnnnnnnnnnnnnnnnnnnnnnnnnnnnnnnnnnnnnnnnnnnnnnnnnnnnnnnnnnnnnnnnnnnnnnnnnnnnnnnnnnnnnnnnnnnnnnnnnnnnnnnnnnnnnnnnnnnnnnnnnnnnnnnnnnnnnnnnnnnnnnnnnnnnnnnnnnnnnnnnnnnnnnnnnnnnnnnnnnnnnnnnnnnnnnnnnnnnnnnnnnnnnnnnnnnnnnnnnnnnnnnnnnnnnnnnnnnnnnnnnnnnnnnnnnnnnnnnnnnnnnnnnnnnnnnnnnnnnnnnnnnnnnnnnnnnnnnnnnnnnnnnnnnnnnnnnnnnnnnnnnnnnnnnnnnnnnnnnnnnnnnnnnnnnnnnnnnnnnnnnnnnnnnnnnnnnnnnnnnnnnnnnnnnnnnnnnnnnnnnnnnnnnnnnnnnnnnnnnnnnnnnnnnnnnnnnnnnnnnnnnnnnnnnnnnnnnnnnnnnnnnnnnnnnnnnnnnnnnnnnnnnnnnnnnnnnnnnnnnnnnnnnnnnnnnnnnnnnnnnnnnnnnnnnnnnnnnnnnnnnnnnnnnnnnnnnnnnnnnnnnnnnnnnnnnnnnnnnnnnnnnnnnnnnnnnnnnnnnnnnnnnnnnnnnnnnnnnnnnnnnnnnnnnnnnnnagaggccctgccccttctggaaaacctaaccatttccgacattaatccctacgggttcacagtttcctggatggcatcggagaatgcctttgacagctttctagtaacggtggtggattctgggaagctgctggacccccaggaatttacactttcaggaacgcagaggaagctggagcttagaggcctcataactggcattggctatgaggttatggtctctggcttcacccaagggcaccaaaccaagcccttgagggctgagattgttacagnnnnnnnnnnnnnnnnnnnnnnnnnnnnnnnnnnnnnnnnnnnnnnnnnnnnnnnnnnnnnnnnnnnnnnnnnnnnnnnnnnnnnnnnnnnnnnnnnnnnnnnnnnnnnnnnnnnnnnnnnnnnnnnnnnnnnnnnnnnnnnnnnnnnnnnnnnnnnnnnnnnnnnnnnnnnnnnnnnnnnnnnnnnnnnnnnnnnnnnnnnnnnnnnnnnnnnnnnnnnnnnnnnnnnnnnnnnnnnnnnnnnnnnnnnnnnnnnnnnnnnnnnnnnnnacagccatgggctctccaaaggaagtcattttctcggacatcactgaaaattcggctactgtcagctggagggcacccactgcccaggtggagagcttccggattacctatgtgcccattacaggaggtnnnnnnnnnnnnnnnnnnnnnnnnnnnnnnnnnnnnnnnnnnnnnnnnnnnnnnnnnnnnnnnnnnnnnnnnnnnnnnnnnnnnnnnnnnnnnnnnnnnnnnnnnnnnnnnnnnnnnnnnnnnnnnnnnnnnnnnnnnnnnnnnnnnnnnnnnnnnnnnnnnnnnnnnnnnnnnnnnnnnnnnnnnnnnnnnnnnnnnnnnnnnnnnnnnnnnnnnnnnnnnnnnnnnnnnnnnnnnnnnnnnnnnnnnnnnnnnnnnnnnnnnnnnnnnnnnnnnnnnnnnnnnnnnnnnnnnnnnnnnnnnnnnnnnnnnnnnnnnnnnnnnnnnnnnnnnnnnnnnnnnnnnnnnnnnnnnnnnnnnnnnnnnnnnnnnnnnnnnnnnnnnnnnnnnnnnnnnnnnnnnnnnnnnnnnnnnnnnnnnnnnnnnnnnnnnnnnnnnnnnnnnnnnnnnnnnnnnnnnnnnnnnnnnnnnnnnnnnnnnnnnnnnnnnnnnnnnnnnnnnnnnnnnnnnnnnnnnnnnnnnnnnnnnnnnnnnnnnnnnnnnnnnnnnnnnnnnnnnnnnnnnnnnnnnnnnnnnnnnnnnnnnnnnnnnnnnnnnnnnnnnnnnnnnnnnnnnnnnnnnnnnnnnnnnnnnnnnnnnnnnnnnnnnnnnnnnnnnnnnnnnnnnnnnnnnnnnnnnnnnnnnnnnnnnnnnnnnnnnnnnnnnnnnnnnnnnnnnnnnnnnnnnnnnnnnnnnnnnnnnnnnnnnnnnnnnnnnnnnnnnnnnnnnnnnnnnnnnnnnnnnnnnnnnnnnnnnnnnnnnnnnnnnnnnnnnnnnnnnnnnnnnnnnnnnnnnnnnnnnnnnnnnnnnnnnnnnnnnnnnnnnnnnnnnnnnnnnnnnnnnnnnnnnnnnnnnnnnnnnnnnnnnnnnnnnnnnnnnnnnnnnnnnnnnnnnnnnnnnnnnnnnnnnnnnnnnnnnnnnnnnnnnnnnnnnnnnnnnnnnnnnnnnnnnnnnnnnnnnnnnnnnnnnnnnnnnnnnnnnnnnnnnnnnnnnnnnnnnnnnnnnnnnnnnnnnnnnnnnnnnnnnnnnnnnnnnnnnnnnnnnnnnnnnnnnnnnnnnnnnnnnnnnnnnnnnnnnnnnnnnnngacaaggacacagattcagccatcaccaactgtgctctgtcctataagggggctttctggtacaggaactgtcaccgtgtcaacctgatggggagatatggggacaataaccacagtcag

SEQ ID NO: 27258 - DNA, 334 bp, Macaca Mulatta
gggtgacgaccgcttctccaagagcatcctgacctatgtggcccacacgtctgtgctgacctaccctcccgggccccaggcccagctccccgaggacctcctgccgcggaccctcagccagctccagccagacgagctcagccctaaggtggacagcagtgtggagagacaccatctgatggcagccctcggtgcctatgctgcccagaggcccccagctccccctgggaagggcagcctggagccgcagtaccttctgcgcgccccgtccagaatgcccaggcccttgttgtcgccagccgtcccccagaagtggccttcacctctgggagat

SEQ ID NO: 27259 - DNA, 243 bp, Macaca Mulatta
gccgtctgtgggtatgcagggccaggttccgccagcagtaacggcgcgtggggtggtccaggcagtctgcgggggcgagcgtaccttctggtccttccttctccattccctagctcccagatgacgccaacctgacccgactagttcctgctcccaactccccggcgctgttgctttgggaggggtccgccggccagggcggtcgctgcgcgtgtgctaggcgggaccccaggggcactcctc

SEQ ID NO: 27260 - DNA, 769 bp, Macaca Mulatta
ggggagctacctggaaaaaagtcgccacaggcaagctgcctatcaaccaccagatcatctaccagctgcaggacgtcttcaacctgctgccagacgtcagcctgcaggagtttgtcaaggccttttacctgaagaccaacgaccagatggtggtagtgtacttggcctcgctgatccgttccgtggtcgccctgcacaacctcatcaacaacaagattgccaaccgcgatgcagagaagaaagaagggcaggagaaagaagacagcaaaaatgataggaaagaggacaaggagaaagataaggaaaagagtgatgtaaagaaagaggagaaaaaggagaaaaagtaaaacatgtattaaatagcttttttaatttgtaaattaaaatcttacaaactaaatcagtctgctgctagagggttcttttccgccggcgtgcttgttaggaagctggcccgccaagagccctctgcctcgggcactcttgctgtggagctacctggaagcgtatggagactgagctcaaacctgaactgcggcttcagctgctgtgagctggggatatgatagtcagctcaggcttcagattgtgtgagaaaaatgaggataaatcaacaaagcgttttggctactcttcattcggtttcctctgtaaaaaccaagaagtttgaaatttttccccactggtttgaaaagaattctttggggggtccggttttttggaaaatttttacaccgattccggctaaaaatggggatgtgattgaaac

SEQ ID NO: 27261 - DNA, 3779 bp, Macaca Mulatta
  misc_feature (1)...(3779): n = A,T,C or G
ggttgaatgcctttgagaaaatgatgcataaaatttgcatgannnnnnnnnnnnnnnnnnnnnnnnnnnnnnnnnnnnnnnnnnnnnnnnnnnnnnnnnnnnnnnnnnnnnnnnnnnnnnnnnnnnnnnnnnnnnnnnnnnnnnnnnnnnnnnnnnnnnnnnnnnnnnnnnnnnnnnnnnnnnnnnnnnnnnnnnnnnnnnnnnnnnnnnnnnnnnnnnnnnnnnnnnnnnnnnnnnnnnnnnnnnnnnnnnnnnnnnnnnnnnnnnnnnnnnnnnnnnnnnnnnnnnnnnnnnnnnnnnnnnnnnnnnnnnnnnnnnnnnnnnnnnnnnnnnnnnnnnnnnnnnnnnnnnnnnnnnnnnnnnnnnnnnnnnnnnnnnnnnnnnnnnnnnnnnnnnnnnnnnnnnnnnnnnnnnnnnnnnnnnnnnnnnnnnnnnnnnnnnnnnnnnnnnnnnnnnnnnnnnnnnnnnnnnnnnnnnnnnnnnnnnnnnnnnnnnnnnnnnnnnnnnnnnnnnnnnnnnnnnnnnnnnnnnnnnnnnnnnnnnnnnnnnnnnnnnnnnnnnnnnnnnnnnnnnnnnnnnnnnnnnnnnnnnnnnnnnnnnnnnnnnnnnnnnnnnnnnnnnnnnnnnnnnnnnnnnnnnnnnnnnnnnnnnnnnnnnnnnnnnnnnnnnnnnnnnnnnnnnnnnnnnnnnnnnnnnnnnnnnnnnnnnnnnnnnnnnnnnnnnnnnnnnnnnnnnnnnnnnnnnnnnnnnnnnnnnnnnnnnnnnnnnnnnnnnnnnnnnnnnnnnnnnnnnnnnnnnnnnnnnnnnnnnnnnnnnnnnnnnnnnnnnnnnnnnnnnnnnnnnnnnnnnnnnnnnnnnnnnnnnnnnnnnnnnnnnnnnnnnnnnnnnnnnnnnnnnnnnnnnnnnnnnnnnnnnnnnnnnnnnnnnnnnnnnnnnnnnnnnnnnnnnnnnnnnnnnnnnnnnnnnnnnnnnnnnnnnnnnnnnnnnnnnnnnnnnnnnnnnnnnnnnnnnnnnnnnnnnnnnnnnnnnnnnnnnnnnnnnnnnnnnnnnnnnnnnnnnnnnnnnnnnnnnnnnnnnnnnnnnnnnnnnnnnnnnnnnnnnnnnnnnnnnnnnnnnnnnnnnnnnnnnnnnnnnnnnnnnnnnnnnnnnnnnnnnnnnnnnnnnnnnnnnnnnnnnnnnnnnnnnnnnnnnnnnnnnngacatgcgagccctggagcacaagatccagtacgagcaactgtgatgccttatcagccatcagggagaatggagagtgccggtctgtgactgaggatgccgagaagaacatgagtgacatcatcgtgtaccatagaggatccagatcctgtaaggatgcagctgtagggacacttactgagatgaggaattgtggggtcagtgtgacagaggccatgcttggagtgacgactgaagctgacaaagaaattgagctgcaacagcagaccatagaagccttgaaggaaaagatctatcgcctagaagtacagcttagagaaaccacccatgaccgggagatgactaaactaaaacaagagctgcaggctgctggatcgaggaaaaaggttgacaaagccacgatggctcagccgcttgttttcagtaaggtggtggaggcagtggtgcagaccagagaccaaatggtcggcagtcacacagacctggtggacacgtgtgttgtgacctccgtggaaacaaacagtgtaggcatctcctgccagcctgaatgtaagaacaaagtcgtaggggctgagcctgccatgaattggtggaatgtttaagagagggtgtaaatgcacgaccgttgtgctgggcagcctgtggaaatgtgtgacaagagtgnnnnnnnnnnnnnnnnnnnnnnnnnnnnnnnnnnnnnnnnnnnnnnnnnnnnnnnnnnnnnnnactcctcaagacaaacttgaatctcaaagaagtgcggtctatcggttgtggagattgttctgttgacgtgactgtctgctctccaaaggagtgtgcctcccggggcgtgaacactgaggctgttggccaagtggaagctgccgtcatggcagtgcctcgtaccgcagaccaggacactagcacggatttggaacaggtgcaccagttcaccaacaccgagacggccaccctcatagattcctgcaccaacacttgcctaagcactttggacaagcagaccagcacccagactgtggagacgcggacagtagctgtaggagaaggccgtgtcaaggacatcaactcctccaccaagatgcggtccattggtgttggaacgttgctttctggccattctgggtttgacaggccatcagctgtgaagaccaaagagtcaggtgtggggcagataaatattaatgacaactatctggttggtctcaaaatgaggaccatagcttgtgggccaccacagttgactgtggggctgacagccagcagaaggagcgtgggggttggggatgaccctgtaggggagtctctggagaactcccagccccaggctccacctggaatgatgaccggcctggatcactacattgagcgcatccagaagctgctggcagaacagcagacactgctggctgagaactacagtgaactggcagaagcttttggggagcctcactcacagattggctccctcaactctcagctcatcagcaccctgtcgtctatcaactctgtcatgaaatctgcaagcactgaagagctgaggaaccctgacttccagaaaaccagtctgggtaaaatcacaggnnnnnnnnnnnnnnnnnnnnnnnnnnnnnnnnnnnnnnnnnnnnnnnnnnnnnnnnnnnnnnnnnnnnnnnnnnnnnnnnnnnnnnnnnnnnnnnnnnnnnnnnnnnnnnnnnnnnnnnnnnnnnnnnnnnnnnnnnnnnnnnnnnnnnnnnnnnnnnnnnnnnnnnnnnnnnnnnnnnnnnnnnnnnnnnnnnnnnnnnnnnnnnnnnnnnnnnnnnnnnnnnnnnnnnnnnnnnnnnnnnnnnnnnnnnnnnnnnnnnnnnnnnnnnnnnnnnnnnnnnnnnnnnnnnnnnnnnnnnnnnnnnnnnnnnnnnnnnnnnnnnnnnnnnnnnnnnnnnnnnnnnnnnnnnnnnnnnnnnnnnnnnnnnnnnnnnnnnnnnnnnnnnnnnnnnnnnnnnnnnnnnnnnnnnnnnnnnnnnnnnnnnnnnnnnnnnnnnnnnnnnnnnnnnnnnnnnnnnnnnnnnnnnnnnnnnnnnnnnnnnnnnnnnnnnnnnnnnnnnnnnnnnnnnnnnnnnnnnnnnnnnnnnnnnnnnnnnnnnnnnnnngtatgaattaagtgaaaagatgttgtctgcatgcaacttactgaaaaataacataaatgaccccaaagctttgaccagcaaagatatggaggttctgtctgaacaccctccagcacgagtggttccgcgtgtccagtcagaagtcagccattccagccatggtgggggactacatagctgcttttgaggccatctccccagatgtcctccgctatgtcatcaacttggcagatggcaacggcaacacagccctccattacagcgtgtcccactccaacttcgagattgtgaagctgctgttggatgccgatgtgtgtaacgtcgatcaccagaacaaggcaggctacacccccatcatgctggcagccctcgccgctgtggaagcagagaaggacatgcgggttgtggaagaactctttggctgcggggatgtgaacgccaaagctagtcagg

SEQ ID NO: 27262 - DNA, 429 bp, Macaca Mulatta
atgagcaaccagggcctctgctgtgtggtcctttgtctccttggagcaaacaccatggatggcggaatcactcagtccccaaagtacctgttcagaaaggaaggacagaatgtgaccctgagttgtgaacagaatttgaaccacgatgccatgtactggtaccgacaggacccaggtcaaggactgagattgatctactactcacagatagtaaatgacattcagaaaggagacatagctgaagggtacagtgtgtctcgggagaggaaggaatcctttcctctcactgtgacatcagcccaaaggaacccaacagctttctatctctgtgccagtagccgtcagggacaccttagccaaaacactcagtacttcggcgccgggacccggctctcagtgctggaggacctgaaaaaagtgttcccaccc

SEQ ID NO: 27263 - DNA, 619 bp, Macaca Mulatta
gggaattggctcagctttaatacctttccaggagctgtcacaatgtagggtactaagggttggattgtgatggggcatggtcgtacaccactcgtgccacaggtgtgcctggaaagcatgatattctagggttggtttttaggttcaaataatccagaaatatgcctaataagatagagttgaaaaacttgagtcaaatatctcgggcattcacagagtggctgtgagttcttggtagtgtgaaaaaaaacctgtttttcagaaattctgggtttcctgttaaaaaatcttaaagcccaaccttaggaatatagtgccccaaaaggcagatgcttcttccattatcttattttctttgatacttaattagatgtttataaagaaatgggtttatttttccagtataaatctcagaatttaaggaaagaaagtggtgtgtgttactgtagttcattgttttgcctactcagcagaagtgatgactcttaaaaattggctttgaccaaagttctcttgttttcagggaaagaacataaaagctttttgaaccacagcctttttaaaagaggggtgggaagatattatagtaagaaatttggctttctaaaaatatgaaaca

SEQ ID NO: 27264 - DNA, 1521 bp, Macaca Mulatta
  misc_feature (1)...(1521): n = A,T,C or G
attgccggagccagccgagccgccagagccgcaggccggggcgtcgcgggcccannnnnnnnnnnnnnnnnnnnnnnnnnnnnnnnnnnnnnnnnnnnnnnnnnnnnnnnnnnnnnnnnnnnnnnnnnnnnnnnnnnnnnnnnnnnnnnnnnnnnnnnnnnnnnnnnnnnnnnnnnnnnnnnnnnnnnnnnnnnnnnnnnnnnnnnnnnnnnnnnnnnnnnnnnnnnnnnnnnnnnnnnnnnnnnnnnnnnnnnnnnnnnnnnnnnnnnnnnnnnnnnnnnnnnnnnnnnnnnnnnnnnnnnnnnnnnnnnnnnnnnnnnnnnnnnnnnnnnnnnnnnnnnnnnnnnnnnnnnnnnnnnnnnnnnnnnnnnnnnnnnnnnnnnnnnnnnnnnnnnnnnnnnnnnnnnnnnnnnnnnnnnnnnnnnnnnnnnnnnnnnnnnnnnnnnnnnnnnnnnnnnnnnnnnnnnnnnnnnnnnnnnnnnnnnnnnnnnnnnnnnnnnnnnnnnnnnnnnnnnnnnnnnnnnnnnnnnnnnnnnnnnnnnnnnnnnnnnnnnnnnnnnnnnnnnnnnnnnnnnnnnnnnnnnnnnnnnnnnnnnnnnnnnnnnnnnnnnnnnnnnnnnnnnnnnnnnnnnnnnnnnnnnnnnnnnnnnnnnnnnnnnnnnnnnnnnnnnnnnnnnnnnnnnnnnnnnnnnnnnnnnnnnnnnnnnnnnnnnnnnnnnnnnnnnnnnnnnnnnnnnnnnnnnnnnnnnnnnnnnnnnnnnnnnnnnnnnnnnnnnnnnnnnnnnnnnnnnnnnnnnnnnnnnnnnnnnnnnnnnnnnnnnnnnnnnnnnnnnnnnnnnnnnnnnnnnnnnnnnnnnnnnnnnnnnnnnnnnnnnnnnnnnnnnnnnnnnnnnnnnnnnnnnnnnnnnnnnnnnnnnnnnnnnnnnnnnnnnnnnnnnnnnnnnnnnnnnnnnnnnnnnnnnnnnnnnnnnnnnnnnnnnnnnnnnnnnnnnnnnnnnnnnnnnnnnnnnnnnnnnnnnnnnnnnnnnnnnnnnnnnnnnnnnnnnnnnnnnnnnnnnnnnnnnnnnnnnnnnnnnnnnnnnnnnnnnnnnnnnnnnnnnnnnnnnnnnnnnnnnnnnnnnnnnnnnnnnnnnnnnnnnnnnnnnnnnnnnnnnnnnnnnnnnnnnnnnnnnnnnnnnnnnnnnnnnnnnnnnnnnnnnnnnnnnnnnnnnnnnnnnnnnnnnnnnnnnngcaaatcaacaacgtcagcgccatgctggtcctcgcccggccggtgacaggcccccgggagtacgtgctggacctggagatggtcaccatgaattccctcatgagctaccgggccagctctgtactgaggctcaccgtctttgtgggggcctacaccttctgaggagcaggagggagccaccctccctgcagctaccctagctgaggagccttttaaaagggtagaacgagaaaggcaataaagggagaaagaaggaaaggtggtggctgaggtgggcgggtcacactgca

SEQ ID NO: 27265 - DNA, 890 bp, Macaca Mulatta
  misc_feature (1)...(890): n = A,T,C or G
gggatagaaatgggtttggaccgcatcaaagagctgcccgaactctggctggggcaaaacgagtttgattttatgacggacttcgtgtgcaaacagcagcctagcagagtgagctgttgactcggtcgaaaccccggcgaaagaaatcaaacccccaacttcttcggtgtgaattaaaagaaacattcccgtagacacagtatctcacttttcagatcttgaaaggtttgagaacttggaaacaaagtaaactataaacttgtacaaattggtttaaaaaaaattgctgccannnnnnnnnnnnnnnnnnngtttcgtttttgtagccttgacattcacctcccttatgtagttgaaatatctagctaacttggtctttttcgttgtttgtttttactcctttccctcactttctccagtgctcaactgttagatattaatcttggcaaactgcttaatcttgtggattttgtagatggtttcaaatgactgaactgcattcagatttacgagtgaaaggaaaaattgcattagttggttgcatgaactttgaagggcagatattactgcacaaactctgccatctcgcttcatttttttaactatgcatttgagtacagactaattttttaaatatgcttaaactgggaagatttaacagatgtggggcccaaactgtttctgggatcaggaaaaagtcatacctgttccacttttcaagtttgggctgttccccccccttggcaaccccccccaaccccccaataatgttacaagaattgataaattagggtggtgggaatgtcctttcagttgggcaaaacattttcaccagaatattttaattttgggtttccggctccttccaacaatgtttggaacacttggtc

SEQ ID NO: 27266 - DNA, 246 bp, Macaca Mulatta
aaaagggaagagcctttcacatctataaacctcctcattgcaaattcctttcttctgcccctgtttcctgaggaaactatggtgttttctcccggataacaggagcatattatttcaggagtcagtgacattcgattatgtagctgtgaacttcactaacagggagtggcagagtctgacctacgctcaaaggcatctctataagcatgtcatgttggaaaattatgggaacatggtatcacttgg

SEQ ID NO: 27267 - DNA, 1174 bp, Macaca Mulatta
  misc_feature (1)...(1174): n = A,T,C or G
tgagaaagtaattatgttggtgcattacttgctgtacaagtaccaaatgaaagagcccattacaaaggcagatatgctgagaaatgtgacccatatgtgcaagagccagttccccgtaatcctgaggagagcttctgagcacctagagctgatctttggtcttgacctgaaggaagtggagcctaataagcacatctatgtcctgatcaacaaactagatctagactgtgatgcaaggctgagtgatgaaacaagcgtgcccaagactggcctgctgatgactgtcctgggtattatcttcacaaagggtaattgtgctgctgaggaggaaatctggaaagtgtttaatatgatggggttatatgatggaattgagcacttcatttttggggagcccaggaagctccttaccaaagatttggtgaaagaaaattacctggagtaccagcaagtgcccaacagtgatcctccacgctatcaattcctatggggcccaagagcccatgccgaaaccagcaagatgaaagttcttgagtttttggccaaggtaaataatacagttcccagtgaattctcaacctggnnnnnnnnnnnnnnnnnnnnnnnnnnnnnnnnnnnnnnnnnnnnnnnnnnnnnnnnnnnnnnnnnnnnnnnnnnnnnnnnnnnnnnnnnnnnnnnnnnnnnnnnnnnnnnnnnnnnnnnnnnnnnnnnnnnnnnnnnnnnnnnnnnnnnnnnnnnnnnnnnnnnnnnnnnnnnnnnnnnnnnnnnnnnnnnnnnnnnnnnnnnnnnnnnnnnnnnnnnnnnnnnnnnnnnnnnnnnnnnnnccagaggccctctaggtgagaaagtaattatgttggtgcattacttgctgtacaagtaccaaatgaaagagcccattacaaaggcagatatgctgannnnnnnnnnnnnnnnnnnnnnnnnnnnnnnnnnnnnnnnnnnnnnnnnnnnnnnncacctagagctgatctttggtcttgacctgaaggaagtggagcctaataagcacatctatgtcctgatcaacaaactagatctagactgtgatgcaaggctgagtgatgaaacaagcgtgcccaagactggcctgctgatgactgtcctgggtattatcttcacaaagggtaattgtgctgctgaggaggaaatctgg

SEQ ID NO: 27268 - DNA, 421 bp, Macaca Mulatta
aagccgctgacctgtgactcatgcgagacgggaaagtagcgccacagacgccgggtctccttggctgtttgtgagccgcccgtggccacctcgtcctggctcgcagggtgcaggaccgcctcgttctctgggtggccagcttgctgctccggtttgggctgtcctactttaacgccatcccagggctccacaggccgctgtgagcgctggctccctgggcagtgctcctccgtgtggacggtgcctcgggccagggctcaccagctggggtcctgtccagaaggatgggatctttctgggagctgcgccggaccgagtggggagctcctagtttggaggggggaagctttgatatccatgccacgtccatccaccccaccccttttcgtcacgagcacaatggtcttacattggatttttg

SEQ ID NO: 27269 - DNA, 109 bp, Macaca Mulatta
gatgcattcgctaaaaagtgaagcattagtagcaaatggcagtcagtcagaaagttcagtgtctactccatctgcctcatttgaacctgacaacacttgtgaaaactct

SEQ ID NO: 27270 - DNA, 368 bp, Macaca Mulatta
gatttcatctatatagtgcttgacctttgttatttagagcaatttagaaataatttgacatgttgtatccataaaatctaatctaatgatcttctctttttctcttcagtctatacagtaacccaagtgggatgcctccttatgcttctcagggttttccatttcttcctccatatcctccacaagaagcaaacaggaatatcacttctttatctgttgctgacactgtttcttcaacaagttataccacagccaagcctgccgctccttcatttggtgtcctttcaaatctgccattacccattcccacaatggatgcttcaataccggttggtatcgtcagttatctatattttgtgccactgaaa

SEQ ID NO: 27271 - DNA, 281 bp, Macaca Mulatta
acctgctccgggtgcggcctacctgcccttgtgctgctgtcgggggcccgcaccttccgcctggccccttaaaagtggttcctacgggagggcctgctcttcaccgccctggccgcctccaccttcagcctgctgttcacctccggagagcgctttgccaccatggtgcggccggtggccgagagtggggccaccaagaccggccgcgtctacagcttcatcggcctctgctggctgctggccacgttgctgggaatgctgcctttgctgggctggaactg

SEQ ID NO: 27272 - DNA, 2329 bp, Macaca Mulatta
  misc_feature (1)...(2329): n = A,T,C or G
cctgcgacaggtggagcgcacggcgcgggagtacggccatgtccgccgagggctcggagctggggcccgggtccggtcccgggccggggcctgagccggggccactctgccccgaacacggccaggctctgagctggttctgccgctccgagcgacggcccgtgtgcgccgcctgcgcggggctgggcggtcgctgtcgggggcaccgcatccgccgggcggaggagcgcgccgaggagctgcggngaacaagattgtggaccagtgtgagaggctgcagttacaaagtgctgccatcaccaagtatgtggcggacgtcctgccagggaagaaccaaagagcagtgngagcatggccagtgcagcgagggaactggttatccagcggttgagtctggtgaggagtctttgcgagagcgaggagcagcggttactggaacaggtgcatggcgaagaggagcgggcccaccagagcatcctgacacagcgggtgcactgggccgaggcactgcagaagcttgacaccatccgcaccagcctggtgggcatgcttacccacctggatgacctgcagctgattcagaaggagcaagagattttcgagagnnnnnnnnnnnnnnnnnnnnnnnnnnnnnnnnnnnnnnnnnnnnnnnnnnnnnnnnnnnnnnnnnnnnnnnnnnnnnnnnnnnnnnnnnnnnnnnnnnnnnnnnnnnnnnnnnnnnnnnnncaggcacagaggacatacggatcgatgagaggacagtcagccccttcctgcaattgtcagatgatcgaaagaccctgaccttcagcaccaagaagtcaaagacctgtgcagatggcccagagcgcttcgaccactggcccaatgccctggctgccacctccttccagaatgggctccatgcctggatggtgaatgtccagaacagttgtgcctataaggtgggcgtggcctcaggtcacctgccccgcaagggttctggcagtgactgccgtctgggccacaatgccttctcctgggtcttctctcgctatgatcaggagtttcgtttctcacacaatgggcagcacgagcccctggggctgttgcggggcccagcccagctgggtgtactgctggacttgcaggctcgggagctgctcttctatgagccagcctccggcacagtgctgtatacccatcatgggtccttcccggggcccctcttcccagtctttgctgtggccgatcagaccatttccattgtccgctgacctctggccacaggaagccaggtccacctcccaccatcctttcaggccatgtttctactcagtgtccttttcccaaatgatgtgtgtggtgtttctaagggaaacaaggcccacaaccagtgggcagctttaggagggatggggatctctttcagatctaggcacaacctgtaaatcacaggtgtccaaacttttggcttccctgggccacattcgaagaattttcttgggccacataaaatacactaacgatagctgatgagcnnnnnnnnnnnnnagtctgtttatacattttcgtgatatctgccaccacggataagcaaaaaagtccttgcattcaaagggttggagattgctgctctgaatgctggctatctatggggaacccattgttccctgggccttagtctcccaaatccaccatgcatctgcccctctgagggtgtcttcactttgtctctggcatccagcatggtgcctggtgcatagtgagtatgcaataaatatttggcaggtgagtggatggatagatggataagtgaatgtaggtggacaggtgacttggttggatgtggtggtctctggagaagcactgccattcagcctcctgctccagctttgcacatgcagaagtgcttctcttcacaggcagaggagcctgtggctaacgtttccgcatccaattaattcagtgctgctttttcatgacatggcacatagagaaaatattttttctagcacacaagagcaacctgaaaggctactcctggccagcggactctgtcctaggggaccgtgtcctcccccatgtcctgcctaggccctcagaggaccagggaatcgtgtctccaggtaacctgactgcagccccnnnnnntgagctccagcctgtgcccaccggtaatagcagggatggccttttcccttagagaagctgataagtttccctacctgatggccccttctaacataaactgcatacctggggtgatggcttaaagccagaaagagctgagggagcaagagggccaacctcagggcacgtgggcattattaaaggtcttgaaagcatt

SEQ ID NO: 27273 - DNA, 751 bp, Macaca Mulatta
gggttagcaaatgtattcatctgctggatcttgtaaacatgaaaagggctttattttcaaaaattaactttaaaataagtgtataaaatgtaactgttgatttcctcaacatggctcacaaatttgtatcccaaatcttttctgaagatgaaataagagtttagttttgaaactgcactgccaacaagttcacttcatatataaagcattatctttactcttttgaggtgaatataacttatattacactgtaaaagcttctttaatactatttttcaagtcttcaccaagtatcaaagtaataacacaaatgaagtgtcattattcagaacagtccactgactcctcacatctgttatcttattataaagaactctgtagtaactctttgtagtaacattctaaaacagaaattgcatttttgctatgccacattaacattttttaaagttgatgagaatcaagtatggaaaagtaaggccatactcttacataataaaattactcttaagtaattttttcaaagactcacagaattctagtacctgtaggtaaaccataaatctgttctaagacatatgatcaacagatgagaactgggggttaatatgtaacagtgagattagtcatatcactgatatactaacagaatagaatctaatcttcatttaagacaccgtaatgaattatctgacctagagttacctagtttaccacgctgtatcttttgaatcatgaaaacctaagactt

SEQ ID NO: 27274 - DNA, 146 bp, Macaca Mulatta
gagaattcagcctcagcccccagatgaagatggggatcacagtgacaaagaagatgaacagcctcaagtggtggttttgaaaaagggagacctgtcagttgaagaagtcatgaaaattaaagcagaaataaaggctgccaaagcag

SEQ ID NO: 27275 - DNA, 411 bp, Macaca Mulatta
  misc_feature (1)...(411): n = A,T,C or G
aagccaacaggagtggacatctctgaagcacctcagacctcttctccctgcccatctgctgacagtnnnnnnnnnnnnnnnnnnnnnnnnnnnnnnnnnnnnnnnnnnnnnnnnnnnnnnnnnnnnnnnnnnnnnnnnnnnnnnnnnnnnnnnnnnnnnnnnnnnnnnnnnnnnnnnnnnnnnnnnnnnnnnnggtttctacatgaccaaaatagttctgctttcaaattctatcgaaagaaagtgtttgaactatgtccatcaatttgtttcacatcatctccgcacaaccttcacactggtggtggtgacactgcgggttctcaggagagccccgtggacctcatggaaggggaaggagagtttgaagatgagccccctccgcgggaggctgagctggaaagcccagag

SEQ ID NO: 27276 - DNA, 759 bp, Macaca Mulatta
  misc_feature (1)...(759): n = A,T,C or G
cagttgctgtgattggctggtaaatatttgtcaaagaaagaaagaactgaaagctcgcacagtatggcttggatgtcctgaaaagtgtgaagaaaaacatcccaggaattctatnnnnnnnnnnnnnacaatgtgtttacctttatacctggggtnnnnnnnnnnnnnnnnnnnnnnnnnnnnnnnnnnnnnnnnnnnnnnnnnnnnnnnnnnnnnnnnnnnnnnnnnnnnnnnnnnnnnnnnnnnnnnnnnnnnnnnnnnnnnnnnnnnnnnnnnnnnnnnnnnnnnnnnnnnnnnnnnnnnnnnnnnnnnnnnnnnnnnnnnnnnnnnnnnnnnnnnnnnnnnnnnnnnnnnnnnnnnnnnnnnnnnnnnnnnnnnnnnnnnnnnnnnnnnnnnnnnnnnnnnnnnnnnnnnnnnnnnnnnnnnnnnnnnnnnnnnnnnnnnnnnnnnnnnnnnnnnnnnnnnnnnnnnnnnnnnnnnnnnnnnnnnnnnnnnnnnnnnnnnnnnnnnnnnnnnnnnnnnnnnnnnnnnnnnnnnnnnnnnnnnnnnnnnnnnnnnnnnnnnnnnnnngaaatgtttgctagacaatgtgtggaagtacaaggaagtcagagagcaagtgcgggttggctgaaaaacctggttcaaagggaagcatatggctcagtatgcaggnnnaggaagacagtgacccgcccgttcatgaaagtctcagcatagaaaatacattgtgggcaagcaccgttgttgcatcgggta

SEQ ID NO: 27277 - DNA, 294 bp, Macaca Mulatta
  misc_feature (1)...(294): n = A,T,C or G
gtggtgccctggggcgtccgcactgcctcgggagtcgccctgcccccggtcggggtcctcagncagcctccgccccccaggaccggcctgggcggatcccgctaccccccggccgcggaggagcctggcgctggcggacgacgcggccttccgggagcgcgcgcggttgctggccgccctcgagcgccgccactggctgaactcgtacatgcacaagctgttggtgttggacgcgcgctgagcgcgccgcctgtcccatctttataaagaccctgcagtgcgctccggactgcg

SEQ ID NO: 27278 - DNA, 785 bp, Macaca Mulatta
gggtggaacgagatggcggttgtctggaggctgagtgccctttgcggtgcccaaggaggccgagctctgttgctgcgaaccccagtggtcagacctgctcatatctcagcatttcttcaggaccgacctatcccagaatggcgtggagtgcagcacattcacttgtcacccaggcaccattgggccttggacaagttgttactgactatgttcatggggatgcctcgcagaaagctgccaaggcagggcttttggcactttcagctttaacctttgctgggctttgctatttcaactatcacgacgtgggcatctgcaaagctgttgccatgctgtggaagctctgacctttttgacttcatactttgaagaattgatgtatgcctctttgcctctgctttgtcatgccattcagctcacaataaggaagaaataacagataagtccatttgtggacagcctttttctcttaataatcttaatcttaagattattttcagaatttaatctttgaggaaaaggtataaggaattgtgtctaagaaattgtgacactgagttctgtattctggtgagttaatggggttgcctcccagcttctcataagactcacagtataactaaacatgatatatgagcttttgccttttaatttatcaatctcttggaagatatccagctttattactattagtatatgatcaaacttccatatttgcccttggcataatgggacaaaggggaaatactctttaattcatgaaattaaaaacttttgcagaaaac

SEQ ID NO: 27279 - DNA, 5642 bp, Macaca Mulatta
  misc_feature (1)...(5642): n = A,T,C or G
aggtgctggctgccagctgctgcgccccctatgtagaaggtgcacctcctgggagctggcccgtctttcttttcttctgaccatggagagataggacggtccctgcagcccgcgcgagagaaagctgtgccaccaccaccggccgcgcccgtccttcggatggatcgcaacagagaggccgagatggagctgaggcgaggccccagccccaccagggccggccggggccacgaggtggatggggacaaggctacgtgccacacttgctgcatctgcggcaagagcttccccttccagagctcgctttcgcagcacatgcgcaagcacacgggcgagaagccctacaagtgtccctactgcgaccaccgggcttcccagaagggcaacctgaagattcacatccggagccaccgcacggggactctgattcagggacacgagccagaggcgggtgaggcgccgctgggcgagatgcgcgcctccgagggcctggacgcctgcgccagccccaccaagagtgcctcggcctgcaaccggctgctgaacggggcctcacaggccgacggcgccagggttctgaacggggcctctcatgccgacagcggcagggtcctgctgcggagcagcaagaagggggcggaggggtccgcatgcgcccccggggaggcgaaggccgcagcccagtgctccttctgcaagagccagttcgagcgtaagaaggacctggagctgcacgtgcaccaagcgcacaagccgttcaagtgcaggctgtgcagctacgcgacgctgcgggaggagtcgctgctgnnnnnnnnnnnnnnnnnnnnnnnnnnnnnnnnnnnnnnnnnnnnnnnnnnnnnnnnnnnnnnnnnnnnnnnnnnnnnnnnnnnnnnnnnnnnnnnnnnnnnnnnnnnnnnnnnnnnnnnnnnnnnnnnnnnnnnnnnnnnnnnnnnnnnnnnnnnnnnnnnnnnnnnnnnnnnnnnnnnnnnnnnnnnnnnnnnnnnnnnnnnnnnnnnnnnnnnnnnnnnnnnnnnnnnnnnnnnnnnnnnnnnnnnnnnnnnnnnnnnnnnnnnnnnnnnnnnnnnnnnnnnnnnnnnnnnnnnnnnnnnnnnnnnnnnnnnnnnnnnnnnnnnnnnnnnnnnnnnnnnnnnnnnnnnnnnnnnnnnnnnnnnnnnnnnnnnnnnnnnnnnnnnnnnnnnnnnnnnnnnnnnnnnnnnnnnnnnnnnnnnnnnnnnnnnnnnnnnnnnnnnnnnnnnnnnnnnnnnnnnnnnnnnnnnnnnnnnnnnnnnnnnnnnnnnnnnnnnnnnnnnnnnnnnnnnnnnnnnnnnnnnnnngcggccggcgacgcgtgcccaggcgcacaggccggacggcgggtggccgagctggacccggtcaacagctaccaggcctggcagctggccacgcggggcaaggtggccgagccagccgagtacctcaagtatggggcctgggacgaggcgttggccggggacgtggccttcgacaaggacaggcgcgagtacgtcctggtgagccaggagaagcgcaagcgcgagcaggacgcaccggccgcgcaggggcccccgcgtaagcgcgcgactgggcctggggatccagcgcccgctggccacctcgatccacgctcggccgcgcgccccaaccgcagggccgcagccaccactggccagggcaagtcctccgagtgcttcgagtgcggcaagatcttccgcacctatcatcagatggtgctgcactcgcgcgtgcatcgccgtgcgcgccgcgacagggacagtgatggggaccgggcggcgcgggcccgctgcggatcactcagtgagggtgactcggcttcccagcccagcagccccggctccgcctgtgccgctgccgactccccaggctctggcctggcggacgaggctgccgaagacagcggtgaggagggcgcccccgaacctgtaccagnngggggacagccgcgccgctgctgcttttccgaagaggtgacttcgaccgagctcgccaatggagaccagagtcacaagctgggagataacggctcggaaagagacaccggcgagtccaaggcggggatcgcagcttctgtgtccatacttgaaaacagtagcagagagacttctagaaggcaagagcagcacagattttctacggacttaaaaatgccagcatttcaccccaagcaggaggtgcccgttcctggtgatggtgtggagttcccttccagtacgggagtggagggccagacgggtcaccctgcagaaaagctgtccgatttgcacaacaaggagcactctgggggagggaagcgggcgctggcctcagacctcgtgccgctggatttaagtgcgaggtcgacgcgggatgaccccagcaataaggagacagcctcctccctgcangcggctttagtcgttcacccgtgtccttactgcagccacaagacctactaccccgaggtccnnnnnnnnnnnnnnnnnnnnnnnnnnnnnnnnnnnnnnnnnnnnnnnnnnnnnnnnnnnnnnnnnnnnnnnnnnnnnnnnnnnnnnnnnnnnnnnnnnnnnnnnnnnnnnnnnnnnnnnnnnnnnnnnnnnnnnnnnnnnnnnnnnnnnnnnnnnnnnnnnnnnnnnnnnnnnnnnnnnnnnnnnnnnnnnnnnnnnnnnnnnnnnnnnnnnnnnnnnnnnnnnnnnnnnnnnnnnnnnnnnnnnnnnnnnnnnnnnnnnnnnnnnnnnnnnnnnnnnnnnnnnnnnnnnnnnnnnnnnnnnnnnnnnnnnnnnnnnnnnnnnnnnnnnnnnnnnnnnnnnnnnnnnnnnnnnnnnnnnnnnnnnnnnnnnnnnnnnnnnnnnnnnnnnnnnnnnnnnnnnnnnnnnnnnnnnnnnnnnnnnnnnnnnnnnnnnnnnnnnnnnnnnnnnnnnnnnnnnnnnnnnnnnnnnnnnnncaccgtcatcacccgggctggcgcgcagccctcggctaacagcaagcccgtggagaagtttggggtccccccagcgggggctggctttgcccccacaagtaagcacagtgccccggactccctgaaagccaaattcagccctcagcctcagggtccacctcctgcaaagggcgaagggggcgctcctcctctacctccccgcgagcccccttcgaaggcggcccaggagctgaggactctggccagctgtgctgcggggtccaggggcgacgcggccttgcaggcccagcccggcgtggctggggcgccccccatcctacactccatcaaacaggagccggtggccgaggggcatgagaagcgcctggacatcctcaacatctttaagacgtacattccaaaggactttgccaccctctaccagggctggggtgtcagcggccctgggctggagcacagagnggacgctccggacgcaggcccggccaggagagttcgtctgcatcgagtgcgggaagagcttccaccagcccggccacctcagggcccacatgcgggcacactcagnnagtggtgtttgagtccgatggaccccggggttctgaagttcacaccacctccgcagatgcccccaaacaagnnnnnnnnnnnnnnnnnnnnnnnnnnnnnnnnnnnnnnnnnnnnnnnnnnnnnnnnnnnnnnnnnnnnnnnnnnnnnnnnnnnnnnnnnnnnnnnnnnnnnncagtaccctcacgatgtccccgcagcctcccacctgtgacctggccactccacggaagaacagccggagaactcctgagcagacacctcacatcccgagccgctgcgctggagtggaacctgaaggcagatgcctctccttgttaaacgttcagaaataaatgaagatgctatactctagaaatacatgtagatactatatacacatttacgtgctcatcgcccatagtcccatattttcttataataaacagtagtactggcaggcacagtaggggcacaaggcatctatcttattcaagacaagtttgagacactggaaaaaaagatacttgttacgtgtgttggacagagtggcgaggctgagcactgtcacaggggcctcccatgctaagagggactgtggagatgatgtcagcaaaaaccgtggtggatttgaggttgatcgagtattaatactactgcctctccttgtcttagtgggtatttaaaatagtaaatgagagaggggaaggttcaggtgctgtgggaagcaggcttggtggaggggcatgatgatgggaccctcatnnnnnnnnnnnnnnnnnnnnnnnnnnnnnnnnnnnnnnnnnnnnnnnnnnnnnnnnnnnnnnnnnnnnnnnnnnnnnnnnnnnnnnnnnnnnnnnnnnnnnnnnnnnnnnnnnnnnnnnnnnnnnnnnnnnnnnnnnnnnnnnnnnnnnnnnnnnnnnnnnnnnnnnnnnnnnnnnnnnnnnnnnnnnnnnnnnnnnnnnnnnnnnnnnnnnnnnnnnnnnnnnnnnnnnnnnnnnnnnnnnnnnnnnnnnnnnnnnnnnnnnnnnnnnnnnnnnnnnnnnnnnnnnnnnnnnnnnnnnnnnnnnnnnnnnnnnnnnnnnnnnnnnnnnnnnnnnnnnnnnnnnnnnnnnnnnnnnnnnnnnnnnnnnnnnnnnnnnnnnnnnnnnnnnnnnnnnnnnnnnnnnnnnnnnnnnnnnnnnnnnnnnnnnnnnnnnnnnnnnnnnnnnnnnnnnnnnnnnnnnnnnnnnnnnnnnnnnnnnnnnnnnnnnnnnnnnnnnnnnnnnnnnnnnnnnnnnnnnnnnnnnnnnnnnnnnnnnnnnnnnnnnnnnnnnnnnnnnnnnnnnnnnnnnnnnnnnnnnnnnnnnnnnnnnnnnnnnnnnnnnnnnnnnnnnnnnnnnnnttcttttcccattgccgtgacactatgtgtgatggtaatattgagagtttcagatttttgcacatatgattttatgcattatcaaaagttactgctgccttgaatgaaaatgttctgtgaaattttttgcaaaagctttactaggtttttttttaattgtgaaattttgtaaaggcaggaaatggattaaaacgagcatgctaaatatatttttcaaaaaagcaataattttacatgtacagaaattatcctaacctttaatactggtgagagcaacagtttacttaatacagtaatggattagtgcagtttttgtagacagtgggcttctgatacaaagtcttgtttannnnnnnnnnnnnnnnnnnnnnnnnnnnnnnnnnnnnnnnnnnnnnnnnnnnnnnnnnnnnnnnnnnnnnnnnnnnnnnnnnnnnnnnnnnnnnnnnnnnnnnnnnnnnnnnnnnnnnnnnnnnnnntgtttggttctggattctacttgttactgagtttaaattacttgacggttcaggttactttgcaacactttcaaacaatgcaatgtaactggctagcnnnnnnnnnnnnnnnnnnnnnnnnnnnnnnnnnnnnnnnnnnnnnnnnnnnnnnnnnnnnnnnnnntcttacaccagatatgtacgaaaatgatctgttctgtgggtgtaattaggaatgtccatgcagatacagttaagcaactgtagatagagctgttctgtaaagttattttgagca

SEQ ID NO: 27280 - DNA, 618 bp, Macaca Mulatta
  misc_feature (1)...(618): n = A,T,C or G
gggattcctgcagataagcaggacagccgcagtgtctattcctgtcctgtgtacaagaccagtcagcggggacccacctacgtgtggactttcaacctgaagactaaggaaaacccatccaagtgggttctggctggagtagccttgcttctccagatttagcttcctgcagagccaccgagaaaataaaaaggctgggcttggaggctgcccagagggacaggtgggtgaagggtgaccacagacacttagaaagataagaaaccatgagcactcacaattctgtagaattcctctagggaacttggagaggtgtgcctaaagtgaggttgagctggaggaatatgggcccaggaaccaaggaagataatttcatgatgctaacccttcttaataaaatgatttactnnnnnnnnnnnnnnnnnnnnnnnnnnnnnnnntgccggccgccccgccccccaaaaaattttttaaaccattcttttggcccgcggccccatagggaaagaaaaagggccatactgtttccaagaaaacccgcgcaaaaaaaggcttggatnnnnnnnnnnnnnnnnnnngggggaaacaaggttttaaaaatcccaaggggtgttgagg

SEQ ID NO: 27281 - DNA, 1102 bp, Macaca Mulatta
  misc_feature (1)...(1102): n = A,T,C or G
tagcaggtaacatctaaaggaactggtttaaatcctaatgccaaagtatggcaagaaattgctcctggaaatactgatgccaccccagtaactcatggaactgaaagctcttggcatgaaacagcagctacatcaggtgctcatcctgagggtannnnggtaatgcagagctctcagaagatacatgtaaagaatatgaagtaatgtattcttcgtcttgtgaaaccacaagaaatactacaggcattgaagaatcaactgatgggatgattttaggaccagaagatctgagttaccaaatatatgatgtttccgnnnnnnnnnnnnnnnnnnnnnnnnnnnnnnnnnnnnnnnnnnnnnnnnnnnnnnnnnnnnnnnnnnnnnnnnnnnnnnnnnnnnnnnnnnnnnnnnnnnnnnnnnnnnnnnnnnnnnnnnnnnnnnnnnnnnnnnnnnnnnnnnnnnnnnnnnnnnnnnnnnnnnnnnnnnnnnnnnnnnnnnnnnnnnnnnnnnnnnnnnnnnnnnnnnnnnnnnnnnnnnnnnnnnnnnnnnnnnnnnnnnnnnnnnnnnnnnnnnnnnnnnnnnnnnnnnnnnnnnnnnnnnnnnnnnnnnnnnnnnnnnnnnnnnnnnnnnnnnnnnnnnnnnnnnnnnnnnnnnnnnnnnnnnnnnnnnnnnnnnnnnnnnnnnnnnnnnnnnnnnnnnnnnnnnnnnnnnnnnnnnnnnnnnnnnnnnnnnnnnnnnnnnnnnnnnnnnnnnnnnnnnnnnnnnnnnnnnnnnnnnnnnnnnnnnnnnnnnnnnnnnnnnnnnnnnnnnnnnnnnnnnnnnnnnnnnnnnnnnnnnnnnnnnnnnnnnnnnnnnnnnnnnnnnnnnnnnnnnnnnnnnnnnnnnnnnnnnnnnnnnnnnnnnnnnnnnnnnnnnnnnnnnnnnnnnnnnnnnnnnnnnnnnnnnnnnnnnnnnnnnnnnnnnnnnnnnnnnnnnnnnnnnnnnnnnnnnnnnnnnnnnnnnnnnnnngctccctttcccaatggtagttttgtgaatggctttaattcgccaggatcttataaaacaaatgctgctgctatgaatatgggtcgaccattcc

SEQ ID NO: 27282 - DNA, 1463 bp, Macaca Mulatta
gtcccggactccgacgagtggtagccccaggatgggtgagtttaacgagaagaagacaacatgtggcaccgtttgcctcaagtacctgctgtttacctacaactgctgcttctggctggccggcctggctgtcatggcagtgggcatctggacgctggccctcaagagtgactacatcagcctcctggcctcgggcacctacctggccacagcctacatcctggtggtggcgggcgctgtcgtcatggtgaccggggtcttgggctgctgtgccaccttcaaggagcgtcggaacctgctgcgcctgtacttcatcctgctcctcatcatctttctgctggagatcatcgctggtgtcctcgcctatgtctactaccagcagctgaacacagagctcaaggagaaccttaaggacaccatggccaagcgctaccaccagccgggtcacgaggccgtgaccagcgctgtggaccaactgcagcaggagttccactgctgtggcagcaacaactcacaggactggcgggacagtgagtggatccgcttaagggaagcccgtggccgcgtggtccccgatagctgctgcaagacggtggtggctggttgtgggcagcgggaccacgccttcaacatttacaaggtggagggcggcttcatcaccaagttggagaccttcatccaggagcacctcagggtcattggggctgtggggactggcattgcctgtgtgcaggtctttggcatgatcttcacatgctgcctgtacaggagcctcaagctggagcactactgaccctgccctgggcttggccgcggctctgtgctttgctgctgctgcacccaactactgagctgagaccactgagtaccaggggctgggctccctgatgacacccaccctgtgccatcaccataactttggggaccccaaccccagaggcaagcttcaagtgcctttcgctgcacaccaaagcccagcagggaagtgaggggggctggcgggacgacggtatcgggggtgttttgtggggctgcctgaacacattctgcctggtggtcagatgcaggctagccggggccttgctgagtagggcaaggccgagtgttcccagcagggggagaagcccttcacatcccaggcccttcagggattagggctttgccttgcagccacatggccccatcccagtttgagaagctgagtaagctctgacccttgggcctgggcctctgcccctccccacccaggcctcgtctccctcagagcccctgctgtcttccccaccgcagtcaccaccacccgaaatgccacatggtcacttgtgcactgccccgtccatgtgcctgtgtggggcaggggcctcccggttttgttcactgctgtacccagatgcctacaaccatccctgccacatacaggtgctcaataaacacttgtggggcagatggacgaaaaaaaaaaa

SEQ ID NO: 27283 - DNA, 970 bp, Macaca Mulatta
  misc_feature (1)...(970): n = A,T,C or G
agcccattgaggatatttcacaacctgaaagatgtgggatttctccaggtgaaagtcatcagagcggaagggttaatggctgctgacgtcactgnnnnnnnnnnnnnnnnnnnnnnnnnnnnnnnnnnnnnnnnnnnnnnnnnnnnnnnnnnnnnnnnnnnnnnnnnnnnnnnnnnnnnnnnnnnnnnnnnnnnnnnnnnnnnnnnnnnnnnnnnnnnnnnnnnnnnnnnnnnnnnnnnnnnnnnnnnnnnnnnnnnnnnnnnnnnnnnnnnnnnnnnnnnnnnnnnnnnnnnnnnnnnnnnnnnnnnnnnnnnnnnnnnnnnnnnnnnnnnnnnnnnnnnnnnnnnnnnnnnnnnnnnnnnnnnnnnnnnnnnnnnnnnnnnnnnnnnnnnnnnnnnnnnnnnnnnnnnnnnnnnnnnnnnnnnnnnnnnnnnnnnnnnnnnnnnnnnnnnnnnnnnnnnnnnnnnnnnnnnnnnnnnnnnnnnnnnnnnnnnnnnnnnnnnnnnnnnnnnnnnnnnnnnnnnnnnnnnnnnnnnnnnnnnnnnnnnnnnnnnnnnnnnnnnnnnnnnnnnnnnnnnnnnnnnnnnnnnnnnnnnnnnnnnnnnnnnnnnnnnnnnnnnnnnnnnnnnnnnnnnnnnnnnnnnnnnnnnnnnnnnnnnnnnnnnnnnnnnnnnnnnnnnnnnnnnnnnnnnnnnnnnnnnnnnnnnnnnnnnnnnnnnnnnnnnnnnnnnnnnnnnnnnnnnnnnnnnnnnnnnnnnnnnnnnnnnnnnnnnnnnnnnnnnnnnnnnnnnnnnnnnnnnnnnnnnnnnnnnnnnnnnnnnnnnnnnnnnnnnnnnnnnnnnnnnnnnnnnnnnnnnnnnnnnnnnnnnnngcatcaataaatttacaaaaaagcttcggagtccatatgcaattgataacaatgaactactcgacttcctttccagagtcccttcagatgtacaagtgg

SEQ ID NO: 27284 - DNA, 232 bp, Macaca Mulatta
  misc_feature (1)...(232): n = A,T,C or G
gaggacttggagggctggtgtgatgtggagcatggcggggacggctggagggtggaggagctgcctggagacagtggggtggagttcacccacgacgagagcgtcaagaagtacttcgcctcctccttcgagtngtggtgtcgcaaagcgcagatcattggcctgcaggctgagggctactgggaggagctgctggacacgactcagccggccatcgtggtgaaggactggt

SEQ ID NO: 27285 - DNA, 380 bp, Macaca Mulatta
aagcatcaccaagcacttagaagagtgcctggaagactcaaggggcagataaaatgttaagttcaatgactgaatgattgggccagcaacgatgtttagctgtggttcattcatcgctggttccttaggaataaaattgttgagcaatgcattaagacctctgttgatttttaaacaacacaaacaaccatagaaagccgactctgctgtacatgagcctctgtgagccactttgttgcagaggtgcagaatagttgaagtcatgaagaaacgtacaaacacagagtccctcgagggaaggacaagctgcttacccactgggaagggttatactaaaatcccacaagtacaccccatgaaacttcatgctttcgtctaac

SEQ ID NO: 27286 - DNA, 1067 bp, Macaca Mulatta
aaagagtcctggtgacccagcaaaccaagcttcttctcccagagaatgggatctttcacatccttcctccacagacatggccttagtacctagaaatgacagccttcccctgcaagagaccagtagcagcagcttcttaagcagccagcactttgaagacgatgacatttgcaacgtgaccatcagtgacctgtacgcagggatgctgcactccatgagccgcctgttgagcacaaagccatcaagcatcatctccaccaaaacgttcatcatgcaaaactggaactccaggagcaggcacagaggtaagagcaggatgaacaaaacgtattgcaaaggagccagacgttctcagaggagctccaaggagaactttgtaccctgctgtgagcctgtgaaagacacaggagcaatcagagattgcaagaacgtattagatgttccttgccatacgacaggtttaaaattggaaaaagcttttcttgaagtcaacaaaccccaaatccataagttagatccaagttggaaggagctgaaagtgacaccctcgaagtattcttccttgatttatttcaactccagtgcaacgtataatcttgatcaggaagatagatttaggacattaaaatggttaatttctcctgtaaaaatagtttccagaccaagaatacaacagggccatagagagaaccgtcagagggagattgaaacgcgatttgatcagcttcatcgggaatattgcttgagtcccaggaaccagcctccccagatgggcctcccagactcctgggccatgaacgtgtacaaagggggtcctgcgagtcctggtggccttcagggcttagaaacctgcaagctgagtttaccttccagcaaagcaaaagcaagaagtttaagcgaggcttttgaaaacctggccaaaggatctctgaaatcaggtaggtgcctgcccaagagcaattcttcttcacttccaaaggccaaccccacacacagcccagctcgcccgcaacagacctctgatcttcacgttcaagggaacagttctggaatattagaaagtcagt

SEQ ID NO: 27287 - DNA, 724 bp, Macaca Mulatta
agcagatctgggccacgtgtcacccacccaccgcaggctggtcaggcctccctcccgtggtggctgggctccatcggcagcaagagaaagcaaatctccatggtgcttccctccatctccccaggagaagcaggtgagatggccagggcctgagtggatgtgagcgactgtgcaggggacaggcacgggaagcatggttcatcaggacggtcactgcaacagtcttccacaggccttcgctgagatgcaggttggtgtagggaacacaagggaactcaccagaatggaggctgcttatgcaagtttcagcttgttctttttctccctccagagcataggagaacagatggcggccaaggccgggaccctctgctgctcccacgggcctctcaggcagctctgcaggaccagccagcagcctctgattctcccttcctattccatggcctcagatgccatcctttccacagagatagtttgtatcgtgacactctccctgacttggaagaatggcactcagaacattccccttggtgctgatgtcggggtgaaagcagtttccagtcgcctggggccaggacacggcattcccagctgttgtggagcatgaagcaccaggatgcccatttgggtgcctgttgagatcaggctctttgagaaggaatcctgtggtcgcctgaggaggaacgaagaaatttcgaggacatctcagccatccatcccc

SEQ ID NO: 27288 - DNA, 596 bp, Macaca Mulatta
taaagatgtacttgctttcctcagggtggtaaggtttgtgaggatcctgagaattttcaagctcacccgccattttgtaggtctgagggtgcttggacatactcttcgagctagtactaatgaatttttgctgctgataattttcctggctctaggagttttgatatttgctaccatgatctactatgccgagagagtgggagctcaacctaacgacccttcagctagtgaacacacacagttcaaaaacattcccattgggttctggtgggctgtagtgaccatgactaccctgggttatggggatatgtacccccaaacatggtcaggcatgctggtgggagccctgtgtgctctggctggagtgctgacaatagccatgccagtgcctgtcattgtcaacaattttggaatgtactactccttggcaatggcaaagcagaaacttccaaggaaaagaaagaagcacatccctcctgctcctcaggcaagctcacctactttttgcaagacagaattaaatatggcctgcaatagtacacagagtgacacgtgtctgggcaaagacaatcgacttctggaacataacagatcag

SEQ ID NO: 27289 - DNA, 283 bp, Macaca Mulatta
cggagctgcaccgcctggggtcccacccggcccctgccagggcgcagaagccagggagcagtgggctggccgcgcgcgggctgtgcgtcctgggggaggacactatccctctctgagcgaacccggtgggaatccgagcggctcccttcggagcggggactactggaacagcggttattcttctgttattaatgtttttcttactgtccgagatcaaccgtgcaaatgttttggtctcttgtgatgttcagtgcagttttgttgtgatgtttgctattgatat

SEQ ID NO: 27290 - DNA, 356 bp, Macaca Mulatta
  misc_feature (1)...(356): n = A,T,C or G
gagcttgaggccatgagcagatacaccagcccagtgaacccggctgtcttcccccatctgaccgtggtgcttttggccatcggcatgttcttcaccgcctggttcttcgtnnnnnnnnnnnnnnnnnnnnnnnnnnnngtgatatctttcaagagctcctcatctctttggtggcctcactcttcatgggctttggagtccttttcctgctgctctgggttggcatctacgtgtgagcgcccaagggtaanggtaacaaccagatggcttcactgaacccctgcttttgtaaattacttttttttttactgttgctggaagtgtcccacctgctgctcataaaaaggcagatgtat

SEQ ID NO: 27291 - DNA, 779 bp, Macaca Mulatta
  misc_feature (1)...(779): n = A,T,C or G
ggacacaggcagcagagaggggtcagtcccttcttggctgtgccgacactcgagcccacattccatcacctgctcagaatcatgcaggtctccactgctgcccttgccgtcctcctctgcaccgtggctctctgcaannnnnnnnnnnnnnnnnnnnnnnnnnnnnnnnnnnnnnnnnnnnnnnnnnnnnnnnnnnnnnnnnnnnnnnnnnnnnnnnnnnnnnnnnnnnnnnnnnnnnnnnnnnnnnnnnnnnnnnnnnnnnnnnnnnncttcctaaccaagagaggccggcaggtctgtgctgaccccagtaaggactgggtccagaaatacgtcagcgacctggagctgagtgcctgaggggtccggaagcttcgaggtccagcgacctcggtggacccagtggggagcaggagcctgagccttgggaacatccctgtgacctccacagctacctcttctatggactggttgttgcccaacagccactgtgggactnnnnnnnnnnnnnnnnnnnnnnnnnnnnnnatttatttatactatgagttttgtgtaatttattttcgatttcacagtgtgtttgtgattgtttgctctgagagttcccctgtgccctccccctagcctcacactgtgtttggtgacaagtgagtggctgtcattggcctgctgtaggcagtcattgtaccaaagccaccagactgaccaatgtgtatcggatgcttttggtcagggctgtgatcggcctggggaaataataaagatgctcttttaaaagg

SEQ ID NO: 27292 - DNA, 800 bp, Macaca Mulatta
gggggggcagacgcgcgggcgggaagatggcggctgggttcaaaactgtggaacctctggagtattacaggagatttctgaaagagaactgccgtcctgatggaagagaacttggtgaattcagaaccacaactgtcaacataggttcaattagtaccgcagatggttctgctttagtgaagttgggaaatactacagtgatctgtggagttaaagcggaatttgcagcaccaccaacagatgcccctgataaaggatatgttgttcctaatgtggatctaccacccctgtgttcatcgagattccggtctggacctcctggagaagaggcccaagtggctagccagttcattgcagatgtcattgaaaattcacagataattcagaaagaggacttatgcatttctccagggaagcttgcctgggttctatactgtgatctcatttgcctcgactatgatggaaacattttggatgcctgcacatttgctttgttagcggctttaaaaaatgtacagttgcctgaagttactataaatgaagaaactgctttagcagaagttaatttaaagaagaaaagttatttgaatattagaactcatccagttgcaacttcctttgctgtgtttgatgacactttgcttatagttgaccctactggagaggaggaacatctggcaacaggaacctttacaatagttaatggatgaggaaagccaagcttctgttgtcttcaacaaaccaaggtgaaacggggctgaatgggagcctaaaccttccaggactggcttgaaacccga

SEQ ID NO: 27293 - DNA, 765 bp, Macaca Mulatta
gggactttggaaaatatagttttttgtttaaagatttaaactaatatgctggcttttatgtatgatacctaatcagagcattgaccagaaaaattgaaagtgttctaaggcacatagcagaggagctgcagattttctgcttgtattggcgtatatcgttcctcctgagcagcaacccacagtaggtaggaaaatgggctgtttcacaggcctggccacgctctcacggaaccattggcatcagatggtgaagtgactgctacccggttgccatctgttgaacagacttttggatgaagtgtgttggggaagaggataaggttatatctaggacaactctttgagttggtccttcatataagaatcatgacggtaagagaataaacacttgtactggggtcagaatacatgatggatgaaattctttacatgttttagcagaatgaatttgtttaatataataaagtttgctacttatctgtatgtaggttgctaaaaaagattttcttaactcagattttaagccaaataaccatttaacactagtatttgttaaatggggtaattttatctgtattttgtatggtttcactaataaaaaggggaaattaaggataaatggggcatttggagaaaatattttggaaaaacatacattaatttgacctccaaatttttaattttcatggggatcctatttagcctggtttaaaaatgggaaggaatttttcggaaaaggatttataaacctttgggtacacaggg

SEQ ID NO: 27294 - DNA, 816 bp, Macaca Mulatta
  misc_feature (1)...(816): n = A,T,C or G
gggacggcactctggaattgttttagttaagtcattttagacatagcatttattatcactgtggctctctacttgttgggtgttatgaattctttgaagaaatacattttgaagaggtgtgggaggaaggaatacattttataaaatggtatagtgaagcccacaattgatctttgactaataggagttttaaatgtgctaaaaatctatactggacagttacaagaaattactggagaaaagcttgcgagctcgccaaacaaggatttcagtgtagattttgtctttctcgaacttaaaggaacaaatgacaaagtttgaatggaaaggcctgctgttgttccacatctcattgttgctgtttacattcctttctggagcctacatcttcctaagctttttagcacgtgtatgtggaacacatctgctgtttgagtggatgagactcaatcggaggccatggatactgacaactgattggcctggtttttttctgtctttttcccatgactccttatctactgcctcatcttgatttataagcaaaacctggaaaaacctacaaaaaataagtgttgtgggtttatctagaaaaatatgggaaaataattgccggtaatttttgggtgaagaaaaatcaatttttgtataagtttaatttcaatcctnaataaaaagggggaatttttgttttaaggccttagggcatatttatttttggggggggggtcaaaaaaatatggtggggaaaaattcccctnnnnnnnnnnnnnnnnnnnnnntgccttcccaaaattccaggagtggaaaaaaaaa

SEQ ID NO: 27295 - DNA, 170 bp, Macaca Mulatta
tccagactcactgccacaacgacattgtcaaccttctcctggactgtggggccgacgtgaacaagtgctcagatgagggtctcacggcgctcagcatgtgtttcctcgtctactaccctgcccagtccttcaagcccaatgttgctgaacggaccatgcccgagccccag

SEQ ID NO: 27296 - DNA, 280 bp, Macaca Mulatta
aaggaaatatacgaagagtcatcatcttggaaaggaaacatagagtgctttggggcattcaacaatgaatcacttagtttttagagcctgcaatcttaactttgttcaactattatcattgatcacattttgattttttttctccccacatgaggatagtttactgaagcacaatctcttatgttatactagtgggacaaaagggagaaaaaggaagcaagataaatgggtatgtaggatgaagggttatttaaaatggaactgaaactagaaggaggac

SEQ ID NO: 27297 - DNA, 363 bp, Macaca Mulatta
ggtcagtcaccatgaaccagggcactcggcatgctgcctcagcactggagaagcagcgctgtggaggcaatctgtcacactgtcagactctgggagttgacttgctaccaattgctgtgcaattctgctgagcaggaatatcatgagctgttcaataatgacagatgcattggttgagatgaagtttccagtaaggaagtgacagtgcaatgtggatatttatggccgtaaaataggaagagcttaagttcccaggctgaacctgccactgctggagccatttcatttcaacaaggcgtcctcacaacaaagaagagatgtgatttggtaccatttcacatcagcaggtgtctgacgaaaaca

SEQ ID NO: 27298 - DNA, 492 bp, Macaca Mulatta
atgctgcgaaggaaggtagaagaggtaacacaggtttttgaggatcgtcttcacaaggagcatgcacgcgatgtcaacactgcttttcattgaatgaccgtatcttcagcatgtcgtttctggattattacctacaaattctgatgttaaatagagtagtatttatacttaatatttcatcttgatcgtaaatgaattgtgcatcctttttttttcatttaaatattgtactgttgagaattataccttagttttgtttttagtattagaaaatcaaaattatactaacccctttgtccagacagcaacctcttagatgttgaccctgtatgtgtaatttatgtcttactctccctggcatcagtacaacatcatccttctcactccagttgaatcatagggtgatgtttgccaaaagtacatgccaacatatatagtgctagatactgtaaagtctcttcttcttaaaggaacctcctctctagtttgaga

SEQ ID NO: 27299 - DNA, 516 bp, Macaca Mulatta
  misc_feature (1)...(516): n = A,T,C or G
aatcttttcatacactctacaaataaaatgaaatctgtgtgtggtcctggttgactgggcatctaaagggaatcagaaaagagattgtgaaaagtgnnnnnnnnnnnnnnnnnnnnnnnnnnnnnnnnnnnnnnnnncctcttattttagttttgctttttcctattctccataattaagtgctgtttacaaggtggcatcaaaaaattgaagcaggccaggcannnnnnnnnnnnnnnnnnnnnnnnnnnnnnnnnnnnnnnnnnnnnnntggatcacttgagatcaggagttcatnnnnnnnnnnnnnnnnnnnnnnnnnannnnnnnnnnnnnnnnnnnnnnnnnnnnnncgggcgtagtggcgtgcacctgtaatcaannnnnnnnnnnnnnnnnnnnnnnnnnnnnnnnnnnnnnnnnnnnnnnnnnnnnnnnnaatgagccgagatcgcgccactgcactctagcctgggcaacagcaagacaccgtctnnnnnnnnnnnnnnnnnnnnn

SEQ ID NO: 27300 - DNA, 217 bp, Macaca Mulatta
taagaaaaactgactttaactggagaaagcaaaacctattgataagatatgtcttcattgcatctgtctgttctctgggagaaggaaaatatgtgttactctcttgcatacttgtttgtttattcattgtgcataaaaggatatcttccacatctccaaagctggacaagaaatagagaaaataagaccaaatatttaaatattgcattttctagta

SEQ ID NO: 27301 - DNA, 1988 bp, Macaca Mulatta
  misc_feature (1)...(1988): n = A,T,C or G
tgatgatgaaaacacatttaaaatcttagttgcaacagatattcatcttggatttatggagaaagatgcagtcagaggaaacgatacgtttgtaaccctcgatgaaattttaagacttgcccagggaaatgaagtnnnnnnnnnnnnnnnnnnnnnnnnnnnnnnnnnnnnnnnnnnnnnnnnnnnnnnnnnnnnnnnnnnnnnnnnnnnnnnnnnnnnnnnnnnnnnnnnnnnnnnnnnnnnnnnnnnnnnnnnnnnnnnnnnnnnnnnnnnnnnnnnnnnnnnnnnnnnnnnnnnnnnnnnnnnnnnnnnnnnnnnnnnnnnnnnnnnnnnnnnnnnnnnnnnnnnnnnnnnnnnnnnnnnnnnnnnnnnnnnnnnnnnnnnnnnnnnnnnnnnnnnnnnnnnnnnnnnnnnnnnnnnnnnnnnnnnnnnnnnnnnnnnnnnnnnnnnnnnnnnnnnnnnnnnnnnnnnnnnnnnnnnnnnnnnnnnnnnnnnnnnnnnnnnnnnnnnnnnnnnnnnnnaggatccattccagatgaaaggctctatcgaatgtttgtcaataaaaaagtaacaatgttgagaccaaaagaagatgagaactcttggtttaacttatttgtgaatcatcagaacaggnnncaggagtaaacatggaagtactaacttcattccagaacaatttttggatgacttcattgatcttgttatctggggccatgaacatgagtgtaaaatagctccaaccaaaaatgaacaacagctgttttatatctcacaaccgggaagctcagtggttacttccctttccccaggagaagctgtaaagaannnngttggtntgctgcgtattaaagggaggaagatgaatatgcagaaaattcctcttcacacagtgcggcagtttttcatggaggatattgttctggctaatcatccagatatttttaacccagataatcctaaagtaacccaagccatacaaagcttctgtttggagaanagattgaagaaatgcttgaaaatgctgaacgggaacgtctgggtaattctcgccagccagagaagcctcttgtacgactgcgagntggactatagtggaggttttgaacctttcagtgttcttcgctttagccagaaatttgtggatcgggtagctaatccaannnnnnnnnnnnnnnnnnnnnnnnnnnnnnnnnnnnnnnnnnnnnnaggagaagagataaactttgggaagcttatcacaaaaccttcagaaggaacaactttaagggtagaagatcttgtaaaacagtattttcaaannnnnnnnnnnnnnnnnnnnnnnnnnnnnnnnnnnnnnnnnnnnnnnnnnnnnnnnnnnnnnnnnnnnnnnnnnnnnnnnnnnnnnnnnnnnnnnnnnnnnnnnnnnnnnnnnnnnnnnnnnnnnnnnnnnnnnnnnnnnnnnnnnnnnnnnnnnnnnnnnnnnnnnnnnnnnnnnnnnnnnnnnnnnnnnnnnnnnnnnnnnnnnnnnnnnnnnnnnnnnnnnnnnnnnnnnnnnnnnnnnnnnnnnnnnnnnnnnnnnnnnnnnnnnnnnnnnnnnnnnnnnnnnnnnnnnnnnnnnnnnnnnnnnnnnnnnnnnnnnnnnnnnnnnnnnnnnnnnnnnnnnnnnnnnnnnnnnnnnnnnnnnnnnnnnnnnnnnnnnnnnnnnnnnnnnnnnnnnnnnnnnnnnnnnnnnnnnnnnnnnnnnnnnnnnnnnnnnnnnnnnnnnnnnnnnnnnnnnnnnnnnnngcagacactggtctggagacttctacgcgtagcaggaactcaaagactgctgtgtcagcatctagaaatatgtctattatagatgnnnttaaatctacaagacagcagctttcccgaaatgtcactactaagattatttcagaggnnnggtgattgaggtagattaccagatgaggaagaagacatttttcctaccacttcaaagacagatcaaaggt

SEQ ID NO: 27302 - DNA, 130 bp, Macaca Mulatta
gacaactgccctggaccatgcttcagggagggactgtctcagatgaccaataccacagtgcaaacaagatacccgctgattttcaatcgggtgaaaaaatcggttgaagtactaaagaacaacaagtgtc

SEQ ID NO: 27303 - DNA, 380 bp, Macaca Mulatta
  misc_feature (1)...(380): n = A,T,C or G
ggacttttgaaaattacagttctggaaatgcagatagtgtttactttgaaaacaaatgtcatgaaagatttccagtttttaaagctgtatgtttcactgcttcatatctctgtccactttctgaatgagaacttagtttgtgcctagagctggcactcactgataatgcttaccttctgggcatttattccaaagtgggatcgactgtgcgcctttggtatctgaccataaagtcttttgttccactgacatttgggtgatgtcttcacatggaaatataataaaagtgaaaatctannnnnnnnnnnnnnnnnnnnnnnnnnnnnnnnnnnnnnnnnnnnnnnnnnnnnnnnnnnnnnnnnnnnnnnnnnnnnnnnnnc

SEQ ID NO: 27304 - DNA, 1762 bp, Macaca Mulatta
  misc_feature (1)...(1762): n = A,T,C or G
ggtgtaaacaatatccagctggtggctacagttctgcctctggttttgctgccatgcatcctgggcgaactactggtaaagggccctccactcacactcagattgaccagcaacctccacggcttctcattgtgcacattgctctaccgtcctggggtgacatctgcgccaacctctgtgaggctctgcagaacttcttctctctagcctgcagtttgatgggccctagccgcatgtccctgttcagtttatacatggtacaagatcagcatgagtgcatcctcccttttgtgnnnnnnnnnnnnnnnnnnnnnnnnnnnnnnnnnnnnnnnnnnnnnnnnnnnnnnnnnnnnnnnnnnnnnnnnnnnnnnnnnnnnnnnnnnnnnnnnnnnnnnnnnnnnnnnnnnnnnnnnnnnnnnnnnnnnnnnnnnnnnnnnnnnnnnnnnnnnnnnnnnnnnnnnnnnnnnnnnnnnnnnnnnnnnnnnnnnnnnnnnnnnnnnnnnnnnnnnnnnnnnnnnnnnnnnnnnnnnnnnnnnnnnnnnnnnnnnnnnnnnnnnnnnnnnnnnnnnnnnnnnnnnnnnnnnnnnnnnnnnnnnnnnnnnnnnnnnnnnnnnnnnnnnnnnnnnnnnnnnnnnnnnnnnnnnnnnnnnnnnnnnnnnnnnnnnnnnnnnnnnnnnnnnnnnnnnnnnnnnnnnnnnnnnnnnnnnnnnnnnnnnnnnnnnnnnnnnnnnnnnnnnnnnnnnnnnnnnnnnnnnnnnnnnnnnnnnnnnnnnnnnnnnnnnnnnnnnnnnnnnnnnnnnnnnnnnnnnnnnnnnnnnnnnnnnnnnnnnnnnnnnnnnnnnnnnnnnnnnnnnnnnnnnnnnnnnnnnnnnnnnnnnnnnnnnnnnnnnnnnnnnnnnnnnnnnnnnnnnnnnnnnnnnnnnnnnnnnnnnnnnnnnnnnnnnnnnnnnnnnnnnnnnnnnnnnnnnnnnnnnnnnnnnnnnnnnnnnnnnnnnnnnnnnnnnnnnnnnnnnnnnnnnnnnnnnnnnnnnnnnnnnnnnnnnnnnnnnnnnnnnnnnnnnnnnnnnnnnnnnnnnnnnnnnnnnnnnnnnnnnnnnnnnnnnnnnnnnnnnnnnnnnnnnnnnnngaaaagagaatggctgctgttagccaagggggaaccactgggcccaggacacagccagagaattcctgccagcaccttctatgtgatcatgccatcacgctccctcacactgctggtgaaggcggtggccacacgggaactgatgcttcccagcaccttccccctgctacctgaggacccacgtgatgacagtcttaagaatgtggaggcaannaggcccctcttttcttttcctcagagcatgctggatagcctggagctggagcccacctacaaccccttgcaggttcagagccacctgtactcacacctgagcaacatctatgccaagcctcaggggcggctccacccacactgggagagccgagccccgagaaagnnnnnnnnnnnnnnnnnnnnnnnnnagactgggcagttgcagaccaaccgagctcgagccactgtggccccccctgcctataacttcctgttcccaggcaaagcctccaagatgccagcagtcatccaaatcttcctcaaatgccttctttctgccttcagagtgggaggaaagatccctccgggccctaagtcaccaacaccagaacccacctgcccaactaaactacctctatgctccggttcacaaaatggcta

SEQ ID NO: 27305 - DNA, 847 bp, Macaca Mulatta
ggttgattgagggctttaaggctgggtagaggctctttcagcaagtcccggcttgacccccaccgtggcccgcagacggtggcagtgggttgggttcccaccagagaaagcggaccaccttcagcaaagggcagctgctggagctggagagggcgtttgcagcatggccctaccccgacatcagcacccgtgagcacctggcccaggtcactcgccttcctgaggccaagatacaggtgagctgcgaccccttctcacacagccaacatctgggcttggcccacagccccttcgctgggtagcctgccttcaggttgtttcccatgtccctgggtggaggggatgctggggccagaagactccttcttcttccctagcaggtatggttccagaaccgccgggtcaaaagaatcaagaacaggaagtcaggaagtctaagcccccggcctgagtcccaccagagctcctgttctcttccagacaccttccagcagccctgggatccccaaataccaggccaacctccactctccagcggcacacctcagtgtacctcagtgtgtcaatacacctcctgtccagctcctggcttaagtccagggcagggctgggaaggggctaaagctgtagccccacggggaccaggtggggcttcagaggtccaccctttcttagagcgagctactccccagacttcactaggcagcctgtctgacctcatctatgccttggccattgtcaccaatgtggaccacgcctagtcttggtccagaacttgcaagacccctcctctgactcctgtagcccaccctgcccctcctgggactgaacacatcagaagtggatc

SEQ ID NO: 27306 - DNA, 417 bp, Macaca Mulatta
tatttctttttctgaagcagagggaatacaagtacatagggtagtctaactacatttttacaaagttaactttgttcttttaattgttctaacaggtgggagaatctccacaagtgtcttccagacttcagaatttgagactgaataatttaattcccaggcaacttttcaagcccacagataatcaagaaacttagttttatttcaaattgctcagagtaactattttttcttttggagacaaaatgaacatcgtaacatcaaagtaccaagataaaaaaagttgcccataactggagttttaaggtatttgtgtgttagcaaatgttttaaatccatttaatcaaagaaaatattaatgatttcaacatatgtcattgtgagaactggtagcactggacataagtgaagagatta

SEQ ID NO: 27307 - DNA, 581 bp, Macaca Mulatta
agctttcaccactactgatatttgagaatcatatgaacctgggaactacctggcgtgttagctggatttatttattttgaccagtgaccagagtagcttccccctttttcaccaaacaatgtaaactttgaaagtgataatactacaaattgtgttttggagcaacttcattgaatgtaattgtcctcaaatcagagaacactgggtggttggaagggtgtgtttgagttttccaaacagaattacggtttccaaatgttagttttagcatatgtaattatttgaagccttatttaaatcctgttaaagaacataccattataattattatttgcactaatctttgccattgtcagaactgcaaagtgtgtttcagtataaattaacaaccactcttgaaattctatcattttttcattttgcccatttctctcgatcagtgggaatgcttctttgcatttgcctcgttctccttcaatagtgaggtcctgttttaccctctttgatattcctgattcctgtcttactgagaaaaagtttttaagctttatacatgttgactccatctaaagctggggaag

SEQ ID NO: 27308 - DNA, 526 bp, Macaca Mulatta
gggaaacattctggcagtaaaatgacgtccacatgttcctgttggacgcagcggcttcggaacgagttagcgctgggggactatctgggcttgtctctctctgctttgtgaaccctccacaccagggcctgtctgctgtgctatttatttgccttccgtcttcccaaactcagctgcctgtattcatgccagaggtgcagaggctgccagccagtgctgctgacagatgctttcagactgtagagctcagagaaagggagcgggagctagaggtagccaggggctggccaggctccctggggccttcctattatgtaaatcccagccggacagacagccctggagccaggtggccccgtcccctgtggagcacttggagcagtgatctgttgttccaggtgttttaagtcttgacactgcagaaaagaggacgttattaggaaagagcagttcctactgcctgtgctgctactttaagagctgagaaaaacattccaatgagatacccatagctaactcgcctgct

SEQ ID NO: 27309 - DNA, 827 bp, Macaca Mulatta
  misc_feature (1)...(827): n = A,T,C or G
accttacaggatcgagacggagggagagaagcaggagctgtggaaatatacgatcgacaatgtttcccccctcgcacagccagaggaggaggagcgggaacggcgtgtgttcaaggatnnnnnnnnnnnnnnnnnnnnnnnnnnnnnnnnnnnnnnnnnnnnnnnnnnnnnnnngactgtcccaggtgccctccggctctttgtaaatggagaggnnnnnnnnnnnnnnnnnnnnnnnnnnnnnnnnnnnnnnnnnnnnnnnnnnnnnnnnnnnnnnnnnnnnctggtcaagcccagcattccagcagctctcaggagtaacacagacatgcaccaccaagtccctggnnnnnnnnnnnnnnnnnnnnnnnnnnnnnnnnnnnnnnnnnnnnnnnnnnnnnnnnnnnnnnnnnnnnnnnnnnnnnnnnnnnnnnnnnnnnnnnnnnnnnnnnnnnnnnnnnnnnnnnnnnnnnnnnnnnnnnnnnnnnnnnnnnnnnnnnnnnnnnnnnnnnnnnnnnnnnnnnnnnnnnnnnnnnnnnnnnnnnnnnnnnnnnnnnnnnnnnnnnnnnnnnnnnnnnnnnnnnnnnnnnnnnnnnnnnnnnnnnnnnnnnnnnnnnnnnnnnnnnnnnnnnnnnnnnnnnnnnnnnnnnnnnnnnnnnnnnnnnnnnnnnnnnnnnnnnnnnnnnnnnnnngaaggaaggaaggtggacggtgagaggggtcttaaatccccagcctgtgagtctcagcctcctctttccagggcagcctcattctactgcttggggcttgctgaggttgagatatgagttatttctgagtaggtg

SEQ ID NO: 27310 - DNA, 620 bp, Macaca Mulatta
gggggtataattgaagcagaaggtactgtgggtggacccttattattagaagtgatcaggcgctgtcaacagaaagaaaaagggccaaccactggggaaggtgcactagatctatctgatgtacatcctccaccaaagtcaccagagggaaaaacaagtgcacagacaacaccaagtaagaaagccaacaatgaggccaatcagagtgatacaagtgtctctctgtcagaatccaagagcaaaagcagccttcacttactgtcccatgaaacaaagattggatcttttctaagcaacaaaactttagatggcaaagacaaagccggcctttgtccagatgaagatgatatggaaggagattctttctttgatgatcccattcccaagccagagaaaacttatggtttgagtgaacctaggaagcaaccaggaagcctggcctcgctctcggatgcaccccccttaaaaagtggactcagctccctggcgggggccccttccttaaaagactctgagagtaaaaggggaaatacggttttgaaagatctgaaattgatcagtgataaaattggatcacttggattaggactggagatgatgatgactatgtggatgatttt

SEQ ID NO: 27311 - DNA, 187 bp, Macaca Mulatta
  misc_feature (1)...(187): n = A,T,C or G
ctgcctgcctgcctgcttgctctctggctgtgctcctgcttaaagaaatcagtccttcctttccgacttagtcctcgggaagaagtttcagcctannnggtatcattggaacatttcaagatcatcaaatcaaattccacagggattggtgatctaccagaaggctcagacatctgattgctgacct

SEQ ID NO: 27312 - DNA, 4020 bp, Macaca Mulatta
  misc_feature (1)...(4020): n = A,T,C or G
agacgacaacagcagtgacatgaccagtgacgacgacatggcccgggacagaggagagtcctcaccacctcactcagtccgttctttcagtggtgnnnnnnnnnnnnnnnnnnnnnnnnnnnnnnnnnnnnnnnnnnnnnnnnnnnnnnnnnnnnnnnnnnnnnnnnnnnnnnnnggatgcctcagcgggatctttcccttcctgtgatggcgaaaacaagctttgaaatggaaagagatgatgacagggactccagggcttacgagtcccgatctcagnnnnnnnnnnnnnnnnnnnnnnnnnnnnnnnnnnnnnnnnnnnnnnnnnnnnnnnnnnnnnnnnnnnnnnnnnnnnnnnnnnnnnnnnnnnnnnnnnnnnnnnnnnnnnnnnnnnnnnnnnnnnnnnnnnnnnnnnnnnnnnnnnnnnnnnnnnnnnnnnnnnnnnnnnnnnnnnnnnnnnnnnnnnnnnnnnnnnnnnnnnnnnnnnnnnnnnnnnnnnnnnnnnnnnnnnnnnnnnnnnnnnnnnngaagatgagtcttcccacggagtgataatggaaaaattcatcaaggatgtgtcgcgcagttccaaatcgggaagagcaagggagtcaagcgaccagtcacagagattccccagaatgtcagatgctaactggaaggacgtttcattgcacaagagggagtcagtgatccagcagagggtttatgaagggaatgcatttaggggaggctttagttttaaggaaacccttgtttccagccagagagttctggaaagaaagaggcgctatcattnnnnnnnnnnnnnnnnnnnnnnnnnnnnnnnnnnnnnnnnnnnnnnnnnnnnnnnnnnnnnnnnnnnnnnnnnnnnnnnnnnnnnnnnnnnnnnnnnnnnnnnnnnnnnnnnnnnnnnnnnnnnnnnnnnnnnnnnnnnnnnnnnnnnnnnnnnnnnnnnnnnnnnnnnnnnnnnnnnnnnnnnnnnnnnnnnnnnnnnnnnnnnnnnnnnnnnnnnnnnnnnnnnnnnnnnnnnnnnnnnnnnnnnnnnnnnnnnnnnnnnnnnnnnnnnnnnnnnnnnnnnnnnnnnnnnnnnnnnnnnnnnnnnnnnnnnnnnnnnnnnnnnnnnnnnnnnnnnnnnnnnnnnnnnnnnnnnnnnnnnnnnnnnnnnnnnnnnnnnnnnnnnnnnnnnnnnnnnnnnnnnnnnnnnnnnnnnnnnnnnnnnnnnnnnnnnnnnnnnnnnnnnnnnnnnnnnnnnnnnnnnnnnnnnnnnnnnnnnnnnnnnnnnnnnnnnnnnnnnnnnnnnnnnnnnnnnnnnnnnnnnnnnnnnnnnnnnnnnnnnnnnnnnnnnnnnnnnnnnnnnnnnnnnnnnnnnnnnnnnnnnnnnnnnnnnnnnnnnnnnnnnnnnnnnnnnnnnnnnnnnnnnnnnnnnnnnnnnnnnnnnnnnnnnnnnnnnnnnnnnnnnnnnnnnnnnnnnnnnnnnnnnnnnnnnnnnnnnnnnnnnnnnnnnnnnnnnnnnnnnnnnnnnnnnnnnnnnnnnnnnnnnnnnnnnnnnnnnnnnnnnnnnnnnnnnnnnnnnnnnnnnnnnnnnnnnnnnnnnnnnnnnnnnnnnnnnnnnnnnnnnnnnnnnnnnnnnnnnnnnnnnnnnnnnnnnnnnnnnnnnnnnnnnnnnnnnnnnnnnnnnnnnnnnnnnnnnnnnnnnnnnnnnnnnnnnnnnnnnnnnnnnnnnnnnnnnnnnnnnnnnnnnnnnnnnnnnnnnnnnnnnnnnnnnnnnnnnnnnnnnnnnnnnnnnnnnnnnnnnnnnnnnnnnnnnnnnnnnnnnnnnnnnnnnnnnnnnnnnnnnnnnnnnnnnnnnnnnnnnnnnnnnnnnnnnnnnnnnnnnnnnnnnnnnnnnnnnnnnnnnnnnnnnnnnnnnnnnnnnnnnnnnnnnnnnnnnnnnnnnnnnnnnnnnnnnnnnnnnnnnnnnnnnnnnnnnnnnnnnnnnnnnnnnnnnnnnnnnnnnnnnnnnnnnnnnnnnnnnnnnnnnnnnnnnnnnnnnnnnnnnnnnnnnnnnnnnnnnnnnnnnnnnnnnnnnnnnnnnnnnnnnnnnnnnnnnnnnnnnnnnnnnnnnnnnnnnnnnnnnnnnnnnnnnnnnnnnnnnnnnnnnnnnnnnnnnnnnnnnnnnnnnnnnnnnnnnnnnnnnnnnnnnnnnnnnnnnnnnnnnnnnnnnnnnnnnnnnnnnnnnnnnnnnnnnnnnnnnnnnnnnnnnnnnnnnnnnnnnnnnnnnnnnnnnnnnnnnnnnnnnnnnnnnnnnnnnnnnnnnnnnnnnnnnnnnnnnnnnnnnnnnnnnnnnnnnnnnnnnnnnnnnnnnnnnnnnnnnnnnnnnnnnnnnnnnnnnnnnnnnnnnnnnnnnnnnnnnnnnnnnnnnnnnnnnnnnnnnnnnnnnnnnnnnnnnnnnnnnnnnnnnnnnnnnnnnnnnnnnnnnnnnnnnnnnnnnnnnnnnnnnnnnnnnnnnnnnnnnnnnnnnnnnnnnnnnnnnnnnnnnnnnnnnnnnnnnnnnnnnnnnnnnnnnnnnnnnnnnnnnnnnnnnnnnnnnnnnnnnnnnnnnnnnnnnnnnnnnnnnnnnnnnnnnnnnnnnnnnnnnnnnnnnnnnnnnnnnnnnnnnnnnnnnnnnnnnnnnnnnnnnnnnnnnnnnnnnnnnnnnnnnnnnnnnnnnnnnnnnnnnnnnnnnnnnnnnnnnnnnnnnnnnnnnnnnnnnnnnnnnnnnnnnnnnnnnnnnnnnnnnnnnnnnnnnnnnnnnnnnnnnnnnnnnnnnnnnnnnnnnnnnnnnnnnnnnnnnnnnnnnnnnnnnnnnnnnnnnnngagacccatggtcaggagacaattgaagaccctgtcattcaaggctcagacatggaagacctgcagaaggatgaccctgataacgcaatctatgaatgtgaggactgtggcctgggctttgtggatctcacagacctcacagaccatcagaaagtccacagcaggaagtgcctggttgacagtcgggagtacacacattctgtaattcacacccattccgtcagcgagtatcagagagattacactggagagcagctgtatgaatgtccaaagtgtggggaatcttttattcatagctcattccttttcgagcatcagagaatccatgaacaagaccagttgtattccatgaaggggtgtgatgatggttttattgccctcttgcccatgaagccacggannnnnnnnnnnnnnnnnnnnnnnnnnnnnnnnnnnnnnnnnnnnnnnnnnnnnnnnnnnnnnnnnnnnnnnnnnnnnnnnnnnnnnnnnnnnnnnnnnnnnnnnnnnnnnnnnnnnnnnnnnnnnnnnnnnnnnnnnnnnnnnnnnnnnnnnnnnnnnnnnnnnnnnnnnnnnnnnnnnnnnnnnnnnnnnnnnnnnnnnnnnnnnnnnnnnnnnnnnnnnnnnnnnnnnnnnnnnnnnnnnnnnnnnnnnnnnnnnnnnnnnnnnnnnnnnnnnnnnnnnnnnnnnnnnnnnnnnnnnnnnnnnnnnnnnnnnnnnnnnnnnnnnnnnnnnnnnnnnnnnnnnnnnnnnnnnnnnnnnnnnnnnnnnnnnnnnnnnnnnnnnnnnnnnnnnnnnnnnnnnnnnnnnnnnnnnnnnnnnnnnnnnnnnnnnnnnnnnnnnnnnnnnnnnnnnnnnnnnnnnnnnnnnnnnnnnnnnnnnnnnnnnnnnnnnnnnnnnnnnnnnnnnnnnnnnnnnnnnnnnnnnnnnnnnnnnnnnnnnnnnnnnnnnnnnnnnnnnnnnnnnnnnnnnnnnnnnnnnnnnnnnnngtggaggctgccgagccagacgatgaggctgctgagccaaacggagaggctgaagggccagacgtagaggctgcagagcccaatggagaggctgaacagccgaatggagaggccgagcagccaaatggggatgccgatgaaccagatggtgcagggattgaagacccagaagaaagagctgaagagccagagggag

SEQ ID NO: 27313 - DNA, 453 bp, Macaca Mulatta
  misc_feature (1)...(453): n = A,T,C or G
agaggcgatggaagagccgtcctccaacaatgctatggagaaaagagaggattccaaggaggcagagaaaagtggtgaagccacagacggagccaggccccaggccctcccggagcccaggcaggagtccaagactgaggggaacaatcaggccccnnnnnnnnnnnnnnnnnnnnnnnnnnnnnccaccaacacccaccctccagccagcctccccagccagaaatacacagccccacaggccgagggggacagtgagggcctctctcagggtctggtggacagagagaagggcctgagtgcagagccagggtggcaggcaaagagagaannnnnnnnnnnnnnnnnnnnnnnnnnnnnnnnnnnnnnnnnnnctgtccctgaggaagaaggccccactgcagcgctgaagccccacccaagctttggctacaaggagatccggaaaggcga

SEQ ID NO: 27314 - DNA, 1840 bp, Macaca Mulatta
  misc_feature (1)...(1840): n = A,T,C or G
gggcgagctctgcagggacttcgtagaggctctgaaggccgtggtgggcggctcccacgtgtccactgccacggtggtccgagagcagcacgggcgcgatgagtcggtgcacaggtnnnnnnnnnnnnnnnnnnnnnnnnnnnnnnnnnnnnnnnnnnnnnnnnnnnnnnnnnnnnnnnnnnnnnnnnnnnnnnnnnnnnnnnnnnnnnnnnnnnnnnnnnnnnnnnnnnnnnnnnnnnnnnnnnnnnnnnnnnnnnnnnnnnnnnnnnnnnnnnnnnnnnnnnnnnnnnnnnnnnnnnnnnnnnnnnnnnnnnnnnnnnnnnnnnnnnnnnnnnnnnnnnnnnnnnnnnnnnnnnnnnnnnnnnnnnnnnnnnnnnnnnnnnnnnnnnnnnnnnnnnnnnnnnnnnnnnnnnnnnnnnnnnnnnnnnnnnnnnnnnnnnnnnnnnnnnnnnnnnnnnnnnnnnnnnnnnnnnnnnnnnnnnnnnnnnnnnnnnnnnnnnnnnnnnnnnnnnnnnnnnnnnnnnnnnnnnnnnnnnnnnnnnnnnnnnnnnnnnnnngaagagtgcagccggctacaacctcactgggctgttcgtgggctctgaggggacgctgggcctcatcacagccaccaccctgcgcctgcaccctgtccctgaggccatagtggccgccacgtgtgcgttccccagtgtccaggctgctgtggacagcactgtacacatcctccaggctgcagtgcccgtagcccgcattgnnnnnnnnnnnnnnnnnnnnnnnnnnnnnnnnnnnnnnnnnnnnnnnnnnnnnnnnnnnnnnnnnnnnnnnnnnnnnnnnnnnnnnnnnnnnnnnnnnnnnnnnnnnnnnnnnnnnnnnnnnnnnnnnnnnnnnnnnnnnnnnnnnnnnnnnnnnnnnnnnnnnnnnnnnnnnnnnnnnnnnnnnnnnnnnnnnnnnnnnnnnnnnnnnnnnnnnnnnnnnnnnnnnnnnnnnnnnnnnnnnnnnnnnnnnnnnnnnnnnnnnnnnnnnnnnnnnnnnnnnnnnnnnnnnnnnnnnnnnnnnnnnnnnnnnnnnnnnnnnnnnnnnnnnnnnnnnnnnnnnnnnnnnnnnnnnnnnnnnnnnnnnnnnnnnnnnnnnnnnnnnnnnnnnnnnnnnnnnnnnnnnnnnnnnnnnnnnnnnnnnnnnnnnnnnnnnnnnnnnnnnnnnnnnnnnnnnnnnnnnnnnnnnnnnnnnnnnnnnnnnnnnnnnnnnnnnnnnnnnnnnnnnnnnnnnnnnnnnnnnnnnnnnnnnnnnnnnnnnnnnnnnnnnnnnnnnnnnnnnnnnnnnnnnnnnnnnnnnnnnnnnnnnnnnnnnnnnnnnnnnnnnnnnnnnnnnnnnnnnnnnnnnnnnnnnnncttagcccacaagttccaagactacggagcccctgctctggaacttttcttcatgccacggcccctgcaagggaatagacagtagctgacgcagtcttgctgccagtgagtccactgtatctgggcccaaggtcagagcgcccagagagaagcctgagcaccgtgctactccccgttcttctggctggctccaggagcctttggttcagtaaacgaccctgggtggttcccagcaaagctgcttcctctctgcttctacgcatcctgtcctggctggaagagaccatctgggtccactcaagactctgatgacactcctcccctgaggcctcccactgctggggtcccaggacccttccctcttcacctggtgacaggcactcctttcctggtatgggacgtgagctcccgtgccatgctagtaggtcttctccttgaagcctccccca

SEQ ID NO: 27315 - DNA, 112 bp, Macaca Mulatta
gggtgaaatgatcaacaacatagaaagaaacattatgaatgccacagactatgtagaacacgctaaagaagaaacaaaaaaagctatcaaatatcagagcaaggcgagaagg

SEQ ID NO: 27316 - DNA, 489 bp, Macaca Mulatta
  misc_feature (1)...(489): n = A,T,C or G
gggattgcctagacgttgtgtttcctcagccatttctcctctgctgcccagtttactctgtccaaaaccctaaggttcttctctcacttgaacacagatgaccttgcttgggtgatgagacatcccctttatctcttcctctactgctagcccagaccggtcactttctaagaagctcagatgcagcagtgctggagagctctctctttatgcaaaaatctcatttcaccaggagctttcaaaagtttcacctgggctaaactcagcagcatttctgttaggatatttagatggaggttttattttcacacttggattcttcctttgtaccaatatttgcctccttttctgtgactgaactgggtttttctgacatgcgtagactcctaataaaagtatttcttccttnnnnnnnnnnnnnnnnnnnnnnnnnnnnnnnnnnnnnnnnnnnnnnnnnnnnnnnnnnnnnnnnnnnnnnnnnnnnnnnnc

SEQ ID NO: 27317 - DNA, 3582 bp, Macaca Mulatta
  misc_feature (1)...(3582): n = A,T,C or G
acctgtcctcccaatcatccccaagccctgctggctcttccatcaccagctgctctgaggaacactccaagataagtcccccaccaggccctggcccagacccaggccccagccagccctctgagtattacctattccagaagccagaagtccagccagaggaacaagaagcagtgagttcctccagcgaggcagcagctgctgtgggccccactgtgcttgaggggcaagtatacacgaatacttcaccccccaacctcagcactggacgtcagcgctcccgcagctatgttttcagcctggagcgcagccctcctgtccggctgggctcactggaacgcatgttgagttgcccagtgcgcttaagtgagggccctgcagccatagccgggcctagctccccacccaggagggtcacctcctttgccgagctggccaagggccggaagaaaactggaggatctggctcgcccccacttcgagtgannnnnnnnnnnnnnnnnnnnnnnnnnnnnnnnnnnnnnnnnnnnnnnnnnnnnnnnnnnnnnnnnnnnnnnnnnnnnnnnnnnnnnnnnnnnnnnnnnnnnnnnnnnnnnnnnnnnnnnnnnnnnnnnnnnnnnnnnnnnnnnnnnnnnnnnnnnnnnnnnnnnnnnnnnnnnnnnnnnnnnnnnnnnnnnnnnnnnnnnnnnnnnnnnnnnnnnnnnnnnnnnnnnnnnnnnnnnnnnnnnnnnnnnnnnnnnnnnnnnnnnnnnnnnnnnnnnnnnnnnnnnnnnnnnnnnnnnnnnnnnnnnnnnnnnnnnnnnnnnnnnnnnnnnnnnnnnnnnnnnnnnnnnnnnnnnnnnnnnnnnnnnnnnnnnnnnnnnnnnnnnnnnnnnnnnnnnnnnnnnnnnnnnnnnnnnnnnnnnnnnnnnnnnnnnnnnnnnnnnnnnnnnnnnnnnnnnnnnnnnnnnnnnnnnnnnnnnnnnnnnnnnnnnnnnnnnnnnnnnnnnnnnnnnnnnnnnnnnnnnnnnnnnnnnnnnnnnnnnnnnnnnnnnnnnnnnnnnnnnnnnnnnnnnnnnnnnnnnnnnnnnnnnnnnnnnnnnnnnnnnnnnnnnnnnnnnnnnnnnnnnnnnnnnnnnnnnnnnnnnnnnnnnnnnnnnnnnnnnnnnnnnnnnnnnnnnnnnnnnnnnnnnnnnnnnnnnnnnnnnnnnnnnnnnnnnnnnnnnnnnnnnnnnnnnnnnnnnnnnnnnnnnnnnnnnnnnnnnnnnnnnnnnnnnnnnnnnnnnnnnnnnnnnnnnnnnnnnnnnnnnnnnnnnnnnnnnnnnnnnnnnnnnnnnnnnnnnnnnnnnnnnnnnnnnnnnnnnnnnnnnnnnnnnnnnnnnnnnnnnnnnnnnnnnnnnnnnnnnnnnnnnnnnnnnnnnnnnnnnnnnnnnnnnnnnnnnnnnnnnnnnnnnnnnnnnnnnnnnnnnnnnnnnnnnnnnnnnnnnnnnnnnnnnnnnnnnnnnnnnnnnnnnnnnnnnnnnnnnnnnnnnnnnnnnnnnnnnnnnnnnnnnnnnnnnnnnnnnnnnnnnnnnnnnnnnnnnnnnnnnnnnnnnnnnnnnnnnnnnnnnnnnnnnnnnnnnnnnnnnnnnnnnnnnnnnnnnnnnnnnnnnnnnnnnnnnnnnnnnnnnnnnnnnnnnnnnnnnnnnnnnnnnnnnnnnnnnnnnnnnnnnnnnnnnnnnnnnnnnnnnnnnnnnnnnnnnnnnnnnnnnnnnnnnnnnnnnnnnnnnnnnnnnnnnnnnnnnnnnnnnnnnnnnnnnnnnnnnnnnnnnnnnnnnnnnnnnnnnnnnnnnnnnnnnnnnnnnnnnnnnnnnnnnnnnnnnnnnnnnnnnnnnnnnnnnnnnnnnnnnnnnnnnnnnnnnnnnnnnnnnnnnnnnnnnnnnnnnnnnnnnnnnnnnnnnnnnnnnnnnnnnnnnnnnnnnnnnnnnnnnnnnnnnnnnnnnnnnnnnnnnnnnnnnnnnnnnnnnnnnnnnnnnnnnnnnnnnnnnnnnnnnnnnnnnnnnnnnnnnnnnnnnnnnnnnnnnnnnnnnnnnnnnnnnnnnnnnnnnnnnnnnnnnnnnnnnnnnnnnnnnnnnnnnnnnnnnnnnnnnnnnnnnnnnnnnnnnnnnnnnnnnnnnnnnnnnnnnnnnnnnnnnnnnnnnnnnnnnnnnnnnnnnnnnnnnnnnnnnnnnnnnnnnnnnnnnnnnnnnnnnnnnnnnnnnnnnnnnnnnnnnnnnnnnnnnnnnnnnnnnnnnnnnnnnnnnnnnnnnnnnnnnnnnnnnnnnnnnnnnnnnnnnnnnnnnnnnnnnnnnnnnnnnnnnnnnnnnnnnnnnnnnnnnnnnnnnnnnnnnnnnnnnnnnnnnnnnnnnnnnnnnnnnnnnnnnnnnnnnnnnnnnnnnnnnnnnnnnnnnnnnnnnnnnnnnnnnnnnnnnnnnnnnnnnnnnnnnnnnnnnnnnnnnnnnnnnnnnnnnnnnnnnnnnnnnnnnnnnnnnnnnnnnnnnnnnnnnnnnnnnnnnnnnnnnnnnnnnnnnnnnnnnnnnnnnnnnnnnnnnnnnnnnnnnnnnnnnnnnnnnnnnnnnnnnnnnnnnnnnnnnnnnnnnnnnnnnnnnnnnnnnnnnnnnnnnnnnnnnnnnnnnnnnnnnnnnnnnnnnnnnnnnnnnnnnnnnnnnnnnnnnnnnnnnnnnnnnnnnnnnnnnnnnnnnnnnnnnnnnnnnnnnnnnnnnnnnnnnnnnnnnnnnnnnnnnnnnnnnnnnnnnnnnnnnnnnnnnnnnnnnnnnnnnnnnnnnnnnnnnnnnnnnnnnnnnnnnnnnnnnnnnnnnnnnnnnnnnnnnnnnnnnnnnnnnnnnnnnnnnnnnnnnnnnnnnnnnnnnnnnnnnnnnnnnnnnnnnnnnnnnnnnnnnnnnnnnnnnnnnnnnnnnnnnnnnnnnnnnnnnnnnnnnnnnnnnnnnnnnnnnnnnnnnnnnnnnnnnnnnnnnnnnnnnnnnnnnnnnnnnnnnnnnnnnnnnnnnnnnnnnnnnnnnnnnnnnnnnnnnnnnnnnnnnnnnnnnnnnnnnnnnnnnnnnnnnnnnnnnnnnnnnnnnnnnnnnnnnnnnnnnnnnnnnnnnnnnnnnnnnnnnnnnnnnnnnnnnnnnnnnnnnnnnnnnnnnaggtgcaggcactgtgccaccacctggccaccggccctggacagctgagcttccacaaaggagacatcctacgagtgctggggcaagctggaggagactggctgcgctgcagccgtggccctgactctggcctggtgcccctggcctacgtgacattgaccccaactccaagtccaacccctggaagctttctaaactgaggccctgtgcatgctggtggcctcagggaccctcataacccctagactcagagcctgagagcccttcccaagccattggcttggctgcagagtagactgagagctggggccatgtatccctgtgctggcacctgctccctgtgctcagtattaattacgcccccttaactgccccagtggcctcgtccagacctccacccaggaaaggagggacaggacgcagcactgggctgccagga

SEQ ID NO: 27318 - DNA, 774 bp, Macaca Mulatta
gggattttgctgcaattatttaaatattatgtttgtgaagtatctaagcatgagaaaatacaaagctttctttttatctggctgatactcatttggatgattctgtgactcatagaacacggtgttaatgagaccagactcactgccaccagtccccagctgcagaccgtcatccccttcatctcccactgggggctcatggtccggaaggaatgtgtatcaagcaacacaggccgttatcccatatagaaaagtgtctcaaatgcattctactgctggacagtcagtaggatcattttcataaagcaaggacatcatgtgtttctagaaattataagcatataactttaacctacaatctctaattaaaaaattgtaacataaaattgtattacaaatacatttcatcagaactcaaatttaaatggtgtttattttaggtttttatttataatactgaagttattccatataagtatcaagttaaacacaattcattttgattacaaactgtttgactttttaaaatcttctgatatggtaaatatatgtatcaagattgatgtatcaaaatttattgcacactttaaagtataaaatcactttttaaaatcttgaatccacaaataaagtttattctgattaaaaaataaaagcaatggataaaaatgttattaaaaaaataacatgttgggccgcctcggcccctccaaaaaacttttctaaaccaattccttttggccgccgcgggccccagtaagttaaattgaacat

SEQ ID NO: 27319 - DNA, 569 bp, Macaca Mulatta
tgggtggttttaatgtaaacatagtttctataatctgaacacaataattttcctttttgataaatccttttgtattgtgagggttgatggctatttctgtagtttgaaaacatctactatagatttgcactgacgagataaaaattcaaggtttttggtcctggaaatgagggccaactgtaacttttccaaagggaggtttacatgatttgtatcaacatcagatattttatatatgaatatattaaacatctttaagagattccttttcatgtattaaagaaaaaagaaactattttgcagagtaaggttatatggtgttcctgcagcatccacacagaggcagcagctctaatgaatggttagcttgtggagttgtggcaaatacctttttaaaaatgaatctgtaccattgtaattttgtttagacttttttttaaaggcacagaaatcacattgtcatttctgtgaggcttttaagcttatgaatttgcctcacccaaagtcattggacagttacgtttgcaatttcttttggttgataacaaaacctgcttaagagaattttt

SEQ ID NO: 27320 - DNA, 1454 bp, Macaca Mulatta
  misc_feature (1)...(1454): n = A,T,C or G
cccagccggtgcgcgggagccgcgggggcaaaggcgcagcggccggtggaccatctctcgtgccctcgatctctgcgctccggggcagctgagtcccggccacccgccctccaagatgaagaagctccagggagctcaccttcgcaagnnnnnnnnnnnnnnnnnnnnnnnnnnnnnnnnnnnnnnnnnnnnnnnnnnnnnnnnnnnnnnnnnnnnnnnnnnnnnnnnnnnnnnnnnnnnnnnnnnnnnnnnnnnnnnnnnnnnnnnnnnnnnnnnnnnnnnnnnnnnnnnnnnnnnnnnnnnnnnnnnnnnnnnnnnnnnnnnnnnnnnnnnnnnnnnnnnnnnnnnnnnnnnnnnnnnnnnnnnnnnnnnnnnnnnnnnnnnnnnnnnnnnnnnnnnnnnnnnnnnnnnnnnnnnnnnnnnnnnnnnnnnnnnnnnnnnnnnnnnnnnnnnnnnnnnnnnnnnnnnnnnnnnnnnnnnnnnnnnnnnnnnnnnnnnnnnnnnnnnnnnnnnnnnnnnnnnnnnnnnnnnnnnnnnnnnnnnnnnnnnnnnnnnnnnnnnnnnnnnnnnnnnnnnnnnnnnnnnnnnnnnnnnnnnnnnnnnnnnnnnnnnnnnnnnnnnnnnnnnnnnnnnnnnnnnnnnnnnnnnnnnnnnnnnnnnnnnnnnnnnnnnnnnnnnnnnnnnnnnnnnnnnnnnnnnnnnnnnnnnnnnnnnnnnnnnnnnnnnnnnnnnnnnnnnnnnnnnnnnnnnnnnnnnnnnnnnnnnnnnnnnnnnnnnnnnnnnnnnnnnnnnnnnnnnnnnnnnnnnnnnnnnnnnnnnnnnnnnnnnnnnnnnnnnnnnnnnnnnnnnnacggccacgttccccctacctcatcctgctcatgctgctggtccgcggagtcaccctcccaggggcctggaaaggcatccagttctatctcaccccccagttccaccacctgttgtcttccaaggtgnnnnnnnnnnnnnnnnnnnnnnnnnnnnnnnnnnnnnnnnnnnnnnnnnnnnnnnnnnnnnnnnnnnnnnnnnnnnnnnnnnnnnnnnnnnnnnnnnnnnnnnnnnnnnnnnnnnnnnnnnnnnnnnnnnnnnnnnnnnnnnnnnnnnnnnnnnnnnnnnnnnnnnnnnnnnnnnnnnnnnnnnnnnnnnnnnnnnnnnnnnnnnnnnnnnnnnnnnnnnnnncaggccctggcctggcctttgtcgtctacccacaggccatgaccatgctgcctctgtcgcccttctggtcctttctcttcttcttcatgcttctgactctcggcctggacagccagnccagtttgctttcctggagaccattgtaacagctgtgacggatgagttcccgtactacctgcggcccaagaaggtggtgttctcagggctcatctgcgtggccatgtacctgatggggctgatcctcaccaccgatg

SEQ ID NO: 27321 - DNA, 1975 bp, Macaca Mulatta
  misc_feature (1)...(1975): n = A,T,C or G
atgcttctgctgggcatcttaaccctggctttcgccgggcgaaccgctggaggctctgagccagagcgggaggtggtcgttcccatccgactggacccggacatcaacggccgccgctactactggcggggtcccgaggactccggggatcagggactcatttttcagatcacagcatttcaggaagacttttacctacacctgacgccggatgctcagttcttggcgcccgccttcgccactgagcatctgggcgtccccctccaggggttcaccggcagctcttcagacctgtgacgctgcttctactctggggacgtgaacgccgagccggactcgttcgcggctgtgagcttgtgcggggggctccgcggagcctttggctatcgaggcgccgagtacgtcattagcccgttgcccaacgccagcgcgccggccgcgcagcgcaacagccagggcgcacaccttctccagcgccggggtgtgccgggcgggccttccggagaccccacctctcgctgcggggtggcctcgggctggaaccccgccatcctgcgggccctggaaccttacaggccgcggcgggcgggcttgggggagagtcgcagccggcgcaggtctgggcgcgccaagcgnnnnnnnnnnnnnnnnnnnnnnnnnnnnnnnnnnnnnnnnnnnnnnnnnnnnnnnnnnnnnnnnnnnnnnnnnnnnnnnnnnnnnnnnnnnnnnnnnnnnnnnnnnnnnnnnnnnnnnnnnnnnnnnnnnnnnnnnnnnnnnnnnnnnnnnnnnnnnnnnnnnnnnnnnnnnnnnnnnnnnnnnnnnnnnnnnnnnnnnnnnnnnnnnnnnnnnnnnnnnnnnnnnnnnnnnnnnnnnnnnnnnnnnnnnnnnnnnnnnnnnnnnnnnnnnnnnnnnnnnnnnnnnnnnnnnnnnnnnnnnnnnnnnnnnnnnnnnnnnnnnnnnnnnnnnnnnnnnnnnnnnnnnnnnnnnnnnnnnnnnnnnnnnnnnnnnnnnnnnnnnnnnnnnnnnnnnnnnnnnnnnnnnnnnnnnnnnnnnnnnnnnnnnnnnnnnnnnnnnnnnnnnnnnnnnnnnnnnnnnnnnnnnnnnnnnnnnnnnnnnnnnnnnnnnnnnnnnnnnnnnnnnnnnnnnnnnnnnnnnnnnnnnnnnnnnnnnnnnnnnnnnnnnnnnnnnnnnnnnnnnnnnnnnnnnnnnnnnnnnnnnnnnnnnnnnnnnnnnnnnnnnnnnnnnnnnnnnnnnnngtgactgcctcctggaccaacccagcaagcccatctccctgcccgaggatctgcccggtgccagctacaccctgagccagcagtgcgagctggcctttggtgtgggctccaagccctgtccttacatgcagtactgcaccaagctgtggtgcactgggaaggccaagggacagatggtgtgccagacccgccacttcccctgggccgatggcaccagctgtggcgagggcaagttctgcctcaaaggggcctgcgtggagagacacaacctcaacaagcacagggtgnnnnnnnnnnnnnnnnnnnnnnnnnnnnnnnnnnnnnnnnnnnnnnnnnnnnnnnnnnnnnnnnnnnnnnnnnnnnnnnnnnnnnnnnnnnnnnnnnnnnnnnnnnnnnnnnnnnnnnnnnnnnnnnnnnnnnnnnnnnnnnnnnnnnnnnnnnnnnnnnnnnnnnnnnnnnnagcctctggaaagagcttccgggaggagcagtgtgaggctttcaatggctacaaccacagcaccaaccggctcactctggccgtggcatgggtgcccaagtactcaggcgtgtctcctcgggacaagtgcaagctcatctgccgagccaatggcaccggctacttctatgtgctggcacccaaggtnnnnnnnnnncgctgtgctctcccgactccacctccgtctggtccaaaggaagtgcatcaaggctggctgtga

SEQ ID NO: 27322 - DNA, 913 bp, Macaca Mulatta
  misc_feature (1)...(913): n = A,T,C or G
tacatataattgggtaagtagtaaccccaaaattttttaggaagaacaatattatatgagagcagtcttttgtgtgaaattaatgtcatttttattgatttgataaagcatgtgtcaaaaagttccttgcgcctttccttaagtttaagagggttttacggcaagggatttgttataatcctagaaagcataggccattcctctaatgatatttttgtggtagtattagcacgattgtgtggtttatagaattataggtttaggggatgcatactcaaaaaaaattttgatattgtttccttctttgtagggaaatttcgtatttgaggaccccgatggtcccagttcagcatataaacatgtccacttagccaaggtggtttacagaaaaaccctaccttttgtacccttgtgggtttccagtgtaggataatcaaaatggtctccggggttaaaggttggctggcagttttttttacttgattgaatgaagggttttttgccgtggttcaacagctttaagggcacatcttcagtaggataatatttagtcattttgcgaagttttaacctcccgggtactgccgttcttgtcaccaccaactggtttttgtaagagttgcaagaaccttcnnnnnnnnnnnnnnnnnnnnctgggatttagcggctgagtacttcctcttgtacatggcctttctggaatacatggcggatcgggaatacctgccaattcctctgacaaggacagggttgcggctgcaatggggcttccccttcttgggcttcttagccttgaggttaccctttttcaccttgccaccagcatcagccttcttggcttcgggtttcttctctttagtatctggcttctcaactttttcacccgccatcttgcaagatgggaaagagcccc

SEQ ID NO: 27323 - DNA, 163 bp, Macaca Mulatta
ctgtcaagctagacccgaaagagaactgtcacaaacagtaagtagagaatgcgagacttatgttggaagctggttggaagctaggaccctgattaacagctgtagatggtgtgaagcacgagccctgaacaggtataaacactggtgaatgtggaaacaccat

SEQ ID NO: 27324 - DNA, 118 bp, Macaca Mulatta
gaatgaggaaactcaaattaatggattctgcatcattgagaacttcaagggctttaccatgcagcaggctgctagtctccgcacttcagatctcaggaagatggtggacatgctccag

SEQ ID NO: 27325 - DNA, 1676 bp, Macaca Mulatta
  misc_feature (1)...(1676): n = A,T,C or G
gctgggcctgggggtctgggccagcaactagtattgcagacatgggccaaggagccagaggccatgcagtggctcagggtccgtgattcgcctggggaggccacaggacacagggnnnnnnnnnnnnnnnnnnnnnnnnnnnnnnnnnnnnnnnnnnnnnnnnnnnnnnnnnnnnnnnnnnnnnnnnnnnnnnnnnnnnnnnnnnnnnnnnnnnnnnnnnnnnnnnnnnnnnnnnnnnnnnnnnnnnnnnnnnnnnnnnnnnnnnnnnnnnnnnnnnnnnnnnnnnnnnnnnnnnnnnnnnnnnnnnnnnnnnnnnnnnnnnnnnnnnnnnnnnnnnnnnnnnnnnnnnnnnnnnnnnnnnnnnnnnnnnnnnnnnnnnnnnnnnnnnnnnnnnnnnnnnnnnnnnnnnnnnnnnnnnnnnnnnnnnnnnnnnnnnnnnnnnnnnnnnnnnnnnnnnnnnnnnnnnnnnnnnnnnnnnnnnnnnnnnnnnnnnnnnnnnnnnnnnnnnnnnnnnnnnnnnnnnnnnnnnnnnnnnnnnnnnnnnnnnnnnnnnnnnnnnnnnnnnnnnnnnnnnnnnnnnnnnnnnnnnnnnnnnnnnnnnnnnnnnnnnnnnnnnnnnnnnnnnnnnnnnnnnnnnnnnnnnnnnnnnnnnnnnnnnnnnnnnnnnnnnnnnnnnnnnnnnnnnnnnnnnnnnnnnnnnnnnnnnnnnnnnnnnnnnnnnnnnnnnnnnnnnnnnnnnnnnnnnnnnnnnnnnnnnnnnnnnnnnnnnnnnnnnnnnnnnnnnnnnnnnnnnnnnnnnnnnnnnnnnnnnnnnnnnnnnnnnnnnnnnnnnnnnnnnnnnnnnnnnnnnnnnnnnnnnnnnnnnnnnnnnnnnnnnnnnnnnnnnnnnnnnnnnnnnnnnnnnnnnnnnnnnnnnnnnnnnnnnnnnnnnnnnnnnnnnnnnnnnnnnnnnnnnnnnnnnnnnnnnnnnnnnnnnnnnnnnnnnnnnnnnnnnnnnnnnnnnnnnnnnnnnnnnnnnnnnnnnnnnnnnnnnnnnnnnnnnnnnnnnnnnnnnnnnnnnnnnnnnnnnnnnnnnnnnnnnnnnnnnnnnnnnnnnnnnnnnnnnnnnnnnnnnnnnnnnnnnnnnnnnnnnnnnnnnnnnnnnnnnnnnnnnnnnnnnnnnnnnnnnnnnnnnnnnnnnnnnnnnnnnnnnnnnnnnnnnnnnnnnnnnnnnnnnnnnnnnnnnnnnnnnnnnnnnnnnnnnnnnnnnnnnnnnnnnnnnnnnnnnnnnnnnnnnnnnnnnnnnnnnnnnnnnnnnnnnnnnnnnnnnnnnnnnnnnnnnnnnnnnnnnnnnnnnnnnnnnnnnnnnnnnnnnnnnnnnnnnnnnnnnnnnnnnnnnnnnnnnnnnnnnnnnntcttaagacagagtcttgctctgttgcccaggctagagtgcagtagtgcaacctcagctcactgcaacctccgcctctcgagttcaagcagttcttctgcctcagccttctgagtagctgggattacaggcacatgcaaccacgcctggctaatttttatagttttggtagagatggggaattcaccatattggccattctggtctcgaactcctgacatcaagtgatccacccgccttggcctctcaaactgctaggattacaggtgtgagccaccatgcc

SEQ ID NO: 27326 - DNA, 1008 bp, Macaca Mulatta
  misc_feature (1)...(1008): n = A,T,C or G
ggatttcagttgttttgatacggcttagggtaatgtcagtacaggaaaaaaactgtgcaagtgaacacctgattctgttgccttgcttaactctaaagctccgtgtcctgggcctcaaatcatataaaatctnnnnnnnnnnnnnnnnnnnnnnncatattcacgtatgtaaaccagaacattctatgtactacaaacctggtttttaaaaaggaactatgttgctatgaattaaacttgtctcatgctgataggacagactggatttttcatatttcatattaaaatttctgccatttagaagaagagaactacattcatggtttggaagagacaaacctgaaaagaagagtggccttatcttcactttatctataagtcagtttatttgtttcattgtgtacatttttatattctccttttgacattataactgttggcttttctaatcttgttaaatatatctatttttaccaaaggtatttaatattcttttttatggacaacttagatcaactatttttagcttggtaaaatttttcctaaacagaaatttgttatagccacgaggaacaaagatgatatgaaatattggttgctctgaaaaaaatacatggtatttccattctcgtatggtggctagagttagattaatcccgcattttaaaaaaaactggaattggaaatcaactagaatttggtaagtttgccaaagaaactttttgaaataattaagttatcatatcttccattcctgttattggagatgaaaataaaaaaagcaactggtgaaagtagacattcacatccagccattactaatctattccttttttggggaaatctgagcctagctcagaaaaacataaagcaccttgaaaaagacttgggcagccttcctgacaaagcatggctgnntgctgtgctgggncagtanngaacacatnccctatttattgggtgatgttacgggtttttattatccttaaaactcctggtttccatact

SEQ ID NO: 27327 - DNA, 125 bp, Macaca Mulatta
gggctgtgtagtctttgaggatgtgtttgtatacttctctcgggaagaatgggagctacttgatgatgctcagagacttttgtaccatgatgtgatgctggagaactttgcacttttagcctcac

SEQ ID NO: 27328 - DNA, 1281 bp, Macaca Mulatta
  misc_feature (1)...(1281): n = A,T,C or G
ggggactagaaacttgccctcacttaagatggccacttcctgcctttgtcctcattggtaaattggctctctcagcttccgtgacccgcccccatttttcctgttgctcgcagtagccatggcgggcatgagtttgttgcgacgggtttcggttactgcggtggcagcgctttctggccgctcccttggcactcgactcggatttgggggcttcctcactcgtggctttccgaaggctgttgctcctgttcgacacagtggaggccatgggaaaagactatttgtcatcaaaccttctagattctatgacatccggtttttgaagttattgagattctacattgcattgactgggattccagtagtaattatcataactctggtgaatgtattcattggtgaagctgaactagcagaaattccagaaggctatatcccagaacactgggaatattataagcatcccatatcgagatggattgcccgtaatttctatgacagtcctgaaaagatttatgaaaaatcaatggccgtccttcagattgaagctgaaaaggctgaattacggttgaaggagctggaagtacgaagattgatgcgtatgagaggagatggaccctggtattactatgagacaattgataaggaacttattgatcattctccaaaagcaactcctgacaattaagcatttttttctccaaatacaaagtatgttctctttgttggaaaataaattagtaaatatattctgtaatttttgctctccgtgaaaaacaaacgagcttctgacattactggtctctgtgttgggttcagactgagggctttcgttttaagggagtttggcttccagtccacaaagaaagatttaaaatgtactaataaaaactggagaaataggaatttgtaaactccttaaagttgtagcaactttgaaaggttagtggttttattttacctgacaaatgggaagtttatagaaaagaaattttaattatgttaagtacagttaattggtagtatttttgtacaaatgcctgtactgtagatgtctgtattattgaggtgcaactcaagatttgaaattccataaagcattgaaccaactctgtaatgttaactccttaataaacagaatttcaataagcttnngnnnannccngcnngnnnnnnnnnncttggtcggccgccctcgggccctcgaagaagctttcctaaaccattcttttgggcccccgggccccattagggaaagggaacatgggcccataagctggt

SEQ ID NO: 27329 - DNA, 809 bp, Macaca Mulatta
  misc_feature (1)...(809): n = A,T,C or G
ggggtgcttctctggggcggtcgcgttggcagcgcatgcaggaagccggactctgggcgtcatgtactacaaatttagtggcttcacgcagaagttggcgggagcgtgggcttcggaggcctatagcccgcagggattaaagcctgtggtttccacagaagcaccacctatcatatttgccacaccaactaaactgacctccgattccacagtgtatgactatgctgggaaaaacagagttccagagctacagaagtttttccagaaagctgatggtgtgcccatctacctgaaacgaggcctgcctgaccaaatgctttaccggaccaccatggcgctgactctgggagggaccatctactgcctgattgccctctacatggcttcgcagcctaaaaacaaatgagttaggctgcagaggactggtttgttttttggcataaaccctttgaatttcctttttcattgttnnnnnnnnnnnnnnnnnnnnnntggatggcttaatatttttgcaagaaaaataggaagatatgaagatgatgttttggtttgtttatgaaatgcatatgacttgtcagagctcattcgacagttaaagccattgtttaaagaaatggtgctttgctctgtgtgctcctgatttccctggaagttctagatgaaggctgcacacagggcttgttaacgtcagtctgtgctgaggacctcagggacttggaggtggcatttttgagcacggggtgcaaaaaaaatttctgggattttggatgttggcttggtggaaaggaaccaccgaagccccaaggtct

SEQ ID NO: 27330 - DNA, 443 bp, Macaca Mulatta
attgtacatttgattgccttattgcagaaatacccatcagtccatgttttgtagaaactggagatgtgaatttttgatgctgtcccataatacagcagtaatgatttgcagtttgccacaaatcatcttcatgctgctctctgtcgtcgttctgtttcaggacttctatccctttttcttgtgtgtagcacatacaaatgcagcagtcatgcagttcttttcttttgccagaaaattacagtcaggaggtaagatgaatcttccaaagttaggttaaattttgtttaacttgacaaattaaactttgttcttattaaacaaatatttaaacaaatactggaaaagcaaaggttatatttgggtataaaatgtcagtatcttaaaatgcatgttcatcttttgctgagggaggaatagcctcttgtgtgtgcactggatagtaa

SEQ ID NO: 27331 - DNA, 740 bp, Macaca Mulatta
gttggatactttaagtgaagcctcccactggaaacaagctgcagttgttttagataatcccatcctggttgaaatgggagaagaacttgtactcagcgttcagcaccacaaaagcaatgtcagcatcacagtaaagcaatgaagagcagttttccaatgaaaactgtttaaatagagcatcaacaagtacaaaattcttatcttaattagtgggggtctataaaaattccttgtaatggtcaaatattttttaaacattgacattaataaagcatattttaaaagattctaaataaaagagtagcattattatagaaatactgctgcagatttgctttctggaaacggatacatcactagttttttgaattaggaaacttcttttgctcgatattatggaatagggattttaaaagtcttattgttattgacatgtgtcaataagtaaagcaaaactttacttttgtaggcatcttggccttttttcttaaatccaaacttgtaattgggaaatactgaaaggcttccactgaagactgagggttatggttacctgtaaattctaatcttgcttcctttaaatactcagtgtacatctgaaacatctcaggttttgagaatgcaagcttgaaaaaggatttaagctataagctaaatgtaattacaacagttaaggagttagggaataaatcttcaggaggcagcatttttcttggtctactttggcaaaagaacattta

SEQ ID NO: 27332 - DNA, 965 bp, Macaca Mulatta
  misc_feature (1)...(965): n = A,T,C or G
gtaaactttggagtcggagtttaaaactagcttatactctacttaataaactgacaagtaagaacgaacctctgcttaaacctggagacagagnnnnnnnnnnnnnnnnnnnnnnnnnnnnnnnnnnnnnnnnnnnnnnnnnnnnnnnnnnnnnnnnnnnnnnnnnnnnnnnnnnnnnnnnnnnnnnnnnnnnnnnnnnnnnnnnnnnnnnnnnnnnnnnnnnnnnnnnnnnnnnnnnnnnnnnnnnnnnnnnnnnnnnnnnnnnnnnnnnnnnnnnnnnnnnnnnnnnnnnnnnnnnnnnnnnnnnnnnnnnnnnnnnnnnnnnnnnnnnnnnnnnnnnnnnnnnnnnnnnnnnnnnnnnnnnnnnnnnnnnnnnnnnnnnnnnnnnnnnnnnnnnnnnnnnnnnnnnnnnnnnnnnnnnnnnnnnnnnnnnnnnnnnnnnnnnnnnnnnnnnnnnnnnnnnnnnnnnnnnnnnnnnnnnnnnnnnnnnnnnnnnnnnnnnnnnnnnnnnnnnnnnnnnnnnnnnnnnnnnnnnnnnnnnnnnnnnnnnnnnnnnnnnnnnnnnnnnnnnnnnnnnnnnnnnnnnnnnnnnnnnnnnnnnnnnnnnnnnnnnnnnnnnnnnnnnnnnnnnnnnnnnnnnnnnnnnnnnnnnnnnnnnnnnnnnnnnnnnnnnnnnnnnnnnnnnnnnnnnnnnnnagctcgggccgcgctggtgaagtcgcgagacaggggctaaactctcctagctcagcgaggccagagggacgtcagcctcagctcactgcgcatgctgattgtggccgatggcgccaaccnnnnnnnnnnnnnnnnnnnnnnnnnnnnnnnnnnnnnnnnnnnnnnnnnnnnnnnnnnnnnnnnnnnnnnnnnnnnnnnnnnnnnnnnnnnnnnnnnnnnnnnnnnnnnnnnnnnggccacctgatctgggaggaccacctccaagaaaa

SEQ ID NO: 27333 - DNA, 934 bp, Macaca Mulatta
  misc_feature (1)...(934): n = A,T,C or G
tggctcacgcctgtaattccagcactttgggaggccgaagtgggcggatcacctgaggccagaagtttgagacccgcctgaccaatatggtgaaaccccgtctctactaaaaatacaaaaattagccgggcgtggtggcgggcgcctgtagtcccagctacttgggaggctgagacagaagaattgcttgaacctgggagatggaggttgcagtgagccgagatcgtgccactgcactccagcctgggcgacagagcaagactccnnnnnnnnnnnnnnnnnnnnnnnnnnnnnnnnnnnnnnnnnnnnnnnnnnnnnnnnnnnnnnnnnnnnnnnnnnnnnnnnnnnnnnnnnnnnnnnnnnnnncctctgaactgagaggtccccagcccatgccgggagctgatggaggaaaaggcggggaagggtttcccacttcttgactgggggtggaggtgggagaaagcattttcagggcgtttttgacatttaacaaatagtatgcaaatctcatgcaaattgcatgcaaatcatcacccatttcttaagcctcgacagcgctggcgtgtctgaaataataatgttggccctgtcccttggtgatgacctgggtggggaggtgcacaaccttttccttcctccctcttcccgtcgcttcccatcccatctgttctcctttctcccttcgttcgcccccttccttccctgtctctccctatcttccatttttctcttcttccttcacacaatttgtccaaggcctccctggcatgagataaacataaagctgcaaaaatggcttcctgcagcccattttcctggttgggaaactgaggcatgggcctaagttcccacagccacaccgaggaaagcagcccccactgaatgtcaccatgcaccaaagtgcacggtaatcctgacacaagaaggggag

SEQ ID NO: 27334 - DNA, 3461 bp, Macaca Mulatta
tgctttgtgaggttgtgagtggccaccactggaagtctttgagaagtggccagacaccactgtagccaggcctgtcttaagaggacttgtgcctccagggacccaggcaggcaggatgatggcacagctcttcctactctaagacaatgctgtccttcccctttcccatgaagtcaaggtcaagaagcaaataagactccctgctccactctacccccaagagagaaatgattctctctcctttcagatcccccaggatctgagggagaaaggctgggaggaggggcagcagcacttcgctggaaaggcagcagacgcttttccagccccggttcagctggaaggcttggaggccggccagagcactctggcatatcctggagtgggtccctggagactgaagaggctcggtggagtctgtctgttgtcagcgctgctgcctgatccctgcaagacaaatggcactttccttcttcagaagcatgatctgcctttgttattagcagtaatgttattaccagttattattcttgctggtgtcagttttgcatatctttttgttgctctatttgtgtctcatttacttttcaaattgcccctgggggcaggaatgaggatgcagagagatgcacattaattactgtcgcatttttctgtggagaaaactgaggccagagccgattgctcacagctaaggagctgtgattcagacccagttctgtcagctctagaggcacctgcatccgtgcccaccagggtgatccccctgggatggaccatctctggatttggggcctcggagactggggttgaggtttggtcctgaagagcttgtagccagattgccatgttcaagtgtaagtccaggaaaggggcaggcagcagtgcacatggatttatcagtttcagaacctcgcagtgataagaggctttacagagcatctaatcgagacctttaattttggggggagagcagctgaggccacatggagaattagtggagagctgacaagagtctgggcgcctggcccaggggtccgtggtccagcatgttgtgcattcagtgggaagcaaagggcttgcccaggattgcctgcccgagccccgaggtggcttgtactcactgcagctgccacgggccccctttgcttcatcctggcagatgcccagtgattgtccctgagcaagtcccagggttgggctgagctgctgtgacagggaggcccagggagctctgctcagggagccaaagggaacagtcagagcctgaatgttctatgttcacctgccccagcccctcccaccctggcccattccataggcccctgaccatggtcactccctgagagggatggaggagacggtggttgaattgagtgctgagaacccagagggacagagtccacaacttccaaacaggaaaagggacctctctgaaaaatctggataaccagaattatcacagcatccacacattcccagtgcgtccttctgagatcagaccttgagcatttactgggtttctttttgaggaggagggaaagtgacaaaggacaaagcaatgcaacccatcatgactgaagacgataaaagactccctggagcgagaaaacagttactgccagaagcagaatggaagagccaaaaagtacacaaaattgactccataaattttgaaataaaagtgtgtggtgtgttctgagtcactgtagaagccatgcgtttattatcaagatagaaaataaaagcagagaatgacgtggccattggtccttggagaggctgcacaggcggtgcggtccccggggggttccggatgctggtcttctgactgtggcggccgcctcacccctgcccagatggctccatccagacatctggtaaggtcgtcatctgctcctggatcctttttcaagctggtttcctgcctccccaagaggagatttgagccccattctgccttggaaataaatcctgacagttgtgcacagcatatttgcagggaatttgcaggccttggttattgggagaaccagagcccactccacaccgagccccgtccatgtggctgagcaacacccctgtgtcccctgtatctgtctcactggcttgctttctgccagtttcttaaagaaccacaccattaccgcgtttgacgttcgaagcattgtcccaacagtgcagatggtcctgacaagggctctatacgctggcagaagggagcttccaaccttttaacctgaggaaactgagtctctgagaggcttgggagtgttgccaggtggagcttctcagaagacaggggtcttgagcccaggacacctaactattgagttttcactaggagacttagtggtgactttcatgaggccggtcgttctcaaggaagggctaggggccatcagcaatgtctggagacctttttgattctcacagcttggtggggactgctgctggcatctcatgggtggagggcagggatgccaccgaacatcctacaatgcacagggcagccccccacaaataagaattacccagccccaaaatgccaacagtgccgaggtcagggaaccctgccctggaccatcctatctctgattccaaaacgatgcgtgctttccacttttccccatttgtgagtcattgaataaatcaaagctcttctgagcagcagcagtgatcatggtcactgccatgagttcaaataatgccagcggaggacagtgatctggaactcccagcatgtcatatgggtctcttagaaatccatgtgactgtttccaccatcttgggcatttgtggggacccccagactgaaggcagaaaaccctacaaagtggatgggagtgtggggctggatttttccccacccctaactttgtgtctctgggatctccagggacctggacgctcaccagtgcctctgaggcgcatgcttggggaagaaaggaggaatgggatgggcgtgggagtgctgggtagcaacctttgagcaaatctgcatcttatttctgacctttttccacgtgctcagtcctatttccgccagttgaaggcatactaatattctttatactatttaatcttttgcagaaaccttattattgtaacttgctgctctccggataccagttcttcgtgccgagagcatcggaaatgtttctgtgtcttactgatgttttcatgatcaacttgtaaatgtaagcaattgacttcataaaaggtattttaactattcttggacctttgctacccaagcacctggtttcaccatgcgatcactcacttttctacagtgaagactctttcttaatgtaggatttcgatgtgctcttttgattaaaaatatctaaccttaaaagatgtaaaaatgtatctgtgaaatcttctcactttgttagcattgttgctgttgtcgttttctattatgataattgaagagagaaaagaagaaaacatga

SEQ ID NO: 27335 - DNA, 164 bp, Macaca Mulatta
ggtgaccaggtcagtcatcgaggtgctctaactgggggttattatgacacaaggaagtctcgacttgaattgcagaaagatgttagaaaagcagaagaagaactaggcgaacttgaagcaaagctcaatgaaaacctgcgcagaaatattgaaaatatcttttt

SEQ ID NO: 27336 - DNA, 1733 bp, Macaca Mulatta
  misc_feature (1)...(1733): n = A,T,C or G
nagttgcagaatgccatgaccatggtagcccttttcaaggaagaaagaaaggtgggaattctttccgggataattctgacaagaggaactgtcatcatgaacatggtgggtacgagcgtccgtcttcacactgccaggagaatgatggaagcgtggagatgcgggatgtccacaaggaccaacaactaagacnnnnnnnnnnnnnnnnnnnnnnnnnnnnnnnnnnnnnnnnnnnnnnnnnnnnnnnnnnnnnnnnnnnnnnnnnnnnnnnnnnnnnnnnnnnnnnnnnnnnnnnnnnnnnnnnnnnnnnnnnnnnnnnnnnnnnnnnnnnnnnnnnnnnnnnnnnnnnnnnnnnnnnnnnnnnnnnnnnnnnnnnnnnnnnnnnnnnnnnnnnnnnnnnnnnnnnnnnnnnnnnnnnnnnnnnnnnnnnnnnnnnnnnnnnnnnnnnnnnnnnnnnnnnnnnnnnnnnnnnnnnnnnnnnnnnnnnnnnnnnnnnnnnnnnnnnnnnnnnnnnnnnnnnnnnnnnnnnngatatgtatatttgtcaatcattctactgcgccctactctgtgaagaataagttgaagccaggccaaatggagatgctnnnnnnnnnnnnnnnnnnnnnnnnnnnnnnnnnnnnnnnnnnnnnnnnnnnnnnnnnnnnnnnnnnnnnnnnagacttgatgggccgtgacattgatataatcctgaatcgaagaaactgcatggctgccaccctgaagatcattgaaagaaatttccctgannnnnnnnnnnnnnnnnnnnnnnnnnnnnnnnnnnnnnnnnnnnnnnnnnnnnnnnnnnnnnnnnnnnnnnnnnnnnnnnnnnnnnnnnnnnnnnnnnnnnnnnnnnnnnnnnnnnnnnnnnnnnnnnnnnnnnnnnnnnnnnnnnnnnnnnnnnnnnnnnnnnnnnnnnnnnnnnnnnnnnnnnnnnnnnnnnnnnnnnnnnnnnnnnnnnnnnnagtgccatccgggactgtttccccaagttgttacgcctgnnnnnnnnnnnnnnnnnnnnnnnnnnnnnnnnnnnnnnnnnnnnnnnnnnnnnnnnnnnnnnnnnnnnnnnnnnnnnnnnnnnnnnnnnnnnnnnnnnnnnnnnnnnnnnnnnnnnnnnnnnnntattactcgatctatgactctggagatcgacagggtctcctcggtgcttaccacgatgaggcctgcttctccttggctattcccttcgacgccgaggactcagccccgnnnnnnnnnnnnnnnnnnnnnnnnnnnnnnnnnnnnnnnnnnnnnnnnnnnnnnnnnnacctgaagggggaactgctgaggcacacaaaacgtgacattgtggactccctcagtgcgttgcccaaaactcagcatgacctcagctccatcctggtggacatgtggtgccagacggnnnnnnnnnnnnnnnnnnnnnnnnnnnnnnnnnnnnnnnnnnnnnnnnnnnnnnnnnnnnnnnnnnnnnnnnnnnnnnnnnnnnnnnnnnnnnnnnnnnnnnnnnnccagntccagtctgtgcatcgtgaatgatgagctgtttgtgagggacgccagcccccaagagactcagagtgccttctccatcccagtgtccacactctcctccagctctgagccctccctctcccaggagcagcaggaaatggtgcaggctttctctgcccagtctgggatgaaactggagtggtctcagaagt

SEQ ID NO: 27337 - DNA, 344 bp, Macaca Mulatta
aggatcggctgttttgaccctcctgttggctggctatttggcacaacagtatttaccattgcctactcctaaagtgattggtattgatcttggcaccacctattgttccgttggggtgttttttcccggcacaggaaaagtaaaggtgattccagatgaaaatgggcatatcagcatacccagcatggtgtctttcactgacaatgatgtatatgtgggatatgaaagcgtagaactggcagattcaaatcctcaaaacacaatatatgatgccaaaagattcataggcaagattttcaccccagaagagctggaggctgaaattggcagatacccatttaagg

SEQ ID NO: 27338 - DNA, 678 bp, Macaca Mulatta
  misc_feature (1)...(678): n = A,T,C or G
agaggggaaagccctgtaccaggtggcgtatgagaatgatgtaggcaacagctctgacttctatgacatcgtggtcattgccacccccctgcacctggacaacagcagcagcaacttaacgtttgcaggcttccacccgcccattgatgacctgcagggctctttccagcccaccgtcgtctccttggtccacggctacctcaactcttcctacttcggtttcccagaccctaagcttttcccatttgcgaacatccttatttcagatttccccagcttcttctgcactctggacaacatgtgccctgtcaacatctctgccagcttccggcgaaagcagccccaggaggcagctgtttggcgagtccagtcccctaagccactctttcggacccagctaaagaccctcttccgttcctattactcagtacagacagctgagtggcaggcccatcccctctatggctcccgccccacgctcccgaggttcgcactccatgaccagctcttctacctcaatgccctggagtgggcggccagctccgtggaggtgatggccgtggctgccaagaatgtggccttgctggcttacaaccgctggtaccangacctagacaagattgatcanaaagatttgatgcacaaggtcaagactgaactgtgagggctctggggaga

SEQ ID NO: 27339 - DNA, 349 bp, Macaca Mulatta
  misc_feature (1)...(349): n = A,T,C or G
gactgctggagttaataccaccgacaaagagatggaggtgcttcacttaaganaagaaatgtctcctttgccgacgcaggggagtatacgtgcttggcgggtaactctatcggactctcccatcactctgcatggttgaccgttctggaagnnctggaagagaggccggcggtgatgacctcgcccctgtacctggagatcatcatctattgcacaggggccttcctcatctcctgcatggtagggtcggtcatcgtctacaagatgaagagtggcaccaagaagagcgacttccacagccagatggctgtgcacaagctggccaagagcatccctctgcgcagacagg

SEQ ID NO: 27340 - DNA, 125 bp, Macaca Mulatta
tgagcatattttcccttgtttttctactatttggatatctttatttttcgtttgccagtttatagctctcaaaatacaaagtctttaattttggaatgtcagagtacttttatttaaggctgcta

SEQ ID NO: 27341 - DNA, 5771 bp, Macaca Mulatta
  misc_feature (1)...(5771): n = A,T,C or G
gttcatatgattgtttggtaaagatttggtcaacacataatggccgcttgttatctacattaagaggtcattctgcagaaatttcagatatggcagtgaactatgagaatacaatgattgccgcggggagctgtgataaaattattagagtgtggtgcttgcgaacttgtgccccggttgctgtgctccaaggacatacaggatcaattacatctttacagnnnnnnnnnnnnnnnnnnnnnnnnnnnnnnnnnnnnnnnnnnnnnnnnnnnnnnnnnnnnnnnnnnnnnnnnnnnnnnnnnnnnnnnnnnnnnnnnnnnnnnnnnnnnnnnnnnnnnnnnnnnnnnnnnnnnnnnnnnnnnnnnnnnnnnnnnnnnnnnnnnnnnnnnnnnnnnnnnnnnnnnnnnnnnnnnnnnnnnnnnnnnnnnnnnnnnnnnnnnnnnnnnnnnnnnnnnnnnnnnnnnnnnnnnnnnnnnnnnnnnnnnnnnnnnnnnnnnnnnnnnnnnnnnnnnnnnnnnnnnnnnnnnnnnnnnnnnnnnnnnnnnnnnnnnnnnnnnnnnnnnnnnnnnnnnnnnnnnnnnnnnnnnnnnnnnnnnnnnnnnnnnnnnnnnnnnnnnnnnnnnnnnnnnnnnnnnnnnnnnnnnnnnnnnnnnnnnnnnnnnnnnnnnnnnnnnnnnnnnnnnnnnnnnnnnnnnnnnnnnnnnnnnnnnnnnnnnnnnnnnnnnnnnnnnnnnnnnnnnnnnnnnnnnnnnnnnnnnnnnnnnnnnnnnnnnnnnnnnnnnnnnnnnnnnnnnnnnnnnnnnnnnnnnnnnnnnnnnnnnnnnnnnnnnnnnnnnnnnnnnnnnnnnnnnnnnnnnnnnnnnnnnnnnnnnnnnnnnnnnnnnnnnnnnnnnnnnnnnnnnnnnnnnnnnnnnnnnnnnnnnnnnnnnnnnnnnnnnnnnnnnnnnnnnnnnnnnnnnnnnnnnnnnnnnnnnnnnnnnnnnnnnnnnnnnnnnnnnnnnnnnnnnnnnnnnnnnnnnnnnnnnnnnnnnnnnnnnnnnnnnnnnnnnnnnnnnnnnnnnnnnnnnnnnnnnnnnnnnnnnnnnnnnnnnnnnnnnnnnnnnnnnnnnnnnnnnnnnnnnnnnnnnnnnnnnnnnnnnnnnnnnnnnnnnnnnnnnnnnnnnnnnnnnnnnnnnnnnnnnnnnnnnnnnnnnnnnnnnnnnnnnnnnnnnnnnnnnnnnnnnnnnnnnnnnnnnnnnnnnnnnnnnnnnnnnnnnnnnnnnnnnnnnnnnnnnnnnnnnnnnnnnnnnnnnnnnnnnnnnnnnnnnnnnnnnnnnnnnnnnnnnnnnnnnnnnnnnnnnnnnnnnnnnnnnnnnnnnnnnnnnnnnnnnnnnnnnnnnnnnnnnnnnnnnnnnnnnnnnnnnnnnnnnnnnnnnnnnnnnnnnnnnnnnnnnnnnnnnnnnnnnnnnnnnnnnnnnnnnnnnnnnnnnnnnnnnnnnnnnnnnnnnnnnnnnnnnnnnnnnnnnnnnnnnnnnnnnnnnnnnnnnnnnnnnnnnnnnnnnnnnnnnnnnnnnnnnnnnnnnnnnnnnnnnnnnnnnnnnnnnnnnnnnnnnnnnnnnnnnnnnnnnnnnnnnnnnnnnnnnnnnnnnnnnnnnnnnnnnnnnnnnnnnnnnnnnnnnnnnnnnnnnnnnnnnnnnnnnnnnnnnnnnnnnnnnnnnnnnnnnnnnnnnnnnnnnnnnnnnnnnnnnnnnnnnnnnnnnnnnnnnnnnnnnnnnnnnnnnnnnnnnnnnnnnnnnnnnnnnnnnnnnnnnnnnnnnnnnnnnnnnnnnnnnnnnnnnnnnnnnnnnnnnnnnnnnnnnnnnnnnnnnnnnnnnnnnnnnnnnnnnnnnnnnnnnnnnnnnnnnnnnnnnnnnnnnnnnnnnnnnnnnnnnnnnnnnnnnnnnnnnnnnnnnnnnnnnnnnnnnnnnnnnnnnnnnnnnnnnnnnnnnnnnnnnnnnnnnnnnnnnnnnnnnnnnnnnnnnnnnnnnnnnnnnnnnnnnnnnnnnnnnnnnnnnnnnnnnnnnnnnnnnnnnnnnnnnnnnnnnnnnnnnnnnnnnnnnnnnnnnnnnnnnnnnnnnnnnnnnnnnnnnnnnnnnnnnnnnnnnnnnnnnnnnnnnnnnnnnnnnnnnnnnnnnnnnnnnnnnnnnnnnnnnnnnnnnnnnnnnnnnnnnnnnnnnnnnnnnnnnnnnnnnnnnnnnnnnnnnnnnnnnnnnnnnnnnnnnnnnnnnnnnnnnnnnnnnnnnnnnnnnnnnnnnnnnnnnnnnnnnnnnnnnnnnnnnnnnnnnnnnnnnnnnnnnnnnnnnnnnnnnnnnnnnnnnnnnnnnnnnnnnnnnnnnnnnnnnnnnnnnnnnnnnnnnnnnnnnnnnnnnnnnnnnnnnnnnnnnnnnnnnnnnnnnnnnnnnnnnnnnnnnnnnnnnnnnnnnnnnnnnnnnnnnnnnnnnnnnnnnnnnnnnnnnnnnnnnnnnnnnnnnnnnnnnnnnnnnnnnnnnnnnnnnnnnnnnnnnnnnnnnnnnnnnnnnnnnnnnnnnnnnnnnnnnnnnnnnnnnnnnnnnnnnnnnnnnnnnnnnnnnnnnnnnnnnnnnnnnnnnnnnnnnnnnnnnnnnnnnnnnnnnnnnnnnnnnnnnnnnnnnnnnnnnnnnnnnnnnnnnnnnnnnnnnnnnnnnnnnnnnnnnnnnnnnnnnnnnnnnnnnnnnnnnnnnnnnnnnnnnnnnnnnnnnnnnnnnnnnnnnnnnnnnnnnnnnnnnnnnnnnnnnnnnnnnnnnnnnnnnnnnnnnnnnnnnnnnnnnntctgtcacatcagatgagctagagaaattgctgtataaaccacaagctggtgaatggggtcagaaatcaagagatgaagaatgtgatagaattatcagtggtatagatcaacttttgaatcttnnnnnnnnnnnnnnnnnnnnnnnnnnnnnnnnnnnnnnnnnnnnnnnnnnnnnnnnnnnnnnnnnnnnnnnnnnnnnnnnnnnnnnnnnnnnnnnnnnnnnnnnnnnnnnnnnnnnnnnnnnnnnnnnnnnnnnnnnnnnnnnnnnnnnnnnnnnnnnnnnnnnnnnnnnnnnnnnnnnnnnnnnnnnnnnnnnnnnnnnnnnnnnnnnnnnnnnnnnnnnnnnnnnnnnnnnnnnnnnnnnnnnnnnnnnnnnnnnnnnnnnnnnnnnnnnnnnnnnnnnnnnnnnnnnnnnnnnnnnnnnnnnnnnnnnnnnnnnnnnnnnnnnnnnnnnnnnnnnnnnnnnnnnnnnnnnnnnnnnnnnnnnnnnnnnnnnnnnnnnnnnnnnnnnnnnnnnnnnnnnnnnnnnnnnnnnnnnnnnnnnnnnnnnnnnnnnnnnnnnnnnnnnnnnnnnnnnnnnnnnnnnnnnnnnnnnnnnnnnnnnnnnnnnnnnnnnnnnnnnnnnnnnnnnnnnnnnnnnnnnnnnnnnnnnnnnnnnnnnnnnnnnnnnnnnnnnnnnnnnnnnnnnnnnnnnnnnnnnnnnnnnnnnnnnnnnnnnnnnnnnnnnnnnnnnnnnnnnnnnnnnnnnnnnnnnnnnnnnnnnnnnnnnnnnnnnnnnnnnnnnnnnnnnnnnnnnnnnnnnnnnnnnnnnnnnnnnnnnnnnnnnnnnnnnnnnnnnnnnnnnnnnnnnnnnnnnnnnnnnnnnnnnnnnnnnnnnnnnnnnnnnnnnnnnnnnnnnnnnnnnnnnnnnnnnnnnnnnnnnnnnnnnnnnnnnnnnnnnnnnnnnnnnnnnnnnnnnnnnnnnnnnnnnnnnnnnnnnnnnnnnnnnnnnnnnnnnnnnnnnnnnnnnnnnnnnnnnnnnnnnnnnnnnnnnnnnnnnnnnnnnnnnnnnnnnnnnnnnnnnnnnnnnnnnnnnnnnnnnnnnnnnnnnnnnnnnnnnnnnnnnnnnnnnnnnnnnnnnnnnnnnnnnnnnnnnnnnnnnnnnnnnnnnnnnnnnnnnnnnnnnnnnnnnnnnnnnnnnnnnnnnnnnnnnnnnnnnnnnnnnnnnnnnnnnnnnnnnnnnnnnnnnnnnnnnnnnnnnnnnnnnnnnnnnnnnnnnnnnnnnnnnnnnnnnnnnnnnnnnnnnnnnnnnnnnnnnnnnnnnnnnnnnnnnnnnnnnnnnnnnnnnnnnnnnnnnnnnnnnnnnnnnnnnnnnnnnnnnnnnnnnnnnnnnnnnnnnnnnnnnnnnnnnnnnnnnnnnnnnnnnnnnnnnnnnnnnnnnnnnnnnnnnnnnnnnnnnnnnnnnnnnnnnnnnnnnnnnnnnnnnnnnnnnnnnnnnnnnnnnnnnnnnnnnnnnnnnnnnnnnnnnnnnnnnnnnnnnnnnnnnnnnnnnnnnnnnnnnnnnnnnnnnnnnnnnnnnnnnnnnnnnnnnnnnnnnnnnnnnnnnnnnnnnnnnnnnnnnnnnnnnnnnnnnnnnnnnnnnnnnnnnnnnnnnnnnnnnnnnnnnnnnnnnnnnnnnnnnnnnnnnnnnnnnnnnnnnnnnnnnnnnnnnnnnnnnnnnnnnnnnnnnnnnnnnnnnnnnnnnnnnnnnnnnnnnnnnnnnnnnnnnnnnnnnnnnnnnnnnnnnnnnnnnnnnnnnnnnnnnnnnnnnnnnnnnnnnnnnnnnnnnnnnnnnnnnnnnnnnnnnnnnnnnnnnnnnnnnnnnnnnnnnnnnnnnnnnnnnnnnnnnnnnnnnnnnnnnnnnnnnnnnnnnnnnnnnnnnnnnnnnnnnnnnnnnnnnnnnnnnnnnnnnnnnnnnnnnnnnnnnnnnnnnnnnnnnnnnnnnnnnnnnnnnnnnnnnnnnnnnnnnnnnnnnnnnnnnnnnnnnnnnnnnnnnnnnnnnnnnnnnnnnnnnnnnnnnnnnnnnnnnnnnnnnnnnnnnnnnnnnnnnnnnnnnnnnnnnnnnnnnnnnnnnnnnnnnnnnnnnnnnnnnnnnnnnnnnnnnnnnnnnnnnnnnnnnnnnnnnnnnnnnnnnnnnnnnnnnnnnnnnnnnnnnnnnnnnnnnnnnnnnnnnnnnnnnnnnnnnnnnnnnnnnnnnnnnnnnnnnnnnnnnnnnnnagattctacatcacaagacagtggacaaagcagaaaactttccaggaaaagggtctgttccagtgactcagacagtagtttacaggtagctaagaagtcatcaaaagccagaacaggtctcctaaggattactcgaagatgtgcagctacggctgccagtaagatcaagctcatgagtgatgtagaagatgtcagtttagaaaatgtgcacactagaagcaaaaatggaaggaaaaaacctgtccatcttgcttgtactacagctaagaagaaactgagtgattgtgaaggaagtgtacattgtgaagtgccaagtgaacagtatgcctgtgaaggcaagccacctgatcctgactccgaacttagtacaaaagtgcttagtcaggctctaaatggagactcagactctgaagatacgttgaattcagaacagaagcacaggcataccaatattcacaaaatagatgcaccttctaaaagaaaaagttcctctgtagcatcttcaggagaagattcaaaaagtcatattccagggagtgagactgataggacattttcttcagagtcagctttggcacaaaaagctactgcagagaataattttgaagtggaactgaattatgggctgcgcaggtggaatggcagaagactcaggacctatggaaaggctcctttcagtaagacaaaagtgattcatgattcacaggaagcagcagagaaggaagtaaaa

SEQ ID NO: 27342 - DNA, 405 bp, Macaca Mulatta
  misc_feature (1)...(405): n = A,T,C or G
catgtcttatcangctgggttccaggcatagagtccatcagagtccagtgaagatgttggccagactatattttcatcagaaggattggctgggaagagtctgcttccaaacccattcagctttggtagaagttcattccttgtggttgcatgactggtctttttgctggttgtagtagtacgtccacattcattctagatgctgcctgaagtccttagatgcctctcatagttccttgccatgagcacttttccaacatggctgatgactgcttcaagcctgtaaggagatctggtctcagttggccaagtcttggataatgtaacctcatcaccggagtcacgtctcatcacctttcccatgttccattggttagaagtcccagcttctgcccacattcaaga

SEQ ID NO: 27343 - DNA, 325 bp, Macaca Mulatta
ctttatatcacttacaattgtgttttgatctacagagctagaaattcaaaaactattccaggactactacttaattggcattatttatacaagagatcaagtagccatttactggcgcagtactgcatttgtaaatgaattataaacactcctctggaatatatttaaccattaaagaactgcttattaattctggacactgcatgttgatgtggaatcaactgatgccagcagaaagctattttgatttgtgaacatgctgccttatgtaaagggtcctgattgcttgtattttaagacattcgttaaaaagaaatcaggaaac

SEQ ID NO: 27344 - DNA, 620 bp, Macaca Mulatta
  misc_feature (1)...(620): n = A,T,C or G
ggggcccagatagcatccaggctggcctcctctgcctgccaccctcctgacagaagcttcagccctttccatgatggaccccagcccctcgaagacccccatcaccctcctcgggactcgcacgctttcttccaccacctctagactctctgcagcccttgcagccaccacccaccatggcccccagcagcccccagtgggggcctctcagggggaagagtccaccatgtaagccggtcactgtgtccgggagactcaggagagaggacactctgccagtggcnnnnnnnnnnnnnnnnnnnctccaagggtgaacctagtggggatgcctaggctccctcctgcagnnnnnnnnnnnnnnnnnnnnnnnnnnnnnnnnnnnnnnnnnnnnnnnnnnnnnnnnnnnnnnnnnnnnnnnnnnnnnnnnnnnnnnnnnnnnnnnnnnnnnnnnnnnnnnnnnnnnnnnnnnnnnnnnnnnatcttttgagaagggttgggtggctgccaagttctcctagaggaagagtcacgtccggctgggattccactcactgggcctgtaccgccaggtgtcatgcgtccccctgaggtttcctgattaaaggttgtctcggtttccc

SEQ ID NO: 27345 - DNA, 617 bp, Macaca Mulatta
tggcctcccggcgagcacagcggacagggggcggagcctaagggggtggggagaggccggccccttggcccagctgaaaacggaattctttgccggctggctccccactctgccagagcgaggcggggtagtgaggactccgcgacgcgtccgcaccctgcggccagagccgctttgagctcagctgcggccgcgctaggcgcttttccccagaagcaatccaggagcgcccgctagttcttgagcgccaggaaaagcccggagctaactaccggcggctcgaccattgcacggggccccaagccgcagaaggacggcgggagggtaatgaagctgagcccagctcttctaggaaggagagagtgcgccggagcagcgtgggaaagaagggaggagtgtcgttaagttttacggccaacggtggattatccgggcctctgcgcgtctggggactgcggaatgcgcgaggagaacaagggcatgcccagtggaggcggcagcgatgagggcctgaccagcgccgcggcgcggggactagtggagaaggtgcgacagctcctggaagccggcgcggatcccaacggagtcaaccgcttcgggaggcgcgcgatccaggt

SEQ ID NO: 27346 - DNA, 561 bp, Macaca Mulatta
  misc_feature (1)...(561): n = A,T,C or G
agagctggagatggccaaagcccggaaccaactggatgccgtcttgcagtgtctgctggagaagagtcacatggacaggnagggagcgtctggatgaggaagctggggaaacgccctcagacannnnnnnnnngactgctccatcgcagccactggcaaaaggnaggccatctgcccgcttcccccaccagcggaggaagaagaggagggagatggatgacgggctggctgagggagggccacagcgatccanacacatatgtgatcaagctgttcgaccgcagcgtggacttggcccagttcagcgagaacacgccactgtacccgatctgccgtgcctggatgcgaaacagcccctctgtgcgcgagcgcgaatgctctcccagctcacccctgcccccgctgcctnnnnnnnnnnnagggctcagaggtcaacaacagcaagagtcgtgatgtgtacaagctgccgccacccacaccccccgggccacctggagatgcctgcagatcccgcatcccatccccactgcagcctgagatgcagggcacccctgatgatga

SEQ ID NO: 27347 - DNA, 784 bp, Macaca Mulatta
  misc_feature (1)...(784): n = A,T,C or G
gggtatctgtgaaattggttatattaggtggcttgactaggtttttttctataattgtatatggactgcattttttaaaaaaccacatatgcctttatgctagannnnnnnnnnnnnnnnnnattacaatgcataagacatgtttttccctcatatgctagacttttcctagcatttcgtatttctgtgttgtcagtgtgtgatttttaaatcagaatttggtttaaaaaaatatggttgtaatatatgtgagaaatagtttggtgtttaccttatgaaaataaaggattgtaagtaaggtttcccgcgcaccttatagcagaattcaatataatataatacactactttctgttttcaaacagataaatcataatatagtctgtattgtctgtaagatctatctcgtaaaccacattcttgacaactatttacttttgagtagtttgtattttaatatgtgacttttgtcttgaaaagtagtatagtcatagacttgtgcaaaacaaatttcaaatttatagatattaagtttgtaatgaaagaatcaaatgtgtatgtaaaaatactttttaccagtctggaacttgggaaaaatccaaggaatttgcaacatagattttaatgagctggtaaacacaaatcatgtcaataaaggtagtcaggatattttatccttagcattgcttctgncataaanaaaanaaanannaanaannnnnccatgtcgggccgcctcggcccctcaagaaactttctagaaccattgttttggccccgccggc

SEQ ID NO: 27348 - DNA, 816 bp, Macaca Mulatta
  misc_feature (1)...(816): n = A,T,C or G
tataaggtccataccccaggagctgagtgactgcagaaactggccttccatctctctcagacaccaagctgcagatccaggnnnnnnnnnnnnnnnnnnnnnnnnnnnnnnnnnnnnnnnnnnnnnnnnnnnnnnnnnnnnnnnnnnnnnnnnnnnnnnnnnnnnnnnnnnnnnnnnnnnnnnnnnnnnnnnnnnnnnnnnnnnnnnnnnnnnnnnnnnnnnnnnnnnnnnnnnnnnnnnnnnnnnnnnnnnnnnnnnnnnnnnnnnnnnnnnnnnnnnnnnnnnnnnnnnnnnnnnnnnnnnnnnnnnnnnnnnnnnnnnnnnnnnnnnnnnnnnnnnnnnnnnnnnnnnnnnnnnnnnnnnnnnnnnnnnnnnnnnnnnnnnnnnnnnnnnnnnnnnnnnnnnnnnnnnnnnnnnnnnnnnnnnnnnnnnnnnnnnnnnnnnnnnnnnnnnnnnnnnnnnnnnnncaactgtgcataccggaccagcccaaaggagagacacatcattgtggcctgtgaagggagcccacatgtgccagtccacttcgatgcttctgtggaggactcaacctaaggtcagagcagcgagataccccacctccctcagcctcatcctttccacagctgcctcttccctcttccctcttccttccctgctatgaaagaagtaactccagttagggctcctagtcaacacactcatgcttccttttcctgagtcccacccctgcgtgattttgggggtgaagagtgggttgtgaggtgggccccatgttaacccctccactctttctttcaataaaacacagttgca

SEQ ID NO: 27349 - DNA, 555 bp, Macaca Mulatta
  misc_feature (1)...(555): n = A,T,C or G
acactgtcccagctgccacctagactcggagctccatccaaaactccaacgaagacatcccaggtcagctaaatcttccagcccccggggtggacgtagtaaaggnnnnnnnnnnnnnnnnnnnnnnnnnnnnnnnnnnnnnnnnnnnnnnnnnnnnnnnnnnnnnnnnnnnnnnnnnnnnnnnnnnnnnnnnnnnnnnnnnnnnnnnnnnnnnnnnnnnnnnnnnnnnnnnnnnnnnnnnnnnnnnnnnnnnnnnnnnnnnnnnnnnnnnnnnnnnnnnnnnnnnnnnnnnnnnnnnnnnnnnnnnnnnnnnnnnnnnnnnnnnnnnnnnnnnnnnnnnnnnnnnnnnnnnnnnnnnnnnnnnnnnnnnnnnnnnnnnnnnnnnnnnnnnnnnnnnnnnnnnnnnnnnnnnnnnnnnnnccaagttaggggccaatgccatcctgggcgtgtcataaaaacgtgtgtaaggcgggagcagctgagaagggggtccccctgtaccgccacatcgcagatctcgctgggaaccctgacctcatactcccagtgcca

SEQ ID NO: 27350 - DNA, 997 bp, Macaca Mulatta
  misc_feature (1)...(997): n = A,T,C or G
taatagaccatctgtggcctctaatccagtgacacctttgcttcatagtggtcctgctccccgaatgccattacctacttctcagaactcatgtactacaccaatgccttctagtagctttcttcctggagccaacctgccaccacctttgaattggcaatataactatccatccacagccacacaaacaaaccattgtcctcctgcatcatcccaaccaactgtatctggaaatacaagcttaaccacaaatcatcaatatgtttcttctggatatccttcacttcaaaatagcttcgtaaagtcaggnnnnnnnnnnnnnnnnnnnnnnnnnnnnnnnnnnnnnnnnnnnnnnnnnnnnnnnnnnnnnnnnnnnnnnnnnnnnnnnnnnnnnnnnnnnnnnnnnnnnnnnnnnnnnnnnnnnnnnnnnnnnnnnnnnnnnnnnnnnnnnnnnnnnnnnnnnnnnnnnnnnnnnnnnnnnnnnnnnnnnnnnnnnnnnnnnnnnnnnnnnnnnnnnnnnnnnnnnnnnnnnnnnnnnnnnnnnnnnnnnnnnnnnnnnnnnnnnnnnnnnnnnnnnnnnnnnnnnnnnnnnnnnnnnnnnnnnnnnnnnnnnnnnnnnnnnnnnnnnnnnnnnnnnnnnnnnnnnnnnnnnnnnnnnnnnnnnnnnnnnnnnnnnnnnnnnnnnnnnnnnnnnnnnnnnnnnnnnnnnnnnnnnnnnagactcccttaggtgctaatcatttaaccacaagcatgagtggattaagtctacgtccagagggtctaagagttgtcaatcttcttcaagaaagaaacatgcttccgtcaacacctttgaagcctccagttccaaatttacatgaagacatccagaaactcaactgtaacccagagngttatttcgatgcacgctgactagcattcctcagacgcaggccttattgaataaagccaaacttcctttggggctgctgcttcatcctttcaaagacttagt

SEQ ID NO: 27351 - DNA, 3905 bp, Macaca Mulatta
  misc_feature (1)...(3905): n = A,T,C or G
gcggacggaggtgagcaagaggagctgctctccccgtcaccggtctctccggccaagcttttgtgttcgtggcccagcccgcaggctcaccaccctcgcggttcacccggggcagccggcggaggggcagggggcgtcggcagcagctgcctggtcctcggggcccgcccccacctgcagccggagtccttactggactgcgccgccaagacggtggcggaaaagtgggcgtacgaacgggtggaggagcgcttcgagcggatcccggagcccgtgcagcgccgcatcgtctactggtccttcccgcggaatgagcgggagatctgcatgtactccagcttccagtaccggggcggccccggcgccagcgcggctggcggcgccgcgggggcttcnnnnnnnnnnnnnnnnnnnnnnnnnnnnnnnnnnnnnnnnnnnnnnnnnnnnnnnnnnnnnnnnnnngtcgcggctggggcatcccccgggctgggcgctggggccggcgcggccggcaagcggtggcgaggggctccctttccgccggggcatccgtctgctggacagcggctccgtggagaacgtgctgcatgtcggnnnnnnnnnnnnnnnnnnnnnnnnnnnnnnnnnnnnnnnnnnnnnnnnnnnnnnnnnnnnnnnnnnnnnnnnnnnnnnnnnnnnnnnnnnnnnnnnnnnnnnnnnnnnnnnnnnnnnnnnnnnnnnnnnnnnnnnnnnnnnnnnnnnnnnnnnnnnnnnnnnnnnnnnnnnnnnnnnnnnnnnnnnnnnnnnnnnnnnnnnnnnnnnnnnnnnnnnnnnnnnnnnnnnnnnnnnnnnnnnnnnnnnnnnnnnnnnnnnnnnnnnnnnnnnnnnnnnnnnnnnnnnnnnnnnnnnnnnnnnnnnnnnnnnnnnnnnnnnnnnnnnnnnnnnnnnnnnnnnnnnnnnnnnnnnnnnnggtgcccctgaccccacagctggggccagcattgacgatgaaaactgttggcatttggatgaagaacaggtgaaagaacaagtgaagctttttctctcccagggcggttactgtggctctggaaagcaactcagctcaatgtttgccaaggtnaggttcgagaaatgctgcggatgagagattccaatggagcaaggatgctgacactaataactgagcagtttatggctgacccacgactcacgctctggaggcagcaaggaacaaacatgacagacaagtgcaggcagctctgggatgagctaggnnnnnnnnnnnnnnnnnnnnnnnnnnnnnnnnnnnnnnnnnnnnnnnnnnnnnnnnnnnnnnnnnnnnnnnnnnnnnnnnnnnnnnnnnnnnnnnnnnnnnnnnnnnnnnnnnnnnnnnnnnnnnnnnnnnnnnnnnnnnnnnnnnnnnnnnnnnnnnnnnnnnnnnnnnnnnnnccagactccttatccagaccaagacgaacagtgttcactagagccattgagggccgtgaattacattggcaggatagccatctacagcgaataatcagcagtgatgtttatacagctcctgcctgccagcgggaaagtgaaagactactctttaattcccaaggccagccactgtggcttgnnnnnnnnnnnnnnnnnnnnnnnnnnnnnnnnnnnnnnnnnnnnnnnnnnnnnnnnnnnnnnnnnnnnnnnnnnnnnnnnnnnnnnnnnnnnnnnnnnnnnnnnnnnnnnnnnnnnnnnnnnnnnnnnnnnnnnnnnnnnnnnnnnnnnnnnnnnnnnnnnnnnnnnnnnnnnnnnnnnnnnnnnnnnnnnnnnnnnnnnnnnnnnnnnnnnnnnnnnnnnnnnnnnnnnnnnnnnnnnnnnnnnnnnnnnnnnnnnnnnnnnnnnnnnnnnnnnnnnnnnnnnnnnnnnnnnnnnnnnnnnnnnnnnnnnnnnnnnnnnnnnnnnnnnnnnnnnnnnnnnnnnnnnnnnnnnnnnnnnnnnnnnnnnnnnnnnnnnnnnnnnnnnnnnnnnnnnnnnnnnnnnnnnnnnnnnnnnnnnnnnnnnnnnnnnnnnnnnnnnnnnnnnnnnnnnnnnnnnnnnnnnnnnnnnnnnnnnnnnnnnnnnnnnnnnnnnnnnnnnnnnnnnnnnnnnnnnnnnnnnnnnnnnnnnnnnnnnnnnnnnnnnnnnnnnnnnnnnnnnnnnnnnnnnnnnnnnnnnnnnnnnnnnnnnnnnnnnnnnnnnnnnnnnnnnnnnnnnnnnnnnnnnnnnnnnnnnnnnnnnnnnnnnnnnnnnnnnnnnnnnnnnnnnnnnnnnnnnnnnnnnnnnnnnnnnnnnnnnnnnnnnnnnnnnnnnnnnnnnnnnnnnnnnnnnnnnnnnnnnnnnnnnnnnnnnnnnnnnnnnnnnnnnnnnnnnnnnnnnnnnnnnnnnnnnnnnnnnnnnnnnnnnnnnnnnnnnnnnnnnnnnnnnnnnnnnnnnnnaggagacactttgagactccgaacaattctggaagcaatacagaagcacattcattcttcctccctcatcttcaaactggcccaagatgcattcaagattgctactcccactgacagtagtactgacagcaccctgctcaacgttgccctggaacttgggttacaggtnnnnnnnnnnnnnnnnnnnnnnnnnnnnnnnnnnnnnnnnnnnnnnnnnnnnnnnnnnnnnnnnnnnnnnnnnnnnnnnggtgtgcgggccctggtgagcatcttgcagagctggtacacactcttcacccctactgaggctactagtattgtagctgccacagccgtatcccacaccactatcctgcgcctcagtcttgactatccacagcgggaggaactggctagctgtgctcgcacgctggccctacagtgtgctatgaaggatccacagagctgtgccctgtcagcccttaccctctgtgagaaagaccacatcgcctttgaggcagcctatcagattgccattgatgctgctgctggtggcatgacccattcgcagctgttcaccatcgcccgctacatggagctccgtggctacccgctccgtgccttcaagctggcctcactggccatgagccatcttaacctggcctacaaccaggatactcatcccgccatcaatgatgtgctctgggcttgtgctctcagccactctctgggcaagaatgagctggcagctctcatccccctggtggtgaagagtgtgcactgtgccacagtgctttcagacatcttacgacgctgcacagtgactgcacctggcctggcgggcatcccaggccgccgcagctctggaaagctcatgtccactgacaaagctccattgcgccagttgttagatgccaccatcaatgcctatatcaacactacacactcacgcctaacacacatcagccctcgccactatggagagttcattgagtttctaagcaaggctcgggagaccttcctgctgccccaggatggccacctgcaatttgcccagttcatcgacaacctcaaacagatctacaaaggcaagaaaaaactgatgctgctggtgcgagagcgctttggctgagagagcagatagctcaccgccagggcagcctgggttcccaggtagtatcacgtcaggccaaggacactgaaacatttgtccaccctgagaggactctgagcacctgtggctgaggccaaagggacacagggctaaggatggggaaagtctaactctagttgatatgcctacctttgccaagcttctcactacagcctactgttcatggaggagctggcccctgcagatcgaccaaaaacccccaacatgccacctcatgtccctgttaccagcgggtcctgagcattgggcctgtcttctttggcaaacacaaaaaccgtttccttctcaaggattgcttaacc

SEQ ID NO: 27352 - DNA, 178 bp, Macaca Mulatta
agactcagagaagccgcggccgtccccggaaccctcggagcggcgccctcaggctccagccaaaaagctccgcaaaccgaggaccatctactccagcctgcagctgcagcacctaaaccagcgtttccagcacacgcagtacctggcgctgcccgagagggcccagctggcagcgcag

SEQ ID NO: 27353 - DNA, 421 bp, Macaca Mulatta
acaggatgtgttctgtctccacacgcccggcggcggtggctatggggacccagaggaccccgccccaccgccggggtcacccccgcaagcaccggcctttcccgagcacggcagcgtctatgagtaccgtcgtgcccaggaggccgtgtgaaggtcctgcaataaagatgccttaagtcacccggttctggggacgcagctacggcgcctagttcgtgctccgagtcgtgtctgtgcgcgccggctgcacgcctgtcatctgtgcctgccttaggaggacacccagactcggagctgcaggttcactaccaggtggtccgtgaccccccccagggcggtactgaacgtcacctgctccacctcctgggggcgggaatcaggttgagggtcgtcccagcgccgcaggcccagccacccgggc

SEQ ID NO: 27354 - DNA, 111 bp, Macaca Mulatta
tgcatcggactacacggatcaaaatcacagagctgaacccccacctcatgtgtgccctctgcggggggtacttcattgacgccaccactatcgtggagtgcctgcattcct

SEQ ID NO: 27355 - DNA, 834 bp, Macaca Mulatta
tgtctgttctcaatgactccaaagtgaagcttttccttctgattgggatcccaggactgtaacatgcccacattcgtttttccatccccatttgcctcatgtactgggttgccatcatgggcaactgcaccattcttattttcataaagacagagcccctgtctcatgagcccatgtattatttccttaccatgttggctgtctctgacatgggcccgtccctctcctctcttcctatcatgttgaggatcctcttgttcaatgccatgggaatttcacctgatgcctgctttgctcaagaattcttcattcatggattcactctcatggaatcctcagtacttctaattatgcttttggaccgctttattgccatttacagtgcgggtgaagaaacaaatctatcctcactagcaacaggcttgctaaaatgggacttattttagccattaggagcattctcttaatgcttccatttcccttcactctaaggagattaaaatattgtcaaaagaatcttctttctcactcatactgtcttcatcaggataccatgaagctggcctgctctgacaacaagaccaatgtcatctatggctttttcgctgctctctgtactatgctggacttggcattgattgttttgtcttatgtgctgatcttgaagactataatcagcattgcatctttggcagagaggcttaaagccctaaatacctgtgtcttccacatctgtgctgtgctcacgttctatgttcccatcatcaccctggctgccatgcatcaatgggccaagcacaaaagccctcttgttgtgatccttatgcagatatg

SEQ ID NO: 27356 - DNA, 540 bp, Macaca Mulatta
  misc_feature (1)...(540): n = A,T,C or G
gaggcgaagatatttcaaacagatctttgaaacctcagattctgtggtgcaacttgaatgtttacttgttactcagttttctgctataaaactattttcagttcattctttaacgtcttctgtctatagtgcattttgtgctttttaaaaaaagcactgaaaggttaaatagcctcaattcagagacgatcacagagtgccctgctttccccgtcgtcagactttgagcagattccctaagggatggcacttatgcaggtgggcagacctgtactaggtctggtgtgctttacaaaaatatgcnnnnnnnnnnnnnnnnnnnnnnnnnnnnnnnnnnnnnnnnnnnnnnnnnnntctcgnnnnnnnnnnnnnnnnnnnnnacagtggcgcnnnnnnnnnnnnnnnnnnnnnnnacctccaggttcaaacnnnnnnnnnnnnnnnnannnnnnnnnnnnnnagattacaggcccttgacaccatgcctgactaattacagtatttttaatagagatagggttcactatgtaggacggactg

SEQ ID NO: 27357 - DNA, 292 bp, Macaca Mulatta
aggagccctgggaacaggtgaccttcatatgaagaagaggcgcctccaacagccttgagaagcaagaacgtggttccagacccagccctagcagccttctccccaaccaggatgtggggctggggaggccacggcagggctgagggaactctgctatgtggtggggacttcccgggacaagcaagggaagtactgaggcagccacttgattgaacggtgttgcagtgtggagacatggaattttattgaggcagccacttgattaaaaggtattgcagtgtggagacatgga

SEQ ID NO: 27358 - DNA, 136 bp, Macaca Mulatta
caggggcaaactatacacggtcgtccatcaaaatcctggggaagagaataactcatttaatattctgacatgtcacatgttcttgatacaccatagactctgaagagaatctgctgcagaagaaccaggttaaaaa

SEQ ID NO: 27359 - DNA, 1534 bp, Macaca Mulatta
  misc_feature (1)...(1534): n = A,T,C or G
tttctgttgtgctatctgaagcagactcaaagaaaagcataattaaagaaactgcttcagcaccagaagctgtaaaattggcattacaacagaaaccaccacctccccctgagaagatttataactacctcgacaagtatgttgttggccagtcatttgctaagaaggtgctttcagttgctgtgtacaatcattataagagaatacataataatatcccagctaatctgagacagcaagcagaggttgagaagcatacatcattaacaccaagagagttagaagtaagaagacgggaggatgagtacagatttacaaaattacttcagattgctggaatgagcccacatggtaatgctttaggagcatcaatgcagcaacaggtaaatcaacagatacctcaggaaaaatgaggaggtgaagtattggattcttctcatgatagaaaacttgaaaaaagtaatattttgctacttggaccaactgggtcaggtaaaactctgctggcacaaaccctagctgaatgccttgatgtccgttttgctgtctgtgactgtacaactatgactcaggctggatacgtaggcgaggatattgaatctgtgattgccaatctacgccaagatgccaattacagtgtggaaaaagcacaacaaggaattgataaagtcgataagattggcagtgtgccaggcgttcatcagttacgaaatgtaggtggagaaggcgttcagcaaggcttattaaaactactagaaggcacaatagtcaatgttccagaaaagaattcccgaaagctccatggagaaacagtacaagttgatacaacaaacatcctgtttgttgcatctggtgctttcagtggtttagacagaatcatcagcaggaggaaaaatgaaaagtatcttggatttggaacaccatctaatctgggaaagggcagaagggctacagctgctgcagaccttgctaataaagtggggaatcaaatactcacaaagacattgaagaaaaagatcggttattgcgtcatgtggaagccagaggtctgattgagttgggcatgattcctgagtttgtgggacagttgcctgtggtggttccattgcatagcctagatgagaaaacacttgtacaagtactaactgagccacgaaatgctgttatttctcagtaccaggccttattcagcatggataagtgtgaactgaatgttactgatgatgctttgaaagctatagccagattggcactagaatgaaaaacaggtgcacaaggccttcggtccataatggaaaaactgttactagaaccaatgtttgaagtccctaattctgatgtcgaacgtgtggaggttgacaaagaagtagtagaaggaannnnnnnnnnnnnnnnnnnncaaagaagtggtagagagggaaaaaggaatcaggatacatccggggttccaacgtaagtatactctgaagaggagtaagactctggaattgaagaagaagtctgcgtcccgccaagcagatgctgcaaatagcta

SEQ ID NO: 27360 - DNA, 2728 bp, Macaca Mulatta
  misc_feature (1)...(2728): n = A,T,C or G
taaggagaagtaacttgaaacaggacccaaagcctcccacggctatggagggaaatttggtgtggaacaagaccgaatggataagnnnnnnnnnnnnnnnnnnnnnnnnnnnnnnnnnnnnnnnnnnnnnnnnnnnnnnnnnnnnnnnnnnnnnnnnnnnnnnnnnnnnnnnnnnnnnnnnnnnnnnnnnnnnnnnnnnnnnnnnnnnnnnnnnnnnnnnnnnnnnnnnnnnnnnnnnnnnnnnnnnnnnnnnnnnnnnnnnnnnnnnnnnnnnnnnnnnnnnnnnnnnnnnnnnnnnnnnnnnnnnnnnnnnnnnnnnnnnnnnnnnnnnnnnnnnnnnnnnnnnnnnnnnnnnnnnnnnnnnnnnnnnnnnnnnnnnnnnnnnnnnnnnnnnnnnnnnnnnnnnnnnnnnnnnnnnnnnnnnnnnnnnnnnnnnnnnnnnnnnnnnnnnnnnnnnnnnnnnnnnnnnnnagactatgtgaaagggtttggaggaaagtttggtgtgcagacagacagacaagacaaatgtgcccttggctgggatcaccaggagaaattgcagctgcatgaatcccaaaaannnnnnnnnnnnnnnnnnnnnnnnnnnnnnnnnnnnnnnnnnnnnnnnnnnnnnnnnnnnnnnnnnnnnnnnnnnnnnnnnnnnnnnnnnnnnnnnnnnnnnnnnnnnnnnnnnnnnnnnnnnnnnnnnnnnnnnnnnnnnnnnnnnnnnnnnnnnnnnnnnnnnnnnnnnnnnnnnnnnnnnnnnnnnnnnnnnnnnnnnnnnnnnnnnnnnnnnnnnnnnnnnnnnnnnnnnnnnnnnnnnnnnnnnnnnnnnnnnnnnnnnnnnnnnnnnnnnnnnnnnnnnnnnnnnnnnnnnnnnnnnnnnnnnnnnnnnnnnnnnnnnnnnnnnnnnnnnnnnnnnnnnnnnnnnnnnnnnnnnnnnnnnnnnnnnnnnnnnnnnnnnnnnnnnnnnnnnnnnnnnnnnnnnnnnnnnnnnnnnnnnnnnnnnnnnnnnnnnnnnnnnnnnnnnnnnnnnnnnnnnnnnnnnnnnnnnnnnnnnnnnnnnnnnnnnnnnnnnnnnnnnnnnnnnnnnnnnnnnnnnnnnnnnnnnnnnnnnnnnnnnnnnnnnnnnnnnnnnnnnnnnnnnnnnnnnnnnnnnnnnnnnnnnnnnnnnnnnnnnnnnnnnnnnnnnnnnnnnnnnnnnnnnnnnnnnnnnnnnnnnnnnnnnnnnnnnnnnnnnnnnnnnnnnnnnnnnnnnnnnnnnnnnnnnnnnnnnnnnnnnnnnnnnnnnnnnnnnnnnnnnnnnnnnnnnnnnnnnnnnnnnnnnnnnnnnnnnnnnnnnnnnnnnnnnnnnnnnnnnnnnnnnnnnnnnnnnnnnnnnnnnnnnnnnnnnnnnnnnnnnnnnnnnnnnnnnnnnnnnnnnnnnnnnnnnnnnnnnnnnnnnnnnnnnnnnnnnnnnnnnnnnnnnnnnnnnnnnnnnnnnnnnnnnnnnnnnnnnnnnnnnnnnnnnnnnnnnnnnnnnnnnnnnnnnnnnnnnnnnnnnnnnnnnnnnnnnnnnnnnnnnnnnnnnnnnnnnnnnnnnnnnnnnnnnnnnnnnnnnnnnnnnnnnnnnnnnnnnnnnnnnnnnnnnnnnnnnnnnnnnnnnnnnnnnnnnnnnnnnnnnnnnnnnnnnnnnnnnnnnnnnnnnnnnnnnnnnnnnnnnnnnnnnnnnnnnnnnnnnnnnnnnnnnnnnnnnnnnnnnnnnnnnnnnnnnnnnnnnnnnnnnnnnnnnnnnnnnnnnnnnnnnnnnnnnnnnnnnnnnnnnnnnnnnnnnnnnnnnnnnnnnnnnnnnnnnnnnnnnnnnnnnnnnnnnnnnnnnnnnnnnnnnnnnnnnnnnnnnnnnnnnnnnnnnnnnnnnnnnnnnnnnnnnnnnnnnnnnnnnnnnnnnnnnnnnnnnnnnnnnnnnnnnnnnnnnnnnnnnnnnnnnnnnnnnnnnnnnnnnnnnnnnnnnnnnnnnnnnnnnnnnnnnnnnnnnnnnnnnnnnnnnnnnnnnnnnnnnnnnnnnnnnnnnnnnnnnnnnnnnnnnnnnnnnnnnnnnnnnnnnnnnnnnnnnnnnnnnnnnnnnnnnnnnnnnnnnnnnccaggtcgctgggagggctgctgggagcctcttctgcccctgccgggcagcgtcaccaagtccttgaaatcttcccctgccccgcaggtctctggattggcacagtgcagttgaggtctgcgttgggcttttcttttcacacaggctgatgtcttgaccgtcacccaggtggtccgtgggccaccgggcagcctggggcggtatatgtgctgtgtcacagcacggcctctcagccttgggaaggaagtcggtgcctgctctgctgtgagccaccaggagcctcctcccatcagtggggtgcagtctttttgccaaaatatcatgttcaattacagtagtttgatgagctgaaggctagaagtgtgaagtgcagatgagtgcgtgttcctccccaaggccccgcacagctccgggacgccgctgtcctggcatttgtggccactcactttgtgggaaactcacctccttcctgaggagccgggaggctggaccagtcccgtcatgcagtcaggtgggcggtgtgtcattccagaaggtcccgtggaaatgtctcgggacttgggtcccggagcacccgtgaagcgcgtgtttttgcttctgaggtgc

SEQ ID NO: 27361 - DNA, 194 bp, Macaca Mulatta
cctgcctcacagggagccatggtgagggccatctgctgcaggggcgtcttggggagagtggtggctcagttgacccagctcttcattaaaggataacacactgcactgagtctgatgtctgagcctggcccagcccccggctactaggaggatggcagctatgcctgacaggtaccagggggatgtagtatctg

SEQ ID NO: 27362 - DNA, 754 bp, Macaca Mulatta
  misc_feature (1)...(754): n = A,T,C or G
gctcacattgtcnctgnaacgttctccatatcataacccagcagttacagcttgcagtgcaggtgcacttttatctttgcaatggcaagaggaaaaaaagccagtctcaacgttttacttacacaccagttttgatgaagcaagaacacagagaagagattgatttgtcttcagttccatctttgcctgtgcctcatcctgctcagacccagaggccttcctctgattcagggcattcacatgacagtgtactgtcagcacagagaagtttggtttgttccatcccacaaacatatgcatccatggtgacctcatcccatctgccacagttgcagtgtggagatgagagtgctagtaaagaacagcatatgattccttctccagttgtacaccagccttttcaagtcacaccaacacctcctgtggggtcttcctatcagcctatgcaaactaacgttgtgtacaatggaccaacttgtcttcctattaatgctgcctctagtcaagaatttgattcagttttgtttcagcaggatgcaactcttcctggtttagtgaatcttggctgtcaaccactgtcatccataccatttcattcgtcaaattcaggctcaacaggacatctcttagcccatacacctcattctgtgcatgccctgcctcatctacaatcaatgggatatcattgttcaaatacaggacaaagatctctttcttctccagtggctgaccagattagcggtcgccttcttct

SEQ ID NO: 27363 - DNA, 436 bp, Macaca Mulatta
gaagtgtcaggagtgtgatatgtgctttagtcgggcctcaagtcttcagcttcatcagaacgttcatgttggagaaaaaccttagtgatgtgatggtgcgataaagtcttcactcagtcttcatgaacgcaatctcatctgaaagttcacaaaggagagaaacattaaaatatgaggcacatagtaagcacttccctttgagtactttatctctgaatccatgctgatgataaatttcacccattcttggaagaggtaaaacctttgtttaagataacatcagtgcttcaaccataactcagcatgccccagtagtctcaggaccactatagtggagaatccttgtaaatggtgcaataaagcttcattcagaagtttgataattacagctatcattcaggagacaggccttagaaagagtaagagttcatgaatt

SEQ ID NO: 27364 - DNA, 170 bp, Macaca Mulatta
ctggggccaatccctgcccagtcagctggggtctggtgggggacacccaagaataaaagaataaccacaaagtgtgcaagggaccaacagcttctccagcttcagagcatcgagggagcatgcaggagggatgcttggagctgggagggtctcacggtgctgcttcaaga

SEQ ID NO: 27365 - DNA, 2309 bp, Macaca Mulatta
  misc_feature (1)...(2309): n = A,T,C or G
aaagatcgctttcttctgggacactgcttggacgctaaccgcgctgattggaacagattttgtgtcttggctggctttgggtgaagaccggggagaaaaggctgcgctgcgattctcaagatctctggannnnnnnnnnnnnnnnnnnnnnnnnnnnnnnnnnnnnnnnnnnnnnnnnnnnnnnnnnnnnnnnnnnnnnnnnnnnnnnnnnnnnnnnnnnnnnnnnnnnnnnnnnnnnnnnnnnnnnnnnnnnnnnnnnnnnnnnnnnnnnnnnnnnnnnnnnnnnnnnnnnnnnnnnnnnnnnnnnnnnnnnnnnnnnnnnnnnnnnnnnnnnnnnnnnnnnnnnnnnnnnnnnnnnnnnnnnnnnnnnnnnnnnnnnnnnnnnnnnnnnnnnnnnnnnnnnnnnnnnnnnnnnnnnnnnnnnnnnnnnnnnnnnnnnnnnnnnnnnnnnnnnnnnnnnnnnnnnnnnnnnnnnnnnnnnnnnnnnnnnnnnnnnnnnnnnnnnnnnnnnnnnnnnnnnnnnnnnnnnnnnnnnnnnnnnnnnnnnnnnnnnnnnnnnnnnnnnnnnnnnnnnnnnnnnnnnnnnnnnnnnnnnnnnnnnnnnnnnnnnnnnnnnnnnnnnnnnnnnnnnnnnnnnnnnnnnnnnnnnnnnnnnnnnnnnnnnnnnnnnnnnnnnnnnnnnnnnnnnnnnnnnnnnnnnnnnnnnnnnnnnnnnnnnnnnnnnnnnnnnnnnnnnnnnnnnnnnnnnnnnnnnnnnnnnnnnnnnnnnnnnnnnnnnnnnnnnnnnnnnnnnnnnnnnnnnnnnnnnnnnnnnnnnnnnnnnnnnnnnnnnnnnnnnnnnnnnnnnnnnnnnnnnnnnnnnnnnnnnnnnnnnnnnnnnnnnnnnnnnnnnnnnnnnnnnnnnnnnnnnnnnnnnnnnnnnnnnnnnnnnnnnnnnnnnnnnnnnnnnnnnnnnnnnnnnnnntcttgcccttctggctggatggngggcacagtatgtggtcagccttgccccgagggtcgcttcggaaagaactgnnnnnnnnnnnnnnnnnnnnnnnnnnnnnnnnnnnnnnnnnnnnnnnnnnnnnnnnnnnnnnnnnnnnnnnnnnnnnnnnnnnnnnnnnnnnnnnnnnnnnnnnnnnnnnnnnnnnnnnnnnnnnnnnnnnnnnnnnnnnnnnnnnnnnnnnnnnnnnnnnnnnnnnnnnnnnnnnnnnnnnnnnnnnnnnnnnnnnnnnnnnnnnnnnnnnnnnnnnnnnnnnnnnnnnnnnnnnnnnnnnnnnnnnnnnnnnnnnnnnnnnnnnnnnnnnnnnnnnnnnnnnnnnnnnnnnnnnnagctgtcatcccatgtctggagagtgtgcctgcaagccgggctggtcaggactctactgtaatgagacatgttctcctggattctacggggaagcttgccagcagatttgcagctgccaaaatggggcagactgtgacagtgtgactggaaagtgcacctgtgccccaggattcaaannnnnnnnnnnnnnnnnnnnnnnnnnnnnnnnnnnnnnnnnnnnnnnnnnnnnnnnnnnnnnnnnnnnnnnnnnnnnnnnnnnnnnnnnnnnnnnnnnnnnnnnnnnnnnnnnnnnnnnnnnnnnnnnnnnnnnnnnnnnnnnnnnnnnnnnnnnnnnnnnnnnnnnnnnnnnnnnnnnnnnnnnnnnnnnnnnnnnnnnnnnnnnnnnnnnnnnnnnnnnnnnnnnnnnnnnnnnnnnnnnnnnnnnnnnnnnnnnnnnnnnnnnnnnnnnnnnnnnnnnnnnnnnnnnnnnnnnnnnnnnnnnnnnnnnnnnnnnnnnnnnnnnnnnnnnnnnnnnnnnnnnnnnnnnnnnnnnnnnnnnnnnnnnnnnnnnnnnnnnnnnnnnnnnnnnnnnnnnnnnnnnnnnnnnnnnnnnnnnnnnnnnnnnnnnnnnnnnnnnnnnnnnnnnnnnnnnnnnnnnnnnnnnnnnnnnnnnnnnnnnnnnnnnnnnnnnnnnnnnnnnnnnnnnnnnnnnnnnnnnnnnnnnnnnnnnnnnnnnnnnnnnnnnnnnnnnnnnnnnnnnnnnnnnnnnnnnnnnnnnnnnnnnnnnnnnnnnnnnnnnnnnnnnnnnnnnnnnnnnnnnnnnnnnnnnnnnnnnnnnnnnnnnnnnnnnnnnnnnnnnnnnnngtgtgtcccagtggcagatttgggaaaaactgtgcaggcatttgtacctgcaccaacaacggaacctgtaaccccattgacagatcttgtcagtgttatcccggttggatcggcagtgactgctctcaac

SEQ ID NO: 27366 - DNA, 3374 bp, Macaca Mulatta
  misc_feature (1)...(3374): n = A,T,C or G
cttgaagagcagttcatcaaagaaagtgatacatcaaagattcctggcaaaaaagtagaacctgtcacagttactaaacagcccacccctccctctgaagcagctgcctcaaagaagaaaccagggcagaagaagtctaaaaatggaagcnnnnnnnnnnnnnnnnnnnnnnnnnnnnnnnnnnnnnnnnnnnnnnnnnnnnnnnnnnnnnnnnnnnnnnnnnnnnnnnnnnnnnnnnnnnnnnnnnnnnnnnnnnnnnnnnnnnnnnnnnnnnnnnnnnnnnnnnntcttcgtagatgaaccccttattcatgcaactgcatatattcctttgatggataatgctgactcaagtcctgtggtggataagagagaggttattgatttgcttaaacctgaccaagtagaagggattcagaaatctgggactaaaaaactgaagactgaaactgacaaagnnnnnnnnnnnnnnnnnnnnnnnnnnnnnnnnnnnnnnnnnnnnnnnnnnnnnnnnnnnnnnnnnnnnnnnnnnnnnnnnnnnnnnnnnnnnnnnnnnnnnnnnnnnnnnnnnnnnnnnnnnnnnnnnnnnnnnnnnnnnnnnnnnnnnnnnnnnnnnnnnnnnnnnnnnnnnnnnnnnnnnnnnnnnnnnnnnnnnnnnnnnnnnnnnnnnnnnnnnnnnnnnnnnnnnnnnnnnnnnnnnnnnnnnnnnnnnnnnnnnnnnnnnnnnnnnnnnnnnnnnnnnnnnnnnnnnnnnnnnnnnnnnnnnnnnnnnnnnnnnnnnnnnnnnnnnnnnnnnnnnnnnnnnnnnnnnnnnnnnnnnnnnnnnnnnnnnnnnnnnnnnnnnnnnnnnnnnnnnnnnnnnnnnnnnnnnnnnnnnnnnnnnnnnnnnnnnnnnnnnnnnnnnnnnnnnnnnnnnnnnnnnnnnnnnnnnnnnnnnnnnnnnnnnnnnnnnnnnnnnnnnnnnnnnnnnnnnnnnnnnnnnnnnnnnnnnnnnnnnnnnnnnnnnnnnnnnnnnnnnnnnnnnnnnnnnnnnnnnnnnnnnnnnnnnnnnnnnnnnnnnnnnnnnnnnnnnnnnnnnnnnnnnnnnnnnnnnnnnnnnnnnnnnnnnnnnnnnnnnnnnnnnnnnnnnnnnnnnnnnnnnnnnnnnnnnnnnnnnnnnnnnnnnnnnnnnnnnnnnnnnnnnnnnnnnnnnnnnnnnnnnnnnnnnnnnnnnnnnnnnnnnnnnnnnnnnnnnnnnnnnnnnnnnnnnnnnnnnnnnnnnnnnnnnnnnnnnnnnnnnnnnnnnnnnnnnnnnnnnnnnnnnnnnnnnnnnnnnnnnnnnnnnnnnnnnnnnnnnnnnnnnnnnnnnnnnnnnnnnnnnnnnnnnnnnnnnnnnnnnnnnnnnnnnnnnnnnnnnnnnnnnnnnnnnnnnnnnnnnnnnnnnnnnnnnnnnnnnnnnnnnnnnnnnnnnnnnnnnnnnnnnnnnnnnnnnnnnnnnnnnnnnnnnnnnnnnnnnnnnnnnnnnnnnnnnnnnnnnnnnnnnnnnnnnnnnnnnnnnnnnnnnnnnnnnnnnnnnnnnnnnnnnnnnnnnnnnnnnnnnnnnnnnnnnnnnnnnnnnnnnnnnnnnnnnnnnnnnnnnnnnnnnnnnnnnnnnnnnnnnnnnnnnnnnnnnnnnnnnnnnnnnnnnnnnnnnnnnnnnnnnnnnnnnnnnnnnnnnnnnnnnnnnnnnnnnnnnnnnnnnnnnnnnnnnnnnnnnnnnnnnnnnnnnnnnnnnnnnnnnnnnnnnnnnnnnnnnnnnnnnnnnnnnnnnnnnnnnnnnnnnnnnnnnnnnnnnnnnnnnnnnnnnnnnnnnnnnnnnnnnnnnnnnnnnnnnnnnnnnnnnnnnnnnnnnnnnnnnnnnnnnnnnnnnnnnnnnnnnnnnnnnnnnnnnnnnnnnnnnnnnnnnnnnnnnnnnnnnnnnnnnnnnnnnnnnnnnnnnnnnnnnnnnnnnnnnnnnnnnnnnnnnnnnnnnnnnnnnnnnnnnnnnnnnnnnnnnnnnnnnnnnnnnnnnnnnnnnnnnnnnnnnnnnnnnnnnnnnnnnnnnnnnnnnnnnnnnnnnnnnnnnnnnnnnnnnnnnnnnnnnnnnnnnnnnnnnnnnnnnnnnnnnnnnnnnnnnnnnnnnnnnnnnnnnnnnnnnnnnnnnnnnnnnnnnnnnnnnnnnnnnnnnnnnnnnnnnnnnnnnnnnnnnnnnnnnnnnnnnnnnnnnnnnnnnnnnnnnnnnnnnnnnnnnnnnnnnnnnnnnnnnnnnnnnnnnnnnnnnnnnnnnnnnnnnnnnnnnnnnnnnnnnnnnnnnnnnnnnnnnnnnnnnnnnnnnnnnnnnnnnnnnnnnnnnnnnnnnnnnnnnnnnnnnnnnnnnnnnnnnnnnnnnnnnnnnnnnnnnnnnnnnnnnnnnnnnnnnnnnnnnnnnnnnnnnnnnnnnnnnnnnnnnnnnnnnnnnnnnnnnnnnnnnnnnnnnnnnnnnnnnnnnnnnnnnnnnnnnnnnnnnnnnnnnnnnnnnnnnnnnnnnnnnnnnnnnnnnnnnnnnnnnnnnnnnnnnnnnnnnnnnnnnnnnnnnnnnnnnnnnnnnnnnnnnnnnnnnnnnnnnnnnnnnnnnnnnnnnnnnnnnnnnnnnnnnnnnnnnnnnnnnnnnnnnnnnnnnnnnnnnnnnnnnnnnnnnnnnnnnnnnnnnnnnnnngaccttcgggagaaaaactgggaagcaatggaagcattggcatcaactgaaaaaatgctgcaggacaaagtgaacaagacttccaagnnnnnnnnnnnnnnnnnnnnnnnnnnnnnnnnnnnnnnnnnnnnnnnnnnnnnnnnnnnnnnnnnnnnnnnnnnnnnnnnnnnnnnnnnnnnnnnnnnnnnnnnnnnnnnnnnnnnnnnnnnnnnnnnnnnnnnnnnnnnnnnnnnnnnnnnnnnnnnnnnnnnnnnnnnnnnnnnnnnnnnnnnnnnnnnnnnnnnnnnnnnnnnnnnnnnnnnnnnnnnnnnnnnnnnnnnnnnnnnnnnnnnnnnnnnnnnnnnnnnnnnnnnnnnnnnnnnnnnnnnnnnnnnnnnnnnnnnnnnnnnnnnnnnnnnnnnnnnnnnnnnnnnnnnnnnnnnnnnnnnnnnnnnnnnnnnnnnnnnnnnnnnnnnnnnnnnnnnnnnnnnnnnnnnnnnnnnnnnnnnnnnnnnnnnnnnnnnnnnnnnnnnnnnnnnnnnnnnnnnnnnnnnnnnnnnnnnnnnnnnnnnnnnnnnnnnnngaacgatctacctatgttacagaagtcagagagnagctgaaagatctgttgactgaattgcagaaaaaacttgatgattcatattctgaagcagtaagacagaatgaagagctaaatttg

SEQ ID NO: 27367 - DNA, 566 bp, Macaca Mulatta
gcgctctcagggctgaacgtgccgcgctccaagcggctcttccgggacctggtgagcctgcaggtgccggaggaacaggttctgaacgctgcgctcagggagaaattggctctcctgccgccacaggctcgagccccgcccccaaaggtgatggggtctgggcgtggggcttcctccatgtacccccttacccggattcttcctcctagagtgtaaccttgctttgggccccacctcccagcaggcgccacctgggccggggccagacatgaccatcttgtgtgacccagaaacactattttatgaatctccacacctgaccctcgacggtttgtcccctctccggcttcaactccggccccgcccttcagaggacaccttcctcatgcaccggacactgaggcgatgggaagcgtagtagaccccaaagatccctggaggactagttcgtatttttctgttaaactatttgttagaataaactaattttgctaataaatgggactcttcttggaggcctaaaatggggttaaaagctctctgggggttatccacttagcctcagg

SEQ ID NO: 27368 - DNA, 95 bp, Macaca Mulatta
cagctgaatatctgtattctacacctgaacagctttcaaaaaggctccagaatttctgcaagagaccagatattataagaaaacatctctataag

SEQ ID NO: 27369 - DNA, 495 bp, Macaca Mulatta
tggtcccaaagcgcccatgaagttctacgttcctcatgctcctgtgagtttcgggccaggaggtcagctggtgtgtgtaggtcccagctctcccactgacgggcaagcagcccttgttgaactgcacagcatggaggtaaagaagacccagtgttcctggaatgccggcacactgcttacctaactactcctaacgtgcttaccttgctttcctgtgcctgagctggggcatctccgggaatgggatgctcttgtggaaactgggccaggtaccccctggattagggggtgcaggaatgggtggggctcttctctgaaagaattgatgctagagttatgtttttcctgagatgtcagtggctcatctttagcaacaagattcactttttcctttctgctttctccacaaggccttgagccacatcctagccccacggccctggggtctgatactagacttgactgaaaggggcctagggtggacacagtcttaaa

SEQ ID NO: 27370 - DNA, 121 bp, Macaca Mulatta
aggaactagtggatcagctctattcatttcgagactgctattttgagacacatagtgttgaggatgctgggaggaagcaacaggatgtgcggaaggagatggagaagaccctacagcagat

SEQ ID NO: 27371 - DNA, 644 bp, Macaca Mulatta
atgaccagtctgctgggcagtggtgagggctccatcagctccctggcagacatcctggtgtggtccgagaccaccatgggcatggccatagccacaggcttcctggactccggccacagcaccgtggcagatctgctgcacagctcggggcccagattgcgctcggtccccagcctgctgggaagcgtcagctcagccttctcctccgggctgatgtcagggactggctcagccctgcgcaccctcacccatgtgctggagacagtggagcagaggacggtggagggcatccgctcggccgtgcgctacctgaccagccacctcaccccacgccggttccaggctgaccccaactatgattagatccctgcacagggacccccgaagccctcgctcagtgacctccagagatccctgggaccctcacaccctgctcccttgcccattcttgctctggacggttcccccagcccatgcaataaatcaccagcgagcgtttatttctaagcaccagcctcctcccttgggatgcagtgagcaacaaaacagtgacaggacaggagggctcagggtgtggtggaaacaatgtctcctgagggtttctcaggctgtcccattcaggggctgggggcaaatgtgcagac

SEQ ID NO: 27372 - DNA, 119 bp, Macaca Mulatta
caggcatacacagccaccaagcaggagatgcagcggcagatgagccttggggagctgtgccaccctgtgcccctctcctttgagcccgtcaagagcttctttaagggcctcgtggaagc

SEQ ID NO: 27373 - DNA, 357 bp, Macaca Mulatta
  misc_feature (1)...(357): n = A,T,C or G
ttattaaatagagcatctgttgagggactcttttaaaaccacagccatgaacagacgttggggctaagagacacagcaacttgcgacagtgtggacctacctgtagcagctagcaaaggcctctagcagctacagtcccttctggagtctttatttgcatgtaaaatgcaaaggagtcctgatgacctacctccaaggcagctgccctcctgaacattcccttggaaaacagtaaacatcatttcggaatgtgaacaaccagagactacacaggagaaaggnnnnnnnnnnnnnaagatacaaaatcttgggtggcttcaccgttcagctttttaataaaaggaacaatatacaaca

SEQ ID NO: 27374 - DNA, 625 bp, Macaca Mulatta
tcgatcactgtatcagccagggcatgggcaggagactgtgaaagcggaggggaattgagaacagggacagtttataaggtgtgggctgagggggtcacaatggtcatgggcaagttcgtgtgcagctttttcagcgagatcttgcactccatcatattggaggagctgccgtgcgtggcccacatcctcgagctctgccaggacatcttcctggtgtgcaaaacccgtgagctggagctggaggaggagctgtctgccaagctcatgttactctaccgctcacccgaggccatgatcaagttgactcgtgaggagtaggagctgctgctggcaccctagagggaaggagctggcctgctgggcagcacggccacacggggggcggcactcctcgggccgggggagctactgccccatccaaggtcgccagctcttgtgtgtcctcccagcctgcctgagccctgatgctgctgtcaggggacactgtgtccccatggcctgattggtgctgtcgtccccaccctcacgcatgcaaactgtagagtttttaaaattgcaaatgttttatttatataattggaaagaaaaatagtgtgggcccagatcaggtagaggacacgaccac

SEQ ID NO: 27375 - DNA, 1210 bp, Macaca Mulatta
  misc_feature (1)...(1210): n = A,T,C or G
ggcacaaacattttctgaaacttccatcaacttttttcccctgactgctgctttctgtcatgtcagaggatgaagtttttgctgctgcagcagaagtacctagaatacctggaggatggcaaagtcctggaggcactgcaagttctacgctgtgaattgacgccgctgaaatacaatacagagcgcattcatgttcttagtgggtnnnnnnnnnnnnnnnnnnnnnnnnnnnnnnnnnnnnnnnnnnnnnnnnnnnnnnnnnnnnnnnnnnnnnnnnnnnnnnnnnnnnnnnnnnnnnnnnnatttaccaccatcagtgatgcttcccccacggcgtttacagactctcctgcggcaggcggtggaactacaaagggatcggtgcctatatcacaataccaaacttgataataatctagattctgtgtctctgcttatagatcatgtttgtagtaggnnnnnnnnnnnnnnnnnnnnnnnnnnnnnnnnnnnnnnnnnnnnnnnnnnnnnnnnnnnnnnnnnnnnnnnnnnnnnnnnnnnnnnnnnnnnnnnnnnnnnnnnnnnnnnnnnnnnnnnnnnnnnnnnnnnnnnnnnnnnnnnnnnnnnnnnnnnnnnnnnnnnnnnnnnnnnnnnnnnnnnnnnnnnnnnnnnnnnnnnnnnnnnnnnnnnnnnnnnnnnnnnnnnnnnnnnnnnnnnnnnnnnnnnnnnnnnnnnnnnnnnnnnnnnnnnnnnnnnnnnnnnnnnnnnnnnnnnnnnnnnnnnnnnnnnnnnnnnnnnnnnnnnnnnnnnnnnnnnnnnnnnnnnnnnnnnnnnnnnnnnnnnnnnnnnnnnnnnnnnnnnnnnnnnnnnnnnnnnnnnnnnnnnnnnnnnnnnnnnnnnnnnnnnnnnnnnnnnnnnnnnnnnnnnnnnnnnnnnnnnnnnnnnnnnnnnnnnnnnnnnnnnnnnnnnnnnnnnnnnnnnnnnnnnnnnnnnnnnnnnnnnnnnnnnnnnnnnnnnnnnnnnnnnnnnnnnnnnnnnnnnnnnnnnnnnnnnnnnnnnnnnnnnnnnnnnnnnnnnnnnnnnnnnnnnnnnnnnnnnnagggagttcatttatgggacttgcaagacagagttttagtaagaaagtatcaaggtgttacgcaagggttttatacaattcattcatgttttggaggccataatgaagacttcatcgctagtggcagtgaag

SEQ ID NO: 27376 - DNA, 165 bp, Macaca Mulatta
caggtaatgagagtgcatacccgcccaacggcgtggagtgctacagctgtgtgggcctgagccgcgaggcgtgccagggtacatcgccgccggtcgtcagctgctacaacgccagcgatcatgtctacaatggctgcttcgacggcaacgtgaccttgacggcag

SEQ ID NO: 27377 - DNA, 377 bp, Macaca Mulatta
  misc_feature (1)...(377): n = A,T,C or G
tggagtactggctgagctgcggcgagcgcggtctcctggtctaccccgaggtgaagcgcctcatgttccgaatagccatgcgcatcctactgggctgcgaaccccaactggccggcgacggggacgcagagcagcagcttgtggaggccttcgaggaaatgacccgcaatctcttctcactgcccatcgacgtgcccttcagcgggctgtaccgggnggcatgaaggcacggaacctcattcacgcgcgcatcgagcagaatattcgcgccaagatctgcgggctgcgggcatccgaggcgggcaggggctgcaaagacgcgctgcagctgttgatcgagcactcgtgggagaggggagagcggctggacatgcagg

SEQ ID NO: 27378 - DNA, 651 bp, Macaca Mulatta
ggctctgcattgcttgtgttgaacaagtaccgctacctgttcataaaatgtgtgaagtggatgagtttcaaggattctgaccatcagcagaatgggaagcacattgttcagaagaccagcattattcttcattaatgaacactttacatgtctgtttccaaacacaagtgaattcatcttaagaggcaaaaaaccgaatgaatattttcagcactttctccttcgggaacatctcctgtttacatcttagttgcttcccaggacatgcattaggtctatccctctggcacatgtttaaacatagattcagccagaagcagaggtgggcctgtatttaatctcctactgcagttcaagtcagaactacaccttgcttttactctaaatatttgcattattgtccttggatgttttcccattgtgtacaacagatctctcctctttaaaagaattggttgatcagtaagagaaatcatactctggagtgcacttagagggaagaaaaaccacatgtttaatgagtggccacagatgtctttaattccaaaaacctggccgttcaggcacaaaagaagatcttgggtaaaatggtgtccaaatccatcgccaccaccttaatagatgacacgagtagtgaggtgctggatgagc

SEQ ID NO: 27379 - DNA, 596 bp, Macaca Mulatta
  misc_feature (1)...(596): n = A,T,C or G
agccagccccatgccttctgcaactctcagctgcctcatctcgcctgcttttcccttcacactttgcttggagctctgttttccagggcctgagctggcatctcctggggagcatgaggttcaccggcctctgctgcccgggctggggccctgcaggtggtgggacaggtgcttccgtagcccctcctggctccttggcttcccactctgccaagcttttccagcagccactgactctcctggggctgaatgtgacatgcgtgtggggttcctgtgccactccatgatggcttcctgtaagagggcccccctctcactctcttctctccccacagaccctacgtccgctccaagggccggaagttcgagcgtgccagaggccgacgggccagtcgaggctacaaaaactaaccttggatcctatcctcttattaaaaagattttgaatgctgacagtcctgtgtgtgtgttattgggggacgggtntggggggttggcgcctgcaggtgagaatgcatttggtttggggacagggacgccatgccagcgaagaccagccctcctcctgcccccactgccccggaagctccctgccc

SEQ ID NO: 27380 - DNA, 81 bp, Macaca Mulatta
gacaccacacctcgtcaacctgaacgaggacccgctgatgtccgagtgcctcctctactacatcaaggatgggatcaccag

SEQ ID NO: 27381 - DNA, 130 bp, Macaca Mulatta
  misc_feature (1)...(130): n = A,T,C or G
ngatccgtgtcctgtgtcaccgcatcgtcaatgccacctggttcaccaacttcatcctgctctttatcctgctcagcagcgctgcactggctgcggaagaccccatccgggctgattccatgaggaatca

SEQ ID NO: 27382 - DNA, 1600 bp, Macaca Mulatta
gggaaccccacccggccaagggcccgcaaagacgaggctcccgggccggggcccctccggccgcccacctctcgactggcgccctgccccgcgtcccggagccgcgtgagcctgcggggccatggagcgcgcgccgcccgacggaccgctgaacgcttcgggggcgctggcgggcgaggcagcggcggcgggcggggcgcgcggcttctcggcagcctggaccgcggtgctggccgcgctcatggcgctgctcatcgtggccacggtgctgggcaacgcgctggtcatgctcgccttcgtggccgactcgagcctccgcactcagaacaacttcttcctgctcaaccttgccatctccgacttcctcgtgggcgccttctgcatcccactgtatgtgccctatgtgctgaccggccgctggaccttcggccggggcctctgcaagctgtggctggtggtggactacctgctgtgcacctcctccgccttcaacatcgtgctcatcagctacgaccgcttcctgtcggtcacccgagccgtctcataccgggcccagcagggcaacacgcggcgggcggtgcggaagatgctgctggtgtgggtgctggccttcctgctgtacgggccggccatcctgagctgggagtacctgtccgggggcagctccatccccgagggccactgctacgctgagttcttctacaactggtacttcctcatcacggcctccaccctggagttcttcacgcccttcctcagcgtcaccttcttcaatctcagcatctacctgaacatccagaggcgcacccgcctccggctggatggggctcgagaggcaggtggccccgagcccccgcccgaggcccagccctcgccacccccaccgcctggctgctggggctgctggcagaaggggcacggggaggccatgccgctgcatcggtacggggtgggtgaggcggccgcgggcgctgaggctggggagacagccctcgggggtggcggtgggggtggctccgcggcctcacccacctccagctccggcagctcctcgaggggcactgagaggccgcgctcactcaagaggggctccaagccttcggcatcctcggcctcgctggagaagcgcatgaagatggtgtcccagagcttcacccagcgcttccggctgtctcgagacaggaaagtggccaagtcactggccgtcatcgtgagcatctttgggctctgctgggccccgtacacgctgctgatgatcatccgggccgcctgccacggccactgcgtccctgactactggtacgaaacctccttctggctcctgtgggccaactcggcagtcaaccctgtcctctacccgctgtgccaccacagcttccgccgagccttcaccaagctgctctgcccccagaagctcaaaatccagccccacagctccctggagcagtgctggaagtgagcggcctgccagagcctccctcagccacgcccctctcagcccaggtctcctgggcagctggccccgctgccccccacctggctcgttcccccaggggtgggccccgccgtgtctgtggccctctcttaatgccacggcagc

SEQ ID NO: 27383 - DNA, 360 bp, Macaca Mulatta
gtttggcaaaatcctgaatgttatagtcttattaattccagccaaaaggagtttaacaaaaacacatctcccatcctgtttccaaattttctatttctctacctgcaataagcctactgataaaccctagattttggcatgattatcattaacttgtgagttgtagtcttctatttctcctttgtctttccctgctgactataccctcttcctttcactcttctgacacaaggatactacctaattttaaatatgttctattcatagtatcaaattattttatagttcaccttaattaatgattaacattatgctgaatcctggtaatgcatacagtgtagatagaatttgataggtgta

SEQ ID NO: 27384 - DNA, 114 bp, Macaca Mulatta
cagaggaaggaaagatctactctctggtagtgaatgagacccagctggaccagccacgctcctacacggttcagctggccctgaggaaggtgtcccactacctgcctcacctgc

SEQ ID NO: 27385 - DNA, 525 bp, Macaca Mulatta
gattgagagtattggggagcggtctggtctctcagggacggtactctgtggttctgtatcacggtaggagttggaatgaggtgcggggtgggcttcaggaatggctggatccaggtatcaggttgctgactgtcatgattcgggctcatttgtaatatggcctctgtgtgttgaggtcgctgtagacatccgacctctgaccctggagctcctgataaggcgactccgtctcagtgatacgctgtttccgggtcgctgcctccgcagcccctcgcccccgagggaccagccggcccaggaagtacacagccagggcgatgagcactgtcagcaccaagtcccccagcacgatccctgccagcacgcccgggctcaccgtagagcaactgcaatcgctctgggcctgggcctggacaggacggagaccacctacagccagcaggagaggcaggagcaggagcctgctgcagggttcaaggccccccatgaagccggatgctgctggacaccacagtgtaagggccg

SEQ ID NO: 27386 - DNA, 314 bp, Macaca Mulatta
ggtatggaacccttcagatcaaagcttaccaataaattcagtatgtagaacagattagtgtagttgaagtggggaagaatgagagttatcccaaccagccagcaccccctactcccattcccacactttccctcatgggaggctgccaggagcactttgaaaaccactggaaaggccgggcacgatggctcatgcctgcaatcccagcactttgggaggccaagcaggcggatcacctgagatcaggagtttgaaaccagcctggccaacttggcgaaaccccatgtttactaaaaatatgaaaattagccagg

SEQ ID NO: 27387 - DNA, 763 bp, Macaca Mulatta
  misc_feature (1)...(763): n = A,T,C or G
gggtaccttaatcagcatcagaaaactcatactcaagagaaagcttatgaatgtaaagaatgtgggaaagcttttattcggagttcatctcttgctaagcatgaaagaannnnnnnnnnnnnnnnnnnctatcaatgtcatgaatgtgggaaaaccttcagttatggttcatcccttattcagcataggaaaatccatactggagaacgaccttacaagtgtaatgagtgtgggagagcattcaaccagaacatacaccttacacaacataagagaattcatacaggagccaagccttatgagtgtactgagtgtggtaaagcctttcgacattgttcatctcttgctcaacatcaaaaaactcacacagaagaaaaaccctaccagtgtaataaatgtgaaaagacctttagccagagctcccatctaactcagcatcaacgaattcacactggnggagaagccctataagtgcaatgaatgtgacaaagcctttagccggagtactcatctgactgaacatcagaatacnnnnnnnnnnnnnnnnnnnnntaactgtaatgaatgcagaaagacttttagccagagcacatatctcattcagcaccagagaattcatttcaggagagaagcccttttggatgtaatgaattgtgggaaaacccttcagatatcggctctgcttctcacaaacatcagaagactgcaatcctggccatatgacaattccaggaacatcctaaattttagggggaatatattt

SEQ ID NO: 27388 - DNA, 632 bp, Macaca Mulatta
gggggggatttgcagacaggccaggagatatggcaagtaatatttctgacatatttgtataaattattttagtgtcgcattccttcatggttccatggatttccagggtggtattccaagtgttgctttgaaagcagtgtttttttctatttctcgtagaatgtgtgaaggatatagaacaatcttacagaaatttcttgtcgcctgttgctaacaaaattagtatatggtaaaggtcaggtattaatgatttgaagttaaagaagttttcattttgtaatctgtatataaattcttttttaaataggtggatccttttcataccttatttggaattgctggattgtcacttttgggagaagaacagattaaacctgttaatcctgtcttttgcatgcctgaagaagtgcttcagagagtgaatgttcagcctgagctagtgagctagattcattaaagtgaaagctgcatagtatagttttgccattttaacatttctgtatttgaagtgcttattaaatctaaaaatgaatactgttaatattttgtacattgtgttaaattaattttaataaattatataattatacatattgtaaaataaagacctgtattttattttctgctctttt

SEQ ID NO: 27389 - DNA, 967 bp, Macaca Mulatta
  misc_feature (1)...(967): n = A,T,C or G
gtgatttctttctcattagtcttttcttctcctttctatttcccacaaatattaatcgacaagagatgctgagtcacctaactcatttttctattccaattcttttccttagaatgctccaagcaagaaacaccctttggattttcaatttctctaaaacaaggagtagataggtacttaaaatagaaaaattctgctagaagagaactagtgtagatcaggtaaagaaacaacatgtacatggtaaatctacaatctggaaaaggatgaaataatgaaataactatgctttcatcttttttctcccttgtatatttcttataggaccattaccctcaaaatggcaaatggcatcttctcaacctccttgcgtgaataaggtgtctgactggaagctggagatacttcagaatggcttatatttaatttacggccaagtggctcccaatgcaaactacaatgatgtagctccttttgaagtacggctgtataaaaacaaagacatgatacaaactctaacaaacaaatctaaaatccagaatgtaggagggacttatgaattgcatgttggggataccatagacttgatattcaactctgagtatcaggttctaaaaaataatacctactggggtatcattttactagcaaatccccaattcatctcctagagacttgatttgatcccattcccttcagcacatgcagaggtgccagtgggtggactggagggagaagattttcatttctagggtttgtctgtctacaaaaatcatgcaaacagaactcctctgtatgtgaattttcatctatcgtgcctatctgaacgagactcagaggaagagccaaagactttttggtggatctgcagagatactcattatccctgagaaaatgatatggatgacagaggacatgtgcttttcaaagaatctctgtctaaatcttgaattcgtgangggaaaat

SEQ ID NO: 27390 - DNA, 130 bp, Macaca Mulatta
agaatcttctgatagagaaaaagactgctttatcactcaaacatgttcctttgacctttcagtgtgcatgtgactcattaacttcacatagaatatgattccctaagtatgccacacagtatcatattac

SEQ ID NO: 27391 - DNA, 793 bp, Macaca Mulatta
gtctttagtcgccattcatatctagcagaacatcaaacagttcatactggtgagaaaccttacaaatgtaaagaatgtggcaaagcattttcagtgcgttccagcctcataacccatcagctaattcacactggaaggaaaccttacaaatgtaaagaatgtgacaaggtgtttgggcgcaagtgtttactgacctctcatcagagaattcatactagagagagaccttacggatgcaatcagtgtggcaagatctttagtcagaaatcagaccttatacgacatcgaaaaattcatactgatgagaaaccttacaaatgtaataaatgtggcacagcgtttagagagttttcagaccttactgcccattttctaatccatagtggagagaaaccttacgaatgtaaagaatgtggcaaagtcttcaggtacaagtcttctctaaccagtcatcatagaattcatactggagagaagccttacaaatgtaacaaatgtggcaaggtcttcagtcggagttcaaacctcgtatgccatcagaaaattcatacaggagagaagccttacaaatgtaatgaatgtggcaaggtctttaatcaagcgtcataccttacaagacatcaaataattcatactggagagaggccttacagatgtaataaatgtggcaaagcatttcgagggtgttcaggccttactgcccatcttgcaatccatactgagaagaaatctcatgagtgtaaagaatgtggcaagatcttcactcacaagtgttccctcaccaatcaccata

SEQ ID NO: 27392 - DNA, 1186 bp, Macaca Mulatta
  misc_feature (1)...(1186): n = A,T,C or G
tccgggtggctgacttgctgcagcacatcacgcagatgaagagaggccagggctacgggttcaaggaggaatacgaggtaagagaccagcctgtgggggaactttctgatnnnnnnnnnnnnnnnnnnnnnnnnnnnnnnnnnnnnnnnnnnnnnnnnnnnnnnnnnnnnnnnnnnnnnnnnnnnnnnnnnnnnnnnnnnnnnnnnnnnnnnnnnnnnnnnnnnnnnnnnnnnnnnnnnnnnnnnnnnnnnnnnnnnnnnnnnnnnnnnnnnnnnnnnnnnnnnnnnnnnnnnnnnnnnnnnnnnnnnnnnnnnnnnnnnnnnnnnnnnnnnnnnnnnnnnnnnnnnnnnnnnnnnnnnnnnnnnnnnnnnnnnnnnnnnnnnnnnnnnnnnnnnnnnnnnnnnnnnnnnnnnnnnnnnnnnnnnnnnnnnnnnnnnnnnnnnnnnnnnnnnnnnnnnnnnnnnnnnnnnnnnnnnnnnnnnnnnnnnnnnnnnnnnnnnnnnnnnnnnnnnnnnnnnnnnnnnnnnnnnnnnnnnnnnnnnnnnnnnnnnnnnnnnnnnnnnnnnnnnnnnnnnnnnnnnnnnnnnnnnnnnnnnnnnnnnnnnnnnnnnnnnnnnnnnnnnnnnnnnnnnnnnnnnnnnnnnnnnnnnnnnnnnnnnnnnnnnnnnnnnnnnnnnnnnnnnnnnnnnnnnnnnnnnnnnnnnnnnnnnnnnnnnnnnnnnnnnnnnnnnnnnnnnnnnnnnnnnnnnnnnnnnnnnnnnnnnnnnnnnnnnnnnnnnnnnnnnnnnnnnnnnnnnnnnnnnnnnnnnnnnnnnnnnnnnnnnnnnnnnnnnnnnnnnnnnnnnnnnnnnnnnnnnnnnnnnnnnnnnnnnnnnnnnnnnnnnnnnnnnnnnnnnnnnnnnnnnnnnnnnnnnnnnnnnnnnnnnnnnnnnnnnnnnnnnnnnnnnnnnnnnnnnnnnnnnnnnnnnnnnnnnnnnnnnnnnnnnnnnnnnnnnnnnnnnnnnnnnnnnnnnnnnnnnnnnnnnnnnnnnnnnnnnnnnnnnnnnnnnnnnnnnagccacaagcaacctgccgcattagtggtcacccagcaccctctacccaacaccgtggcagacttctggaggctggtgtttgattacaactgctcatctgtggtgatgctgaatgagatggacactgccca

SEQ ID NO: 27393 - DNA, 2775 bp, Macaca Mulatta
  misc_feature (1)...(2775): n = A,T,C or G
gggagtgtcacattcaaggcctaacactgaggacatgtcgctgtgctatgctaaccgctcggcagccctcttccacctgggtcagtannnnnnnnnnnnnnnnnnnnnnnnnnnnnnnnnnnnnnnnnnnnnnnnnnnnnnnnnnnnnnnnnnnnnnnnnnnnnnnnnnnnnnnnnnnnnnnnnnnnnnnnnnnnnnnnnnnnnnnnnnnnnnnnnnnnnnnnnnnnnnnnnnnnnnnnnnnnnnnnnnnnnnnnnnnnnnnnnnnnnnnnnnnnnnnnnnnnnnnnnnnnnnnnnnnnnnnnnnnnnnnnnnnnnnnnnnnnnnnnnnnnnnnnnnnnnnnnnnnnnnnnnnnnnnnnnnnnnnnnnnnnnnnnnnnnnnnnnnnnnnnnnnnnnnnnnnnnnnnnnnnnnnnnnnnnnnnnnnnnnnnnnnnnnnnnnnnnnnnnnnnnnntcgctatcttgttgccacgaaagatattctcccaggagagctcctggtgaaggaggatgcttttgtgagtgttctcaaccctggagaactgccaccaccgcatcatggcctagacagccagtgggacaccagagtcaccaatggggacctctattgtcaccgatgtttgaagcacactttggccacagttccgtgtgacggatgcagttatgccaagtattgcagccaggagtgtttgcagcaggcctgggagctctaccacaggacagaatgtcctctgggggggctgcttctcacactgggtgtcttttgccacattgccctgaggttgactcttgtggtgggagttgaggatgttcgcaaaatcatgaagaagctttgtgttaagattagtaacaaggacatctgtttaccagaaagcgacaatcaggtcaagacacttaattatggccgaggagagagtgagaaaaatggcaatgtggttgagaccccgattcctggatgcgatgctaatgggaagtatgacagtaattatgatgctgtcttcaaccttttgccccatactgaaaaccacagcccggagcacaaattcctctgtgctctctgtgtttctgtactgtgcaggcagctagaagcagccagtttacaggccatcccaacaggtgtgaactcctctcagctcacagcagcagtgacacctgagtcgtgtcccgacgtgactataaggggagtggcaatgctgaggcacatgttacagcnnnnnnnnnnnnnnnnnnnnnnnnnnnnnnnnnnnnnncaggatctaaagggagcatcgttactgacagcaggcaggtgcgccttgccacaggcatcttccccgttatcagcctcctgaaccactcctgcagccccaacaccagcgtgtccttcattagcactgtcgccaccatccgcgcatcacagcggattggaaaggggcaagagattctccactgctatgngggcctcacaagagccggatgggggttgccgaaaggcagcagaagctgaggtctcagtatttctttgactgcacctgtcacagcttgtcagactgaggcacacaggatggctgcaggccccaggtggaaagcattctgttgcaacagttgcaaagctcccatgcagnnnnnnnnnnnnnnnnnnnnnnnnnnnnnnnnnnnnnnnnnnnnnnnnnnnnnnnnnnnnnnnnnnnnnnnnnnnnnnnnnnnnnnnnnnnnnnnnnnnnnnnnnnnnnnnnnnnnnnnnnnnnnnnnnnnnnnnnnnnnnnnnnnnnnnnnnnnnnnnnnnnnnnnnnnnnnnnnnnnnnnnnnnnnnnnnnnnnnnnnnnnnnnnnnnnnnnnnnnnnnnnnnnnnnnnnnnnnnnnnnnnnnnnnnnnnnnnnnnnnnnnnnnnnnnnnnnnnnnnnnnnnnnnnnnnnnnnnnnnnnnnnnnnnnnnnnnnnnnnnnnnnnnnnnnnnnnnnnnnnnnnnnnnnnnnnnnnnnnnnnnnnnnnnnnnnnnnngtttgcagtacccgaagccctgagcgcaatccagaaggctgaggaggttctgtcgctgcactgtggcccgtgggacgatgaaatccaggagctccagaagatgaaatcctgtttattggacttaccacccacccttgtaaggtcttcagtttagggtcccaaggggattttgacccacaggaaaggagcccgtggaacacaaggtaaagaggttatggccgggcgcggcagctcacacctgtcatcccagcactttgggaggccaaggcgggcggatcacgaggtcaggagatcaagaccatcctggctaacacggtgaaaccccgtctctactgaaaatacaaaaaattagccaggcgaggtggcgggcgcctgtagtcccagctactcgggaggctgaggcaggagaatggcgtgaacccgggaggcggagcttgcagagagccgagatcgcgccactctactccagcctgggcaacagagtgagactccgtctnnnnnnnnnnnnnnnnnnnnaggccgggtgtggtggctcatgcctgtaatcccagcactttgggaggctgaggcgggcagatcacgaggtcaggagttcaagaccagcctggccaacatggtgaaaccccgtctctactaaaaatacaaaaaaagttagccggacgtggtggcaggtgcctgtaatcccagctactcgggaggctgaggcagagaattgcttgaacctgcgagacggagcttacagtgagccgagatcgtgctactgtactgcagcctgggcaacagagcgagattccatc

SEQ ID NO: 27394 - DNA, 697 bp, Macaca Mulatta
gctgggcgtcggggagtatggcccgagatgaccccaagaccgtgcaggacctcacctcggtggtgcagacactcctgcagcagatgcaagataaatttcagaccatgtctgaccagatcattgggagaattgatgatatgagtagtcgcattgatgatctggagaagaacatcgcagaactcatgacacaggctggggtggaggaactggaaggtgaaaacaagatacctgccacacaaaagagttgaaggttgctaataatttatactggaatctggaacaccatgtttccaagccaagagaagatcgaatggctttttacagctaactactatgtgtagacaggttttatattataaagtatgcattcttatcacatactatatagttagtttgtagagtgatttaacccccagtttcttgaacatagtatcttcacatcttggaacttggtcagttgtgctattcatcattaaacactaaaactttggcggttcctgcataacattgtcaaatcttttagtgtatttctgtgaagtcatatttgttatcttgtcattccttttgtagtagttgctgtttggataaaagttgctgtgtgattcagtcattacacaagtagataaaccttcgattatagtcttggcgaagtaagatggttgtagacttaaagttctttattctcagcacaagtgac

SEQ ID NO: 27395 - DNA, 796 bp, Macaca Mulatta
gggcatcgcgtggaggaactgtttcgtaggacgcgcgcctctctttcccagccactggttctcctgaccccgaatgtggggagtgacttcagtctcctgacatccagtgttctctcgagccagcttccagcccaccgaaaatgagcttttccggagatgggcatcttattccaatacccttcctgtgaatgtgtggagaaaaagagatgggaacgagtcagaggaaatagagaaattttgaaagagaaatgaagaatgagagaaccattgacagacggcaaagtagaaggttcacaaattttaagaaagggagaataaagtggagaaatctcagagggaatccactcaacagatgaggattcacttccaaagagacatattatgcaaggaagcaacttggaaaatgaaagagaaggagtcaggaatggcccttactcagggacccctgaaattcatggacgtggctatagaattctctcaggaggagtggaaatgcctggagcctgctcagaggactctgtacagggacgtgatgttggagaactataggaacctggtctccctgggaatctgtctgcctgacctgagtgttatctccacgttagagcaaaggaaagatccctggattctgcagagtggagagaaaatagcaaacaatccagatggcagggaatgcatccaaggtggtgaacccggagaggagctgtaaattgggaagtaatgcaggaaaacaagccttgttaaaagtccacttgggattccctttcccagttaccatctggaatgatctgccgcc

SEQ ID NO: 27396 - DNA, 618 bp, Macaca Mulatta
  misc_feature (1)...(618): n = A,T,C or G
ggctcacgagcagctaaatgtgaagcatgaaccgctccagctcatccagcctcagtttgagacgcctctgccaacccttcagcctgcggnnnnnnnnnnnnnnnnnnnnnnnnnnnnnnnnnnnnnnnnnnnnnnnnnnnnnnnnnnnnnnnnnnnnnnnnnnnnnnnnnnnnnnnnnnnnnnnnnnnnnnnnnnnnnnnnnnnnnnnnnnnnnnnnnnnnnnnnnnnnnnnnnnnnnnnnnnnnnnnnnnnnnnnnnnnnnnnnnnnnnnnnnnnnnnnnnnnnnnnnnnnnnnnnnnnnnnnnnnnnnnnnnnnnnnnnnnnnnnnnnnnnnnnnnccaggaacatgacatcgatacaagtgaaacagcattccagaacaatttctgaagaccatgcctcttgaagctttttctgcctcctgattctctctttataaactattttcaaattgttcctcaacttcttatcaaaattgtttatacactctttcctccatgagctatgaaaggtatatgcatcttctataatacccagataggtataagatttttcacaaagtccttatgtaagatacattccatttttaaaaattaaatgtatggttgcatctgtctt

SEQ ID NO: 27397 - DNA, 330 bp, Macaca Mulatta
  misc_feature (1)...(330): n = A,T,C or G
agggggtgggtaggggagttaatttgtgacttcacaacaataagttatctaatntagtaaagaccctgatctgatgcatgttttttatttgatagtttgaatagaaatttaaatgtttaagttttactttttgtttctggcttttattgcttaaggctttctttggttcttacattagaaaatcatttttaaccttcattatcatttttctaaggttctttcctttttcttagttgctttctattctgtgttgcctgtcttatttattgtcatttgtgattatttagatcttaagaccaaactttcttgatataacaatcctaaagatta

SEQ ID NO: 27398 - DNA, 1155 bp, Macaca Mulatta
  misc_feature (1)...(1155): n = A,T,C or G
ccagagggtcctggggttggctgggcgggggcagctcccagcgagagccccctgggatttgggtaagtggaggcacatgcagactctggccacagggcacctcgcacacgaggggagttcaccacacaatttgagcggagggcgggcgcaggagagcagcggtgtcccagaagccaagggtggtcatggagccccacgccacagcgcttcctacagggccacaccatccggtctgtggagggggctgcattgctgggagggacccacctgatcctggattccagcctcaccctgggtcaccgctgagtgtcccaagtggccccttatcccccagggccgggcggcgtcccaacccccttgggatgtctgtgctcagagtgtggcagacacgccccggcagggacatcctcctcccctgcacccgccacagctgtgggttcagggtctctattgtgggcagagattcacacagtcaaggtgagggtcccaggagcacctgtgaccaggccctggctgccagggagagggggacccttaaccgacggggcagacaacctgagatggaccctcgtccaggggagggccccgccgcccacaactccttggcattcctgcaccagcaggacgggctgnnnnnggcgcctcgccggtgtcagtgcccagcatcactgtgccccggtggagggggaggcccttccgagcctgggcctggatgtgaatgagggcaggtttctcatctctctgacctcagcttcctcaactgggaaggggagccacagcacctgcttggggtgatgaggaagggggagctcagggagagccctgggcagggctgcctcctcaccttccttcagcctttggacatgagcgcagaggaccaagtgaatgaatgaatgactcagtcaatcaactgatccatcagtctatggatctctggacagtcggacagctgggcagcgggcaggatgggggactctcgctgaagccgcattcatttgtgttcagctttnnnnnnccactgtgcccggaccagcggcccactcggtgagtcgaacgtgcacctggcacccctctttttggaaatccacgaacactgggctcccgcagagactgaggctgagcaggccacttccctggagctgactccacagctgt

SEQ ID NO: 27399 - DNA, 85 bp, Macaca Mulatta
ccctatttttgaggaagatacaccctctgttatggaaattgaaatggaagagcttgataaatggatgaacagcatgaatagaaat

SEQ ID NO: 27400 - DNA, 581 bp, Macaca Mulatta
  misc_feature (1)...(581): n = A,T,C or G
ctcctatgagctgactcagccaccctcggtgtcggtgtccccaggacagatggccaggatcacctgtgggggagacaacattggaagtaaaaatgtgcagtggtaccagcagaagccagcgcaggcccctgtgctggtcatctatgctgatagcgaacggccctcagggatccctgagcgattctctggctccaactcagggaacacggccaccctgaccatcagcagggtcgaggccggggatgaggctgactattactgtcaggtgtgggacagtagtannnnnnnnnnnnnnnnnnnnnnnnnnnnnnnnnnnnnnnggtcagcccaaggctgccccctcggtcactctcttcccgccctcctctgaggagcttcaagccaacaaggccacactagtgtgtctgatcagtgacttctacccgggagccgtggaagtggcctggaaggcagatggcagcgctgtcaacgcgggagtggagaccaccaaaccctccaaacagagcaacaacaagtacgcggccagcagctacctgagcctgacgtccgaccagtggaagtcccacaagagctacagctgc

SEQ ID NO: 27401 - DNA, 2631 bp, Macaca Mulatta
  misc_feature (1)...(2631): n = A,T,C or G
atgtgtgacttgcggcggccagcggcaggtgggatgatggacttggcctacgtctgtgagtgggagaaatggtccaagagcacccactgcccgtcggtgcccctggcctgcgcctggtctagccgaaatctcatcgccttcaccatggacctgcgcagcgacgaccagnnctgacccgtatgatccacatcctggacacggagcacccctgggacctgcactccatcccctcagaccaccgcgaggccatcacctgcctggagtgggatcagtcagnnnnnnnnnnnnnnnnnnnnnnnnnnnnnnnnnnnnnnnnnnnnnnnnnnnnnnnnnnnnnnnnnnnnnnnnnnnnnnnnnnnnnnnnnnnnnnnnnnnnnnnnnnnnnnnnnnnnnnnnnnnnnnnnnnnnnnnnnnnnnnnnnnnnnnnnnnnnnnnnnnnnnnnnnnnnnnnnnnnnnnnnnnnnnnnnnnnnnnnnnnnnnnnnnnnnnnnnnnnnnnnnnnnnnnnnnnnnnnnnnnnnnnnnnnnnnnnnnnnnnnnnnnnnnnnnnnnnnnnnnnnnnnnnnnnnnnnnnnnnnnnnnnnnnnnnnnnnnnnnnnnnnnnnnnnnnnnnnnnnnnnnnnnnnnnnnnnnnnnnnnnnnnnnnnnnnnnnnnnnnnnnnnnnnnnnnnnnnnnnnnnnnnnnnnnnnnnnnnnnnnnnnnnnnnnnnnnnnnnnnnnnnnnnnnnnnnnnnnnnnnnnnnnnnnnnnnnnnnnnnnnnnnnnnnnnnnnnnnnnnnnnnnnnnnnnnnnnnnnnnnnnnnnnnnnnnnnnnnnnnnnnnnnnnnnnnnnnnnnnnnnnnnnnnnnnnnnnnnnnnnnnnnnnnnnnnnnnnnnnnnnnnnnnnnnnnnnnnnnnnnnnnnnnnnnnnnnnnnnnnnnnnnnnnnnnnnnnnnnnnnnnnnnnnnnnnnnnnnnnnnnnnnnnnnnnnnnnnnnnnnnnnnnnnnnnnnnnnnnnnnnnnnnnnnnnnnnnnnnnnnnnnnnnnnnnnnnnnnnnnnnnnnnnnnnnnnnnnnnnnnnnnnnnnnnnnnnnnnnnnnnnnnnnnnnnnnnnnnnnnnnnnnnnnnnnnnnnnnnnnnnnnnnnnnnnnnnnnnnnnnnnnnnnnnnnnnnnnnnnnnnnnnnnnnnnnnnnnnnnnnnnnnnnnnnnnnnnnnnnnnnnnnnnnnnnnnnnnnnnnnnnnnnnnnnnnnnnnnnnnnnnnnnnnnnnnnnnnnnnnnnnnnnnnnnnnnnnnnnnnnnnnnnnnnnnnnnnnnnnnnnnnnnnnnnnnnnnnnnnnnnnnnnnnnnnnnnnnnnnnnnnnnnnnnnnnnnnnnnnnnnnnnnnnnnnnnnnnnnnnnnnnnnnnnnnnnnnnnnnnnnnnnnnnnnnnnnnnnnnnnnnnnnnnnnnnnnnnnnnnnnnnnnnnnnnnnnnnnnnnnnnnnnnnnnnnnnnnnnnnnnnnnnnnnnnnnnnnnnnnnnnnnnnnnnnnnnnnnnnnnnnnnnnnnnnnnnnnnnnnnnnnnnnnnnnnnnnnnnnnnnnnnnnnnnnnnnnnnnnnnnnnnnnnnnnnnnnnnnnnnnnnnnnnnnnnnnnnnnnnnnnnnnnnnnnnnnnnnnnnnnnnnnnnnnnnnnnnnnnnnnnnnnnnnnnnnnnnnnnnnnnnnnnnnnnnnnnnnnnnnnnnnnnnnnnnnnnnnnnnnnnnnnnnnnnnnnnnnnnnnnnnnnnnnnnnnnnnnnnnnnnnnnnnnnnnnnnnnnnnnnnnnnnnnnnnnnnnnnnnnnnnnnnnnnnnnnnnnnnnnnnnnnnnnnnnnnnnnnnnnnnnnnnnnnnnnnnnnnnnnnnnnnnnnnnnnnnnnnnnnnnnnnnnnnnnnnnnnnnnnnnnnnnnnnnnnnnnnnnnnnnnnnnnnnnnnnnnnnnnnnnnnnnnnnnnnnnnnnnnnnnnnnnnnnnnnnnnnnnnnnnnnnnnnnnnnnnnnnnnnnnnnnnnnnnnnnnnnnnnnnnnnnnnnnnnnnnnnnnnnnnnnnnnnnnnnnnnnnnnnnnnnnnnnnnnnnnnnnnnnnnnnnnnnnnnnnnnnnnnnnnnnnnnnnnnnnnnnnnnnnnnnnnnnnnnnnnnnnnnnnnnnnnnnnnnnnnnnnnnnnnnnnnnnnnnnnnnnnnnnnnnnnnnnnnnnnnnnnnnnnnnnnnnnnnnnnnnnnnnnnnnnnnnnnnnnnnnnnnnnnnnnnnnnnnnnnnnnnnnnnnnnnnnnnnnnnnnnnnnnnnnnnnnnnnnnnnnnnnnnnnnnnnnnnnnnnnnnnnnnnnnnnnnnnnnnnnnnnnnnnnnnnnnnnnnnnnnnnnnnnnnnnnnnnnnnnnnnnnnnnnnnnnnnnnnnnnnnnnnnnnnnnnnnnnnnnnnnnnnnnnnnnnnnnnnnnnnnnnnnnnnnnnnnnnnnnnnnnnnnnnnnnnnnnnnnnnnnnnnnnnnggctgtcgaaggccatgggccggacgcctgcgtgaccagcagagctgctgaggaagcccctgcctttgtccagctgggcccgtggcccacataccgccctcccgggaccccccgatccctggaccatccgcatccagaggaccgtctgtg

SEQ ID NO: 27402 - DNA, 133 bp, Macaca Mulatta
gaactccagaaacattgcatccacctggagtaccctctgttggcagaatatgacttccagaagaattctgtcaaccctgatgtcaacactgacctaaagcccacagctgtcctcagaccctatcaggagaaga

SEQ ID NO: 27403 - DNA, 820 bp, Macaca Mulatta
gggattccagcggctgacagcacccgggccgagatgtctccctcagtggccttagccgtgctggcgctactctctctttctggcctggaggctatccagcgtactccaaagattcaggtttactcacgccatccaccagagaatggaaagccaaatttcctgaattgctatgtgtctggatttcatccatctgatattgaagttgacttactgaagaatggagagaaaatgggaaaagtggagcattcagacttgtctttcagcaaagactggtctttctatctcttgtactacactgaattcacccccaatgaaaaagatgagtatgccggccaatgtgaaccatgtgactttgtcagggcccaagacagttaagtgggatcgagacatgtaagcagcatcatggaggtttgaaaatgccccatttggattggatgaattccaaattctgcttccttgctttttaaaattgaaatgcttaatacagtttatccaaaaaatgcctagttataataatggttaccccgggcacgatcttctttataattttaacttggagtgctttatccacgtttgaaggtatcggggcagcttaccttaggaagtgctgggcactttttaggtggggtagcaaaaaaaattcctctctatcccacatcaaaattccttgggtcagatctcgagtccttttaaacttactggcactccagaggtgttggttaatattagtcaatgggcttcttaagacttagcttttccaaatgtacacagaccgtggtgccttaagaaacttgtgcgggacaataatatttaagaatct

SEQ ID NO: 27404 - DNA, 669 bp, Macaca Mulatta
  misc_feature (1)...(669): n = A,T,C or G
gggaaggggaaatataaaatctatgattatatattttaaaagattataggctgtaattataaaatatattggcttttctttcattttcaatgtgaaaagatatattaaataggcatatcttgcataattttgttatacagaatagtttttagacagcctttactaaagttatgcaaacacagttccccatttactactttaatgcccttgacagggagtagctgcttgggttaataggtattagggttcatgaagggcggggaacaactctaatccttttggggcaggagggagggtttttttagggttgtggggagggaactgcaagtgcctgaggaccagagtggcctctagccctggaattgaacacttttaaacctaaagagccttattattattagctcaagaaacaccacgtgccagtctttccaggaaggtgacttgcccgaccatgaagcaacaaaagagcacaggcagacttaaagttgaatagacctgngttcaaatcatagttcagttttcaataactgtatgtatgattttgggctaaggatttgactctttctgtcaactgcagtttccttatctttgaatgcaagtatgttatctcagagactattctaggattactgaagataaaggacacgcatttagctcaatcccctacag

SEQ ID NO: 27405 - DNA, 924 bp, Macaca Mulatta
  misc_feature (1)...(924): n = A,T,C or G
atccgcacaaagggggctaacacaaaggttttntacacaccccccctccctggggaaaattttattgggttttcccatcccgggggcctgttattttgtgatatggctttttccccaactttgtgggcgagaaactcctttttaaattgaaatttccccacaccagtgtcactttcccaaagaaaattccctcagggggggtggggttttaaaataaagaatttttggagggctcccgccctgggggatttttcttgttttgtgtgtggagtaaccgctcaaagggaccttttcaggaaattcccnnnnnnnnnnnnnnnnnnnaaaaaacggtttgggtcccccctcctcgggcgttttttttaggtggccgggggaatcccaaagcaaattggttctgaaacacgtttttttcctggggaaagcaggttatgacccaattttcactttaccctaattgggccccgcgcggccaaacagaatgggtctaggaaagcttcttggagggcccgaggcggccgacnnnnnnnnnnnnnnnnngagaagattttaatataattattntttnatntttntcatccaaaatgtgtttattgagatggtttcccactcatcttgattcagagtgcctttagtgctgcttcctcctaaaggaacatccttctgtaagccttgcttttcctcctgtaggctggcagaggacagtggagcagccaacacacaaaactaccgtttgtgcatggctaaagaccgtggtgattttatagcatcctgggcatttcacatccatgaagtaggaattggggctctgcaccaggcgtttcttcttgtgtttcctcttctcctcttctggggagggatgaaggagatcctttgcgagaggcatgttctcgtgtgggtaggtcgtcaccgccggaaaagccc

SEQ ID NO: 27406 - DNA, 496 bp, Macaca Mulatta
ggttcctacaaacttgatgacttttgagtagaagcctgagaaaaaaagaggtgaactattgcttctatgtgagcatggggacctgataaaagagcgccagctataaaccatcctgtgccaggaagagcccagcggctctgtctcagtctttggaattctgaaccaaaaaagcactaatttcagggaatgaattgagatattcccagagaacaaattggagttgcagaacaaactgccatgaaccatgcttcttatctcagaactgacctgtggaaaccactgccttaaaagaatgaaaggaaaaccaacatgaaacaccaaatagtgtgtgtgaatcttctggcggtgctgtgcttggaatagatcgtagctaatttgcatttcttttaactttgtaataattttagaggggggaattgccttttttagatatactttaaaaaggaaaaacgtattcttgcggattccatcaggagctggttttgaaccgaggtga

SEQ ID NO: 27407 - DNA, 491 bp, Macaca Mulatta
gataaggaaaatttgtagttgccttttctctttggtctcaagtgtcttgattgctcttactcatgcatattgtctttattagtaaaatagtaaaatttaacattttttgcattacattaatattaagactttcttttgatgacagatgaccaagataactctcctgtgaaaccctgttacctcaatatcttggaagatgagcaacctttaaatagtgcttcccataaggactcacctgctactgttgattcaactgcagagcctaaccctttgccgttaccgttacctgaaatggaacctttagtgcctagagtcaaagaagttaaatctgctcaggaaactcctgaaagctctctggctggaagtcctgatactgaatctccagtgttagtgaatgactatgtacgtatcatttacatttccaaatatttttacttttcatttctgtgcgtatttctacaggtttcagattagcattcgcagcatgtaaa

SEQ ID NO: 27408 - DNA, 1054 bp, Macaca Mulatta
aataaaatcttcagctttgatttgtaagaatgtatgtttgtcgtttctagtgctatagactatgtgatacctaaaacagggtttactgtaagctgtgttccctcttttatacaaatgaagaagttgcaaagaatactcattgcagcagccttcctcattatcagaaattaaagaaatttctgaataaattggcagaagaacgcagacagaagaaggaaacttaagatgtgcaagaagatttaatgatttcaaagaaaataatggttcttcgtttttaatgttaaccttttttaaatacaatactgatagttagaagaaaactattgtactcttttgttttagtggagaaataatagatgtctgttcatgtgttaagtgttatagcaaaaaaaaaatacacatggttaagttaatgaatagtttttgttttatcaaaatggcaacggacagaaatactttgtagagattgacttcctaagctacttaagacaacttgcaccactaagaaagaaatgtagaaccatttggaaaaatgaaatttagtagttccaagtttcaaagaaatgtcaacattttattccattcaataaagaacaaaaccaatagtatttttattactttcatctgaaacattccatgttttaatctgagccttgcagactttgatttggagtttgaacctgttttggttgcatttcatttttggagaacttcattaacgtgagattggcgattcaaatgcaggtgcagttttctgttaatgtcatgctgttgtttaggtaataagaaatattaagtaattgggctttagaattttgtaatttttttccctgaggtccctggctagattttcgaattctaggagtccatggatttttcagggaaaggtaaaacttttcccgctcccctttggaccctattaactttttgaggatcttaacggctttgtcccctggaaatcccgtaaagtggcaatactttcgcggggataaagccaaattttgaattttttgagaggtggttttaacccgggcccgccaatattttcagagag

SEQ ID NO: 27409 - DNA, 884 bp, Macaca Mulatta
gacaggggtcctggtacgtctcaccaggaaattctgtttatgttcttgtagcagagagaaataaaactccttgaaaccagctcaggctactgccactcgggcagcctgtgggtccttttggtgtagggaaagccctggcaggagcatgtcctattcccggacgcatgcaggaccccacaggagtgtgtcctattcccaggtgcatgcagggcccccgcaggagcgtgtactacccccggatgcatgcagggccccacagctgtgtgtcctattcccggatgcatgcagggccccacaggagcgtgtcctattcccggacacatgcaggaccccacaggagcatgtcctacccccagatgcatgcagggccccacagctgtgtgtcctatccccagatgcatgcagggccccacaggagtgtgtcctattcccggacgcatgcaggaccccacaggagagtgtcctatccccggacgcatgcagggccccacaggaacgtgtactaccccaggacgcatgcaggaccccacagaagagtgtcctatccccggacgcatgcagggccccacaggagcttatactgccccaggatgcatgcagagcccccatgcaggcagcctgcagaccacactctgcctggccttgagccatgacctcccggaagagaccccactggaattttatttctctcaggtgcatgtcacatcagtaacaacagtttctatgtttgggaatggctttttaaaatcatatttacctgtgaatcaaaacaaattcaagaatgcagtatctgcaaacctgcctgctgatactgcagtttttgtttacaagaataattagcaatactgagtgaaggatgttggccaaaagctgctttccacggc

SEQ ID NO: 27410 - DNA, 172 bp, Macaca Mulatta
aggatcaggtcatccagctgatgaacgcaatcttcagcaagaagaactttgagtccctctccgaagccttcagcgtggcctctgcggctgctgtactttcccataatcgctaccacgtgccggttgtggttgtgcccgagggctctgcttccgacactcaagaacaggctat

SEQ ID NO: 27411 - DNA, 225 bp, Macaca Mulatta
  misc_feature (1)...(225): n = A,T,C or G
tggagtgcgccctcctgctcgcgtgcgccctcccgggcgggggttcgggcccgccgaggggcccggcggaactggggcgcgtggcnnnnnnnnnnnnncgcgcccctcacgcgcgatgtcaccttttcttttgcaggcgctccagctgtgctgcctctgctgtgcgtcggtcgccgcggccttagccagtgacagcagcagcggcgccagcggattaaatgatgn

SEQ ID NO: 27412 - DNA, 288 bp, Macaca Mulatta
  misc_feature (1)...(288): n = A,T,C or G
cgccatcttggctccggatcgtgcgtgaggcggattcggtgagagccggaaccgggcgggcagagggatactcggagggtgggaggacgcctgctgcttggctgcagcggccggcaggaccctggaagcgaccgtggctatggaaacggccaaggctgtcttggaatagcctgaggagccctccgagtcgagcctctgcccccgtttctgagtgacctgggttgatatggatcgaccnngtgggcagcgagagtcacattccagacagcaagcaggatggagcactac

SEQ ID NO: 27413 - DNA, 108 bp, Macaca Mulatta
gagacccaggatgcacaatggcagcgagctttggattatcttagtgccatctcagagcttaactatatgacccagattgtcatcatgctttatgaggacaacacacag

SEQ ID NO: 27414 - DNA, 1187 bp, Macaca Mulatta
  misc_feature (1)...(1187): n = A,T,C or G
aggtttgtggttaccgtctaagacttcattttgatggttatttaagttgctatgatttttggaccaatgctggttcccctgacattcatccagtaggatggtgtgaaaagaccaaacatgaattgcacatccctaagggtnnnnnnnnnnnnnnnnnnnnnnnnnnnnnnnnnnnnnnnnnnnnnnnnnnnnnnnnnnnnnnnnnnnnnnnnnnnnnnnnnnnnnnnnnnnnnnnnnnnnnnnnnnnnnnnnnnnnnnnnnnnnnnnnnnnnnnnnnnnnnnnnnnnnnnnnnnnnnnnnnnnnnnnnnnnnnnnnnnnnnnnnnnnnnnnnnnnnnnnnnnnnnnnnnnnnnnnnnnnnnnnnnnnnnnnnnnnnnnnnnnnnnnnnnnnnnnnnnnnnnnnnnnnnnnnnnnnnnnnnnnnnnnnnnnnnnnnnnnnnnnnnnnnnnnnnnnnnnnnnnnnnnnnnnnnnnnnnnnnnnnnnnnnnnnnnnnnnnnnnnnnnnnnnnnnnnnnnnnnnnnnnnnnnnnnnnnnnnnnnnnnnnnngaggttgcctcatggttttctgccaaatatgaaacttgaagttgtggataaacggaaccccaggttaattcgtgttgctacgattgtagatgttgatgaccaaagagtaaaggtnaggttcattttgatggttgggaccataagtatgactactgggtggaggcagacagccctgacatccacccgatcggatggtgtgatgtcacagggcatccactggaagtgccgcagcgnnnnnnnnnnnnnnnnnnnnnnnnnnnnnnnnnnnnnnnnnnnnnnnnnnnnnnnnnnnnnnnnnnnnnnnnnnnnnnnnnnnnnnnnnnnnnnnnnnncagtgcttttggctgcccgtattcagacatgaacttgaaaaaggaggcaacacttcatgatcgtttgagagaacaaacacaggcaaatttggaatcagactcttcacattcgaaatctaaaaacctctgtagtttgaacttcaatggaaaacatgaaaaggtgaacagtcaacccagnnnnnnnnnnnnnnnnnnnnnnnnnnnnnnnnnnnnnnnnnnnnnnnnnnnnnnnnnnnnnnnnnnnnnnnnnnnncggtggctcacgcctgtaatcccagcactttgggaggccaaggtgggcagatcac

SEQ ID NO: 27415 - DNA, 842 bp, Macaca Mulatta
gaacgcgccgcagaaggggtcctggtgacgagtgccgcgttcgctcactgagtccactcgccagcccgccgccctctgccgccgcaccctgcacacccgcccctcttctgtgccaggaacttgctaccaccagcaccatgccctaccaatatccagcgctgaccccggagcagaagaaggagctgtctgacatcgctcaccgcatcgtggcacctggcaagggcatcctggctgcagatgagtccactgggagcattgccaagaggctgcagtccattggcaccgagaacaccgaggagaaccggcgcttctaccgccagctgctgctgacagctgacgaccgcgtgaacccctgcattgggggtgtcatcctcttccacgagacactctaccagaaggcggatgatggtcgtcccttcccccaagttataaaatccaagggcggtgttgtgggcatcaaggtagacaagggcgtggttcccctggcagggacaaatggcgagactaccacccaagggttggatgggctgtctgagcgctgtgcccagtacaagaaggatggagctgactttgccaagtggcgttgtgtgctgaaaattggggaacacaccccctcagccctcgccatcatggaaaatgccaatgtcctggcccgttatgccagcatctgccagcagaatggcattgtgcccatcgtggagcctgagatcctccctgatggggaccatgacttgaagcgctgccagtatgtgaccgagaaagtgctggctgctgtctacaaggttctgagccaccaccaattctacctggaaagcaccttgctgaacccaatttggtcaccc

SEQ ID NO: 27416 - DNA, 551 bp, Macaca Mulatta
  misc_feature (1)...(551): n = A,T,C or G
ggacactgccttaggaaaaccacgagaggtgtttcgacttcctacagatttgacagcatgtgacaaccgtctttgtgcatctatccatttcacatcttctacctgggttaccttgtcagatggaactggaagattgtatgtcattggaacaggtgaacgtggaaatagcgcttctgaaaaatgggagnnnnnnnnnnnnnnnnnnnnnnnnnnnnnnnnnnnnnnnnnnnnnnnnnnnnnnnnnnnnnnnnnnnnnnnnnnnnnnnnnnnnnnnnnnnnnnnnnnnnnnnnnnnnnnnnnnnnnnnnnnnnnnnnnnnnnnnnnnnnnnnnnnnnnnnnnnnnnnnnnnnnnnnnnnnnnnnnnnnnnnnnnnnnnnnnnnnnnnnnnnnnnnnnnnnnnnnnnnnnnnnnnnnnnnnnnnnnnnnnnnnnnnnnnnnnnnnnnnnnnnnnnnnnnnnnnnnnnnnnnnnnnnnnnnnnnnnnnnnnnnnnnnnnnnnnnnnnnnnnnnnnnnnnnaaatatggatgaagacatgtcagagaaaatcaaag

SEQ ID NO: 27417 - DNA, 657 bp, Macaca Mulatta
ttcaactcttactgaacataagataattcatactggagagaagccctataaatgtgaagaatgtggcaaagcctttagccaatcctcaaccctaactagacataagaggatgcacactggggagaaaccctacaaatgtgaagaatgtggcaaagcttttaatcgatcctcaaagcttactacacataagataattcatactggagagaaaccttacaagtgtgaagaatgtggcaaagcatttatatcatcctcaacccttactggacataagagaattcatactagagagaaaccctacaaatgtgaagaatgtggcaaagcatttagccaatcctcaaccctaactagacataagaggatgcacactggagagaaaccctacaaatgtgaagaatgtggcaaagcctttaaagagtcctcagctcttactaaacataagataattcacactggagagaaaccctacaaatgtgaaaaatgtggcaaagcctttaaccagtcttcaatccttactaaccataagaaaattcatactagagagaaaccctacacatgtaaagaatgtgggaaatcttttaaccggtcctcaacctttactaaacataaggtaattcatactggagtaaaactctacaaatgtgaagaatgtggcaa

SEQ ID NO: 27418 - DNA, 563 bp, Macaca Mulatta
  misc_feature (1)...(563): n = A,T,C or G
ttagggtcactcatctaagaaagataacttggcagtcaatgcagttgctttacaagatcacattttacgtgatcttcaacttcgaaatctttcagttgcagatcattctaagacacaggtacaaaagaaagagaacaaatctctaaaaagagatacaaaggcaataatagatactggacttaaaaaaactatgcagtgccccaaactagaagattcagaaaaagaatatgttcttgatcccaaaccaccaccattgactttggnnnnnnnnnnnnnnnnnnnnnnnnnnnnnnnnnnnnnnnnnnnnnnnnnnnnnnnnnnnnnnnnnnnnnnnnnnnnnnnnnnnnnnnnnnnnnnnnnnnnnnnnnnnnnnnnnnnnnnnnnnnnnnnnnnnnnnnnnnnnnnnnnnnnnnnnnnnnnnnnnnnnnnnnnnnnnnnncatgtcttcaggcttttgaaaagttcacaaacaagaaaacgtgtcctctctgtagaaagaaccagtatcaaacccgagtgatacacgatggggctcgcctgttcagaataaagtgtgtgaccag

SEQ ID NO: 27419 - DNA, 3522 bp, Macaca Mulatta
  misc_feature (1)...(3522): n = A,T,C or G
gacaataatggccgctttcaaggtgtggattttggctccttgagcctgtctaagcgaggggtggcagcgccggcgccccaaaatccgggacagaagggtcccaagagtcgcgcttggtgannnnnnnnnnnnnnnnnnnnnnnnnnnnnnnnnnnnnnnnnnnnnnnnnnnnnnnnnnnnnnnnnnnnnnnnnnnnnnnnnnnnnnnnnnnnnnnnnnnnnnnnnnnnnnnnnnnnnnnnnnnnnnnnnnnnnnnnnnnnnnnnnnnnnnnnnnnnnnnnnnnnnnnnnnnnnnnnnnnnnnnnnnnnnnnnnnnnnnnnnnnnnnnnnnnnnnnnnnnnnnnnnnnnnnnnnnnnnnnnnnnnnnnnnnnnnnnnnnnnnnnnnnnnnnnnnnnnnnnnnnnnnnnnnnnnnnnnnnnnnnnnnnnnnnnnnnnnnnnnnnnnnnnnnnnnnnnnnnnnnnnnnnnnnnnnnnnnnnnnnnnnnnnnnnnnnnnnnnnnnnnnnnnnnnnnnnnnnnnnnnnnnnnnnnnnnnnnnnnnnnnnnnnnnnnnnnnnnnnnnnnnnnnnnnnnnnnnnnnnnnnnnnnnnnnnnnnnnnnnnnnnnnnnnnnnnnnnnnnnnnnnnnnnnnnnnnnnnnnnnnnnnnnnnnnnnnnnnnnnnnnnnnnnnnnnnnnnnnnnnnnnnnnnnnnnnnnnnnnnnnnnnnnnnnnnnnnnnnnnnnnnnnnnnnnnnnnnnnnnnnnnnnnnnnnnnnnnnnnnnnnnnnnnnnnnnnnnnnnnnnnnnnnnnnnnnnnnnnnnnnnnnnnnnnnnnnnnnnnnnnnnnnnnnnnnnnnnnnnnnnnnnnnnnnnnnnnnnnnnnnnnnnnnnnnnnnnnnnnnnnnnnnnnnnnnnnnnnnnnnnnnnnnnnnnnnnnnnnnnnnnnnnnnnnnnnnnnnnnnnnnnnnnnnnnnnnnnnnnnnnnnnnnnnnnnnnnnnnnnnnnnnnnnnnnnnnnnnnnnnnnnnnnnnnnnnnnnnnnnnnnnnnnnnnnnnnnnnnnnnnnnnnnnnnnnnnnnnnnnnnnnnnnnnnnnnnnnnnnnnnnnnnnnnnnnnnnnnngcaagccgatcgggattggtacatgatggacgagggctatgatgagttccacaacccactggcctactcctctgaggactatgtgaggaggcgggagcagcacctgcataaacagaagcagaagcgcatttcagctcagcggagacagatcaatgagnnnnnnnnnnnnnnnnnnnnnnnnnnnnnnnnnnnnnnnnnnggtccatcggctggaggtggaccaggattttgaagagaacaatgcagccaaggtgcatctgatggtgcacaatctggtgcctccctttctggatgggcgcattgtcttcaccaagcagnnnnnnnnnnnnnnnnnnnnnnnnnnnnnnnnnnnnnnnnnnnnnnnnnnnnnnnnnnnnnnnnnnnnnnnnnnnnnnnnnnnnnnnnnnnnnnnnnnnnnnnnnnnnnnnnnnnnnnnnnnnnnnnnnnnnnnnnnnnnnnnnnnnnnnnnnnnnnnnnnnnnnnnnnnnnnnnnnnnnnnnnnnnnnnnnnnnnnnnnnnnnnnnnnnnnnnnnnnnnnnnnnnnnnnnnnnnnnnnnnnnnnnnnnnnnnnnnnnnnnnnnnnnnnnnnnnnnnnnnnnnnnnnnnnnnnnnnnnnnnnnnnnnnnnnnnnnnnnnnnnnnnnnnnnnnnnnnnnnnnnnnnnnnnnnnnnnnnnnnnnnnnnnnnnnnnnnnnnnnnnnnnnnnnnnnnnnnnnnnnnnnnnnnnnnnnnnnnnnnnnnnnnnnnnnnnnnnnnnnnnnnnnnnnnnnnnnnnnnnnnnnnnnnnnnnnnnnnnnnnnnnnnnnnnnnnnnnnnnnnnnnnnnnnnnnnnnnnnnnnnnnnnnnnnnnnnnnnnnnnnnnnnnnnnnnnnnnnnnnnnnnnnnnnnnnnnnnnnnnnnnnnnnnnnnnnnnnnnnnnnnnnnnnnnnnnnnnnnnnnnnnnnnnnnnnnnnnnnnnnnnnnnnnnnnnnnnnnnnnnnnnnnnnnnnnnnnnnnnnnnnnnnnnnnnnnnnnnnnnnnnnnnnnnnnnnnnnnnnnnnnnnnnnnnnnnnnnnnnnnnnnnnnnnnnnnnnnnnnnnnnnnnnnnnnnnnnnnnnnnnnnnnnnnnnnnnnnnnnnnnnnnnnnnnnnnnnnnnnnnnnnnnnnnnnnnnnnnnnnnnnnnnnnnnnnnnnnnnnnnnnnnnnnnnnnnnnnnnnnnnnnnnnnnnnnnnnnnnnnnnnnnnnnnnnnnnnnnnnnnnnnnnnnnnnnnnnnnnnnnnnnnnnnnnnnnnnnnnnnnnnnnnnnnnnnnnnnnnnnnnnnnnnnnnnnnnnnnnnnnnnnnnnnnnnnnnnnnnnnnnnnnnnnnnnnnnnnnnnnnnnnnnnnnnnnnnnnnnnnnnnnnnnnnnnnnnnnnnnnnnnnnnnnnnnnnnnnnnnnnnnnnnnnnnnnnnnnnnnnnnnnnnnnnnnnnnnnnnnnnnnnnnnnnnnnnnnnnnnnnnnnnnnnnnnnnnnnnnnnnnnnnnnnnnnnnnnnnnnnnnnnnnnnnnnnnnnnnnnnnnnnnnnnnnnnnnnnnnnnnnnnnnnnnnnnnnnnnnnnnnnnnnnnnnnnnnnnnnnnnnnnnnnnnnnnnnnnnnnnnnnnnnnnnnnnnnnnnnnnnnnnnnnnnnnnnnnnnnnnnnnnnnnnnnnnnnnnnnnnnnnnnnnnnnnnnnnnnnnnnnnnnnnnnnnnnnnnnnnnnnnnnnnnnnnnnnnnnnnnnnnnnnnnnnnnnnnnnnnnnnnnnnnnnnnnnnnnnnnnnnnnnnnnnnnnnnnnnnnnnnnnnnnnnnnnnnnnnagctctggacctcggggccctggacaacacaggtgnaggtggtctgaccactaccgggcggctgatggtggagttcccgctggaccctgccctgtccaagatgctcatcgtgtccnnnnnnnnnnnnnnnnnnnnnnnnnnnnnnnnnnnnnnnnnnnnnnnnnnnnnnnnnnnnnnnnnnnnnnnnnnnnnnnnnnnnnnnnnnnnnnnnnnnnnnnnnnnnnnnnnnnnnnnnnnnnnnnnnnnnnnnnnnnnnnnnnnnnnnnnnnnnnnnnnnnnnnnnnnnnnnnnnnnnnnnnnnnnnnnnnnnnnnnnnnnnnnnnnnnnnnnnnnnnnnnnnnnnnnnnnnnnnnnnnnnnnnnnnnnnnnnnnnnnnnnnnnnnnnnnnnnnnnnnnnnnnnnnnnnnnnnnnnnnnnnnnnnnnnnnnnnnnnnnnnnnnnnnnnnnnnnnnnnnnnnnnnnnnnnnnnnnnnnnnnnnnnnagggaatcggggagtacgtgaacatccgcacggggatgcctttccacttgcaccccaccagctccctttttggaatgggctacaccccggattacatagtgtaaaaaaaattggtcatgaccaccaag

SEQ ID NO: 27420 - DNA, 763 bp, Macaca Mulatta
  misc_feature (1)...(763): n = A,T,C or G
taaaagtaggtatttaatccagttaccattttcttcattggaattagagatttcgttcgtgtagtggaacgacatgatcatcagcatattgaatttgaacataaaaatgagcaaataggtcatcaaatccatattgtagcataataggaggatcttagttcccagtacactgacattctggaagatcactgattaattttacactgcataacttctaggagtattacttgatgttattagatattggccttattatagggaaggtaaagttacattttcactttctttcattctcttcgaagttcttcatgatgatcaaagtggtcttatttagtaagtattatggtttatcctacaacagtgagactgacagccacaggcagaagtttgccttataacttcattcttatacttcagagcttcagaaaatactgccttgctgcctgtggggtcctatcctatttggagttgagatcctatcttctcaccctctaaatattaaatttganagaattatgaataaatatggtcacagacctgtcccanaatatttgtgagtactttactctcttgttctagaatctcatcattcataattggagtcaacagtgtacagattgacattcggtcattgccatttattagctaagttatttttattctcaaggcgtcactcttctcatgtggtcagtgggtaggaactctatccccactacacatcacagacggtaatgagaccgtgcgtggcagaactcatcctggg

SEQ ID NO: 27421 - DNA, 4633 bp, Macaca Mulatta
  misc_feature (1)...(4633): n = A,T,C or G
tacccgggaatgtctcggcgaaagcagcggaaaccccaacagttaatctcggactgcgaaggtcccagcgcgtctgagaacggtnnnnnnnnnnnnnnnnnnnnnnnnnnnnnnnnnnnnnnnnnnnnnnnnnnnnnnnnnnnnnnnnnnnnnnnnnnnnnnnnnnnnnnnnnnnnnnnnnnnnnnnnnnnnnnnnnnnnnnnnnnnnnnnnnnnnnnnnnnnnnnnnnnnnnnnnnnnnnnnnnnnnnnnnnnnnnnnnnnnnnnnnnnnnnnnnnnnnnnnnnnnnnnnnnnnnnnnnnnnnnnnnnnnnnnnnnnnnnnnnnnnnnnnnnnnnnnnnnnnnnnnnnnnnnnnnnnnnnnnnnnnnnnnnnnnnnnnnnnnnnnnnnnnnnnnnnnnnnnnnnnnnnnnnnnnnnnnnnnnnnnnnnnnnnnnnnnnnnnnnnnnnnnnnnnnnnnnnnnnnnnnnnnnnnnnnnnnnnnnnnnnnnnnnnnnnnnnnnnnnnnnnnnnnnnnnnnnnnnnnnnnnnnnnnnnnnnnnnnnnnnnnnnnnnnnnnnnnnnnnnnnnnnnnnnnnnnnnnnnnnnnnnnnnnnnnnnnnnnnnnnnnnnnnnnnnnnnnnnnnnnnnnnnnnnnnnnnnnnnnnnnnnnnnnnnnnnnnnnnnnnnnnnnnnnnnnnnnnnnnnnnnnnnnnnnnnnnnnnnnnnnnnnnnnnnnnnnnnnnnnnnnnnnnnnnnnnnnnnnnnnnnnnnnnnnnnnnnnnnnnnnnnnnnnnnnnnnnnnnnnnnnnnnnnnnnnnnnnnnnnnnnnnnnnnnnnnnnnnnnnnnnnnnnnnnnnnnnnnnnnnnnnnnnnnnnnnnnnnnnnnnnnnnnnnnnnnnnnnnnnnnnnnnnnnnnnnnnnnnnnnnnnnnnnnnnnnnnnnnnnnnnnnnnnnnnnnnnnnnnnnnnnnnnnnnnnnnnnnnnnnnnnnnnnnnnnnnnnnnnnnnnnnnnnnnnnnnnnnnnnnnnnnnnnnnnnnnnnnnnnnnnnnnnnnnnnnnnnnnnnnnnnnnnnnnnnnnnnnnnnnnnnnnnnnnnnnnnnnnnnnnnnnnnnnnnnnnnnnnnnnnnnnnnnnnnnnnnnnnnnnnnnnnnnnnnnnnnnnnnnnnnnnnnnnnnnnnnnnnnnnnnnnnnnnnnnnnnnnnnnnnnnnnnnnnnnnnnnnnnnnnnnnnnnnnnnnnnnnnnnnnnnnnnnnnnnnnnnnnnnnnnnnnnnnnnnnnnnnnnnnnnnnnnnnnnnnnnnnnnnnnnnnnnnnnnnnnnnnnnnnnnnnnnnnnnnnnnnnnnnnnnnnnnnnnnnnnnnnnnnnnnnnnnnnnnnnnnnnnnnnnnnnnnnnnnnnnnnnnnnnnnnnnnnnnnnnnnnnnnnnnnnnnnnnnnnnnnnnnnnnnnnnnnnnnnnnnnnnnnnnnnnnnnnnnnnnnnnnnnnnnnnnnnnnnnnnnnnnnnnnnnnnnnnnnnnnnnnnnnnnnnnnnnnnnnnnnnnnnnnnnnnnnnnnnnnnnnnnnnnnnnnnnnnnnnnnnnnnnnnnnnnnnnnnnnnnnnnnnnnnnnnnnnnnnnnnnnnnnnnnnnnnnnnnnnnnnnnnnnnnnnnnnnnnnnnnnnnnnnnnnnnnnnnnnnnnnnnnnnnnnnnnnnnnnnnnnnnnnnnnnnnnnnnnnnnnnnnnnnnnnnnnnnnnnnnnnnnnnnnnnnnnnnnnnnnnnnnnnnnnnnnnnnnnnnnnnnnnnnnnnnnnnnnnnnnnnnnnnnnnnnnnnnnnnnnnnnnnnnnnnnnnnnnnnnnnnnnnnnnnnnnnnnnnnnnnnnnnnnnnnnnnnnnnnnnnnnnnnnnnnnnnnnnnnnnnnnnnnnnnnnnnnnnnnnnnnnnnnnnnnnnnnnnnnnnnnnnnnnnnnnnnnnnnnnnnnnnnnnnnnnnnnnnnnnnnnnnnnnnnnnnnnnnnnnnnnnnnnnnnnnnnnnnnnnnnnnnnnnnnnnnnnnnnnnnnnnnnnnnnnnnnnnnnnnnnnnnnnnnnnnnnnnnnnnnnnnnnnnnnnnnnnnnnnnnnnnnnnnnnnnnnnnnnnnnnnnnnnnnnnnnnnnnnnnnnnnnnnnnnnnnnnnnnnnnnnnnnnnnnnnnnnnnnnnnnnnnnnnnnnnnnnnnnnnnnnnnnnnnnnnnnnnnnnnnnnnnnnnnnnnnnnnnnnnnnnnnnnnnnnnnnnnnnnnnnnnnnnnnnnnnnnnnnnnnnnnnnnnnnnnnnnnnnnnnnnnnnnnnnnnnnnnnnnnnnnnnnnnnnnnnnnnnnnnnnnnnnnnnnnnnnnnnnnnnnnnnnnnnnnnnnnnnnnnnnnnnnnnnnnnnnnnnnnnnnnnnnnnnnnnnnnnnnnnnnnnnnnnnnnnnnnnnnnnnnnnnnnnnnnnnnnnnnnnnnnnnnnnnnnnnnnnnnnnnnnnnnnnnnnnnnnnnnnnnnnnnnnnnnnnnnnnnnnnnnnnnnnnnnnnnnnnnnnnnnnnnnnnnnnnnnnnnnnnnnnnnnnnnnnnnnnnnnnnnnnnnnnnnnnnnnnnnnnnnnnnnnnnnnnnnnnnnnnnnnnnnnnnnnnnnnnnnnnnnnnnnnnnnnnnnnnnnnnnnnnnnnnnnnnnnnnnnnnnnnnnnnnnnnnnnnnnnnnnnnnnnnnnnnnnnnnnnnnnnnnnnnnnnnnnnnnnnnnnnnnnnnnnnnnnnnnnnnnnnnnnnnnnnnnnnnnnnnnnnnnnnnnnnnnnnnnnnnnnnnnnnnnnnnnnnnnnnnnnnnnnnnnnnnnnnnnnnnnnnnnnnnnnnnnnnnnnnnnnnnnnnnnnnnnnnnnnnnnnnnnnnnnnnnnnnnnnnnnnnnnnnnnnnnnnnnnnnnnnnnnnnnnnnnnnnnnnnnnnnnnnnnnnnnnnnnnnnnnnnnnnnnnnnnnnnnnnnnnnnnnnnnnnnnnnnnnnnnnnnnnnnnnnnnnnnnnnnnnnnnnnnnnnnnnnnnnnnnnnnncaccatcccatgagcctgtttttctgtacctgctgctctttgtcccacagagcagaaacaccttcacaaaaggacctcccagatttatgagccctgattttgtctttttctctaagttcttaacatatgtccctagtggcttttctctagtccctgagcttggaaattactgtgcttacaaggggatggccccctaaggaatttttcttacctcgtcattctttgtacctgaggaaaatagattctctgcagctttctcaagaggaaccctctccagcttccctggtgtgacccttctttcccctcctctttcctctccctttccctttggcaggtgcacctgagcacctacatttggaattgcagcctagcccaaagggctggcagctgtctctgagggcccagtgtcactcctctggggtgacttttctgctcagctggtgggtgtgggtcccctatctttctagaaccagtatgtggcattcctgtcaagtggcctgcccatgaagccctggaattccagctccacctccactaccactccaagcctggccccaccagtgctgtttggcctaggaactgtggctgggaaggtgcctccaacaatgggatccagggaagccaacgagaagacagctcccctcctatttcagcctcctgcannnnnnnnnnnnnnnnnnnnnnnnnnnnnnnnnnnnnnnnnnnnnnnnnnnnnnnnnnnnnnnnnnnnnnnnnnnnnnnnnnnnnnnnnnnnnnnnnnnnnnnnnnnnnnnnnnnnnnnnnnnnnnnnnnnnnnnnnnnnnnnnnnnnnnnnnnnnnnnnnnnnnnnnnnnnnnnnnnnnnnnnnnnnnnnnnnnnnnnnnnnnnnnnnnnnnnnnnnnnnnnnnnnnnnnnnnnnnnnnnnnnnnnnnnnnnnnnnnnnnnnnnnnnnnnnnnnnnnnnnnnnnnnnnnnnnnnnnnnnnnnnnnnnnnnnnnnnnnnnnnnnnnnnnnnnnnnnnnnnnnnnnnnnnnnnnnnnnnnnnnnnnnnnnnnnnnnnnnnnnnnnnnnnnnnnnnnnnnnnnnnnnnnnnnnnnnnnnnnnnnnnnnnnnnnnnnnnnnnnnnnnnnnnnnnnnnnnnnnnnnnnnnnnnnnnnnnnnnnnnnnnnnnnnnnnnnnnnnnnnnnnnnnnnnnnnnnnnnnnnnnnnnnnnnnnnnnnnnnnnnnnnnnnnnnnnnnnnnnnnnnnnnnnnnnnnnnnnnnnnnnnnnnnnnnnnnnnnnnnnnnnnnnnnnnnnnnnnnnnnnnnnnnnnnnnnnnnnnnnnnnnnnnnnnnnnnnnnnnnnnnnnnnnnnnnnnnnnnnnnnnnnnnnnnnnnnnnnnnnnnnnnnnnnnnnnnnnnnnnnnncctccctgcctctctgtcttgtaatgagatgtagtatttactcttaacataggatcatttggaacaggagttctgaggaggagagagtgaggattttgctattgactgacttgaacgatggcttctcctcaagctgtaggctccagagcttcctcacctagtaaaatgtcaacaacagacaggggagatattagtgtctttccctctatcattaaaggtgttttaaccaa

SEQ ID NO: 27422 - DNA, 932 bp, Macaca Mulatta
  misc_feature (1)...(932): n = A,T,C or G
agaactacgagcagagcttcaggaccagtcgctgtgtggattttgtggccatgtacacctcttcgtgctgtttgcgtcttctggaacatctttgcttacacctgctggactgaagctgccgcttcctccctgagggctgaggccccgagtggggganggggaggnaaaagcagcacccacagggagcgcctgtgaggttttttctcatcaccagctcagctaggccaggcaggcgaggacagaagactccgggctgctgtaatgtttgtgtttagatttggacagacagtggagacccttttctgaaaggcacctggtggaggagttaatgtggctgctgtcatttttctaggctgctctgatgacatcgggccagggtgaaggtctggggtgggctgtgtgagtggccctccctcacctgggctgggcttgttccatggggccaggggtgccccctcgctgctgtggattgagcagcagcttcttcctcatcctctaccctcagagaccctaagagacatgggaaggcctgagggttgttgcagctaggcatggcccctctctagctcagagataattgcaggccatgtggtgtctcctcgacacctgctgggtctggagctccagtaaaaagagggcctactggacatgtcagctgtgacctggctgaaaccagggtgccttcttgggctggttggtgggcactggggcatgatctgttgtgcctgggttgggtagagccagggacgctgtaggctctaggcccccttttgcgctgggggtacccagtgagagggacccaagtagggggaataaacttcattccaagttccaccctggagaagacagacccaggaccaacttcagacttctccctccctttcttccaggatgtggcatctcacaccagtgacccagcctccatgtccagc

SEQ ID NO: 27423 - DNA, 2921 bp, Macaca Mulatta
  misc_feature (1)...(2921): n = A,T,C or G
caggataccttctcagtggctgtctccttcctgacgggccgaatcgtctacatttcggagcaggcagctgtcctgctgcgttgcaagcgggacgtgttccggggtacccgcttctccgagctcctggctccccaggatgtgggagtcttctatggttccactgctccatctcgcctgcccacctggggcacaggggcctcagcaggtncaggttcaggcctcagggactttacccaggagaagtctgtcttctgccgtatcagnnnnnnnnnnnnnnnnnnnnnnnnnnnnnnnnnnnnnnnnnnnnnnnnnnnnnnnnnnnnnnnnnnnnnnnnnnnnnnnnnnnnnnnnnnnnnnnnnnnnnnnnnnnnnnnnnnnnnnnnnnnnnnnnnnnnnnnnnnnnnnnnnnnnnnnnnnnnnnnnnnnnnnnnnnnnnnnnnnnnnnnnnnnnnnnnnnnnnnnnnnnnnnnnnnnnnnnnnnnnnnnnnnnnnnnnnnnnnnnnnnnnnnnnnnnnnnnnnnnnnnnnnnnnnnnnnnnnnnnnnnnnnnnnnnnnnnnnnnnnnnnnnnnnnnnnnnnnnnnnnnnnnnnnnnnnctgcagttggcgggccagccctttgaccactcccccatccgcttctgtgcccgcaacggggagtatgtcaccatggacaccagttgggctggctttgtgcatccctggagccgcaaggtagccttcgtgttgggccgccacaaagtacgcacnnnnnnnnnnnnnnnnnnnnnnnnnnnnnnnnnnnnnnnnnnnnnnnnnnnnnnnnnnnnnnnnnnnnnnnnnnnnnnnnnnnnnnnnnnnnnnnnnnnnnnnnnnnnnnnnnnnnnnnnnnnnnnnnnnnnnnnnnnnnnnnnnnnnnnnnnnnnnnnnnnnnnnnnnnnnnnnnnnnnnnnnnnnnnnnnnnnnnnnnnnnnnnnnnnnnnnnnnnnnnnnnnnnnnnnnnnnnnnnnnnnnnnnnnnnnnnnnnnnnnnnnnnnnnnnnnnnnnnnnnnnnnnnnnnnnnnnnnnnnnnnnnnnnnnnnnnnnnnnnnnnnnnnnnnnnnnnnnnnnnnnnnnnnnnnnnnnnnnnnnnnnnnnnnnnnnnnnnnnnnnnnnnnnnnnnnnnnnnnnnnnnnnnnnnnnnnnnnnnnnnnnnnnnnnnnnnnnnnnnnnnnnnnnnnnnnnnnnnnnnnnnnnnnnnnnnnnnnnnnnnnnnnnnnnnnnnnnnnnnnnnnnnnnnnnnnnnnnnnnnnnnnnnnnnnnnnnnnnnnnnnnnnnnnnnnnnnnnnnnnnnnnnnnnnnnnnnnnnnnnnnnnnnnnnnnnnnnnnnnnnnnnnnnnnnnnnnnnnnnnnnnnnnnnnnnnnnnnnnnnnnnnnnnnnnnnnnnnnnnnnnnnnnnnnnnnnnnnnnnnnnnnnnnnnnnnnnnnnnnnnnnnnnnnnnnnnnnnnnnnnnnnnnnnnnnnnnnnnnnnnnnnnnnnnnnnnnnnnnnnnnnnnnnnnnnnnnnnnnnnnnnnnnnnnnnnnnnnnnnnnnnnnnnnnnnnnnnnnnnnnnnnnnnnnnnnnnnnnnnnnnnnnnnnnnnnnnnnnnnnnnnnnnnnnnnnnnnnnnnnnnnnnnnnnnnnnnnnnnnnnnnnnnnnnnnnnnnnnnnnnnnnnnnnnnnnnnnnnnnnnnnnnnnnnnnnnnnnnnnnnnnnnnnnnnnnnnnnnnnnnnnnnnnnnnnnnnnnnnnnnnnnnnnnnnnnnnnnnnnnnnnnnnnnnnnnnnnnnnnnnnnnnnnnnnnnnnnnnnnnnnnnnnnnnnnnnnnnnnnnnnnnnnnnnnnnnnnnnnnnnnnnnnnnnnnnnnnnnnnnnnnnnnnnnnnnnnnnnnnnnnnnnnnnnnnnnnnnnnnnnnnnnnnnnnnnnnnnnnnnnnnnnnnnnnnnnnnnnnnnnnnnnnnnnnnnnnnnnnnnnnnnnnnnnnnnnnnnnnnnnnnnnnnnnnnnnnnnnnnnnnnnnnnnnnnnnnnnnnnnnnnnnnnnnnnnnnnnnnnnnnnnnnnnnnnnnnnnnnnnnnnnnnnnnnnnnnnnnnnnnnnnnnnnnnnnnnnnnnnnnnnnnnnnnnnnnnnnnnnnnnnnnnnnnnnnnnnnnnnnnnnnnnnnnnnnnnnnnnnnnnnnnnnnnnnnnnnnnnnnnnnnnnnnnnnnnnnnnnnnnnnnnnnnnnnnnnnnnnnnnnnnnnnnnnnnnnnnnnnnnnnnnnnnnnnnnnnnnnnnnnnnnnnnnnnnnnnnnnnnnnnnnnnnnnnnnnnnnnnnnnnnnnnnnnnnnnnnnnnnnnnnnnnnnnnnnnnnnnnnnnnnnnnnnnnnnnnnnnnnnnnnnnnnnnnnnnnnnnnnnnnnnnnnnnnnnnnnnnnnnnnnnnnnnnnnnnnnnnnnnnnnnnnnnnnnnnnnnnnnnnnnnnnnnnnnnnnnnnnnnnnnnnnnnnnnnnnnnnnnnnnnnnnnnnnnnnnnnnnnnnnnnnnnnnnnnnnnnnnnnnnnnnnnnnnnnnnnnnnnnnnnnnnnnnnnnnnnnnnnnnnnnnnnnnnnnnnnnnnnnnnnnnnnnnnnnnnnnnnnnnnnnnnnnnnnnnnnnnnnnnnnnnnnnnnnnnnnnnnnnnnnnnnnnnnnnnnnnnnnnnnnnnnnnnnnnnnnnnnnnnnnnnnnnnnnnnnnnnnnnnnnnnnnnnnnnnnnnnnnnnnnnnnnnnnnnnnnnnnnnnnnnnnnnnnnnnnnnnnnnnnnnnnnnnnnnnnnnnnnnnnnnnnnnnnnnnnncagggacatgacctctgtgctgaagcaggatcgggagcgcctccgagccatgcagaggcagcagccccggttttctgaggaccagcggcgggaactgggcgctgtgcactccggggt

SEQ ID NO: 27424 - DNA, 386 bp, Macaca Mulatta
atatggcgtggcacagacatcccgtcggactgcactgcaaagcagtccccatctgcacagtagctgatccaccagctttactgatccacattgctccaggctccatgaaatactacgacacgtcctctggtagatccctctagtttctcactgttctgtgcttctgcctgtctgcccgcatccgtatgagtgatgtacttgtaggaaattatgcagacggaactggcattctcaacatccctcctttagggcaaattctgtgccatgatcgtgagtaggacagtaggattgtgcagagtagctggatttcagggggaagttaatgggtctgagagagggagggtcagagaagccaggatttctcaaaagggacttagaatgaaaac

SEQ ID NO: 27425 - DNA, 867 bp, Macaca Mulatta
gctgcttgctctcaggactttttgcaattgttttattggccaggcaggacaaaaactcatgatgtcccagagggaatcactgatgtcccatgcaatagaactgaaatcagggagcaataagaacattcacattgctctggctacattggccctgaactattctgtttgttttcataaagaccataacattgaagggaaagctcagtgtttgtcactaattagcacaatcttggaagtagtacaagacttagaagccacttttagacttcttgtggctcttggaacacttatcagtgatgattcaaatgctgtacaattagccaagtctttaggtgttgattctcaaataaaaaagtattcctcagtatcagaaccagctaaagtaagtgaatgctgtagatttatcctaaatttgctgtagcagtggggaagggggatggatatttttaattgattagtgtttttttcctcacatttgacatgactgataacagatgattaaaaaagaaaatactgtggattaagtaaaattttacatcttgtaaagtggtggggaggggaaacaaagaaataaaatttttgcactgctgaactgtgagattttcctgtgtaatttgggtaggttttcaagagtatgaaaacaaatttaaaaagagctataatcagcaacaacacaatgacaatgacatcttccccttaccttagccactaaggagaagataagggctgttactcatataatttgcttttattatgtacaccaaactgttaattgttgtcaattatcttttatttaacttctccatcttcattgctaggtttttcaaacagcactgatacatttaaaggtcttgttttagggtaact

SEQ ID NO: 27426 - DNA, 2230 bp, Macaca Mulatta
  misc_feature (1)...(2230): n = A,T,C or G
gatgacaatgaaaaccaagcagcgcatgttaacagaagactgggagctttttaaacaaagaagattcattgaagaacagnnnnnnnnnnnnnnnnnnnnnnnnnnnnnnnnnnnnnnnnnnnnnnnnnnnnnnnnnnnnnnnnnnnnnnnnnnnnnnnnnnnnnnnnnnnnnnnnnnnnnnnnnnnnnnnnnnnnnnnnnnnnnnnnnnnnnnnnnnnnnnnnnnnnnnnnnnnnnnnnnnnnnnnnnnnnnnnnnnnnnnnnnnnnnnnnnnnnnnnnnnnnnnnnnnnnnnnnnnnnnnnnnnnnnnnnnnnnnnnnnnnnnnnnnnnnnnnnnnnnnnnnnnnnnnnnnnnnnnnnnnnnnnnnnnnnnnnnnnnnnnnnnnnnnnnnnnnnnnnnnnnnnnnnnnnnnnnnnnnnnnnnnnnnnnnnnnnnnnnnnnnnnnnnnnnnnnnnnnnnnnnnnnnnnnnnnnnnnnnnnnnnnnnnnnnnnnnnnnnnnnnnnnnnnnnnnnnnnnnnnnnnnnnnnnnnnnnnnnnnnnnnnnnnnnnnnnnnnnnnnnnnnnnnnnnnnnnnnnnnnnnnnnnngtctcctcagataagcagtaccagtagtagttcctcagaagctgatgatgaagaagcagacggcgagagtagtggggagcccccaggggtcccgaaggaagatggagtgctgagaagcaggagtcccaggacagaggagagcaaagcagacagtccacccccatcctacccaacacagcaggnnnnnnnnnnnnnnnnnnnnnnnnnnnnnnnnnnnnnnnnnnnnnnnnnnnnnnnnnnnnnnnnnnnnnnnnnnnnnnnnnnnnnnnnnnnnnnnnnnnnnnnnnnnnnnnnnnnnnnnnnnnnnnnnnnnnnnnnnnnnnnnnnnnnnnnnnnnnnnnnnnnnnnnnnnnnnnnnnnnnnnnnnnnnnnnnnnnnnnnnnnnnnnnnnnnnnnnnnnnnnnnnnnnnnnnnnnnnnnnnnnnnnnnnnnnnnnnnnnnnnnnnnnnnnnnnnnnnnnnnnnnnnnnnnnnnnnnnnnnnnnnnnnnnnnnnnnnnnnnnnnnnnnnnnnnnnnnnnnnnnnnnnnnnnnnnnnnnnnnnnnnnnnnnnnnnnnnnnnnnnnnnnnnnnnnnnnnnnnnnnnnnnnnnnnnnnnnnnnnnnnnnnnnnnnnnnnnnnnnnnnnnnnnnnnnnnnnnnnnnnnnnnnnnnnnnnnnnnnnnnnnnnnnnnnnnnnnnnnnnnnnnnnnnnnnnnnnnnnnnnnnnnnnnnnnnnnnnnnnnnnnnnnnnnnnnnnnnnnnnnnnnnnnnnnnnnnnnnnnnnnnnnnnnnnnnnnnnnnnnnnnnnnnnnnnnnnnnnnnnnnnnnnnnnnnnnnnnnnnnnnnnnnnnnnnnnnnnnnnnnnnnnnnnnnnnnnnnnnnnnnnnnnnnnnnnnnnnnnnnnnnnnnnnnnnnnnnnnnnnnnnnnnnnnnnnnnnnnnnnnnnnnnnnnnnnnnnnnnnnnnnnnnnnnnnnnnnnnnnnnnnnnnnnnnnnnnnnnnnnnnnnnnnnnnnnnnnnnnnnnnnnnnnnnnnnnnnnnnnnnnnnnnnnnnnnnnnnnnnnnnnnnnnnnnnnnnnnnnnnnnnnnnnnnnnnnnnnnnnnnnnnnnnnnnnnnnnnnnnnnnnnnnnnnnnnnnnnnnnnnnnnnnnnnnnnnnnnnnnnnnnnnnnnnnnnnnnnnnnnnnnnnnnnnnnnnnnnnnnnnnnnnnnnnnnnnnnnnnnnnnnnnnnnnnnnnnnnnnnnnnnnnnnnnnnnnnnnnnnnnnnnnnnnnnnnnnnnnnnnnnnnnnnnnnnnnnnnnnnnnnnnnnnnnnnnnnnnnnnnnnnnnnnnnnnnnnnnnnnnnnnnnnnnnnnnnnnnnnnnnnnnnnnnnnnnnnnnnnnnnnnnnnnnnnnnnnnnnnnnnnnnnnnnnnnnnnnnnnnnnnnnnnnnnnnnnnnnnnnnnnnnnnnnnnnnnnnnnnnnnnnnnnnnnnnnnnnnnnnnnnnnnnnnnnnnnnnnnnnnnnnnnnnnnnnnnnnnnnnnnnnnnnnnnnnnnntggaggatttattgcagtttataaacaagctctgaaaccaaaccagtgagcagcacgcgtgcagcaaagcgggcaaggcataagcaaaggaaggcaagtgacaggtctcagcacctggaggtgccag

SEQ ID NO: 27427 - DNA, 1441 bp, Macaca Mulatta
  misc_feature (1)...(1441): n = A,T,C or G
tgagtgagtaaacatcggtggatacctgccgctcgctctcggggcgtggaggctggatggggtttcctggagggggaagagcggggaggccggcaccgggattcacagagcaatttgtaagggtaaatgaatgggctgacgatcttactttggcgtgtcaaggcaagccccagtctcaagctnnnnnnnnnnnnnnnnnnnnnnnnnnnnnnnnnnnnnnnnnnnnnnnnnnnnnnnnnnnnnnnnnnnnnnnnnnnnnnnnnnnnnnnnnnnnnnnnnnnnnnnnnnnnnnnnnnnnnnnnnnnnnnnnnnnnnnnnnnnnnnnnnnnnnnnnnnnnnnnnnnnnnnnnnnnnnnnnnnnnnnnnnnnnnnnnnnnnnnnnnnnnnnnnnnnnnnnnnnnnnnnnnnnnnnnnnnnnnnnnnnnnnnnnnnnnnnnnnnnnnnnnnnnnnnnnnnnnnnnnnnnnnnnnnnnnnnnnnnnnnnnnnnnnnnnnnnnnnnnnnnnnnnnnnnnnnnnnnnnnnnnnnnnnnnnnnnnnnnnnnnnnnnnnnnnnnnnnnnnnnnnnnnnnnnnnnnnnnnnnnnnnnnnnnnnnnnnnnnnnnnnnnnnnnnnnnnnnnnnnnnnnnnnnnnnnnnnnnnnnnnnnnnnnnnnnnnnnnnnnnnnnnnnnnnnnnnnnnnnnnnnnnnnnnnnnnnnnnnnnnnnnnnnnnnnnnnnnnnnnnnnnnnnnnnnnnnnnnnnnnnnnnnnnnnnnnnnnnnnnnnnnnnnnnnnnnnnnnnnnnnnnnnnnnnnnnnnnnnnnnnnnnnnnnnnnnnnnnnnnnnnnnnnnnnnnnnnnnnnnnnnnnnnnnnnnnnnnnnnnnnnnnnnnnnnnnnnnnnnnnnnnnnnnnnnnnnnnnnnnnnnnnnnnnnnnnnnnnnnnnnnnnnnnnnnnnnnnnnnnnnnnnnnnnnnnnnnnnnnnnnnnnnnnnnnnnnnnnnnnnnnnnnnnnnnnnnnnnnnnnnnnnnnnnnnnnnnnnnnnnnnnnnnnnnnnnnnnnnnnnnnnnnnnnnnnnnnnnnnnnnnnnnnnnnnnnnnnnnnnnnnnnnnnnnnnnnnnnnnnnnnnnnnnnnnnnnnnnnnnnnnnnnnnnnnnnnnnnnnnnnnnnnnnnnnnnnnnnnnnnnnnnnnnnnnnnnnnnnnnnnnnnnnnnnnnnnnnnnnnnnnnnnnnnnnaggtgtttattggcgtaaactgtctgagcacagacttttcctcacaaaagggggtgaagggtgtcccactgaacctgcagattgatacctatgactgtggctcgggcactgagnnnnnnnnnnnnnnnnnnnnnnnnnnnnnnnnnnnnnnnnnnnnnagggagctgagaggaagatgcgcgatgacgaacggaaccagttccggaggaaggtcaagtgccctgactc

SEQ ID NO: 27428 - DNA, 284 bp, Macaca Mulatta
agtccaacctaaggtgactgtgtatcctgcaaagacccagcccctgcagcaccacaccctcctggtctgctctgtgaacggtttctatccaggaagcattgaagtcaggtggttccggaacggtcaggaagagaaggctggggtggtgtccacaggcctgatccagaatggagactggaccttccagaccctggtgatgctggaaacagttccccggagtggagaggtttacacctgccaagtggagcacccaagcgtgaccagccctctcacagtgcaatgga

SEQ ID NO: 27429 - DNA, 514 bp, Macaca Mulatta
aaccagttgactttctttggctaattttactttgcatgatatgccttaatatgccttcataaataaccattttaagtcataatttgtccttaagctgcttttttcttctattaattggatcgtagtaaagagtagtcaatagggtcttcagctattagttatagaagtgattaaaaccaacaagaggtttcatgtgcaaaggagataaagaatgaatataaagattgctatctgggtggctcttattaaattgtgtatttcgtgtttatcactacacatattccccaaatgcttacatgggagtttgaggttagtatattcacttcctaggtgttagtactctattcacatgcttattgtaaccttcctcatttcacagataaggaatctctggggattaaccaacctcctttctgtaatggtaatcattaaaatgagtcctattgacaaaggtcagatgaacccctagaatgtattacccaatctgttttttcccccaagaagataaaggacc

SEQ ID NO: 27430 - DNA, 684 bp, Macaca Mulatta
  misc_feature (1)...(684): n = A,T,C or G
tatcagtgcttcaaatcggcctggatgtttgaggtgtttcataggggcttctcatttcctgtcaactataaaagcttaaagactgccttgcaagtttatgacaaggaggttcagtggacccttggagccatcctctacaggacccgctttctaccattaagnnnnnnnnnnnnnnnnnnnnnnnnnnnnnnnnnnnnnnnnnnnnnnnnnnnnnnnnnnnnnnnnnnnnnnnnnnnnnnnnnnnnnnnnnnnnnnnnnnnnnnnnnnnnnnnnnnnnnnnnnnnnnnnnnnnnnnnnnnnnnnnnnnnnnnnnnnnnnnnnnnnnnnnnnnnnnnnnnnnnnnnnnnnnnnnnnnnnnnnnnnnnnnnnnnnnnnnnnnnnnnnnnnnnnnnnnnnnnnnnnnnnnnnnnnnnnnnnnnnnnnnnnnnnnnnnnnnnnnnnnnnnnnnnnnnnnnnnnnnnnnnnnnnnnnnnnnnnnnnnnnnnnnnnnnnnnnnnnnnnnnnnnnnnnnnnnnnnaggccgggcgcggtggctcacgcctgtaatcccagcactttgggaggcctaggcgggcggatcacgaggtcaggagatcgagaccatcctggctaacacggtgaaaccccgtctctactaaaaatgcaaaaaattagccgggcgaggcggcgggcggctgtagtccc

SEQ ID NO: 27431 - DNA, 197 bp, Macaca Mulatta
atttatttgcgacaacaagacaaaacagcaagtatcaatcaaaatgtccgtattgccaagatgtcactcattgacctggcaggatctgagcgagcaagtactaccggtgctaaggggacccgatttgtagaaggcacgaatattaatagatcccttttagctcttgggaatgtcatcaatgccttagcagattcaaa

SEQ ID NO: 27432 - DNA, 2021 bp, Macaca Mulatta
  misc_feature (1)...(2021): n = A,T,C or G
agatatcaacgaatgccgtcaccccggtacctgccctgatgggagatgcgtcaattccctcggctcctacacttgtctggcctgtgaggagggctaccggggccagagtgggagctgtgtagnnnnnnnnnnnnnnnnnnnnnnnnnnnnnnnnnnnnnnnnnnnnnnnnnnnnnnnnnnnnnnnnnnnnnnnnnnnnnnnnnnnnnnnnnnnnnnnnnnnnnnnnnnnnnnnnnnnnnnnnnnnnnnnnnnnnnnnnnnnnnnnnnnnnnnnnnnnnnnnnnnnnnnnnnnnnnnnnnnnnnnnnnnnnnnnnnnnnnnnnnnnnnnnnnnnnnnnnnnnnnnnnnnnnnnnnnnnnnnnnnnnnnnnnnnnnnnnnnnnnnnnnnnnnnnnnnnnnnnnnnnnnnnnnnnnnnnnnnnnnnnnnnnnnnnnnnnnnnnnnnnnnnnnnnnnnnnnnnnnnnnnnnnnnnnnnnnnnnnnnnnnnnnnnnnnnnnnnnnnnnnnnnnnnnnnnnnnnnnnnnnnnnnnnnnnnnnnnnnnnnnnnnnnnnnnnnnnnnnnnnnnnnnnnnnnnnnnnnnnnnnnnnnnnnnnnnnnnnnnnnnnnnnnnnnnnnnnnnnnnnnnnnnnnnnnnnnnnnnnnnnnnnnnnnnnnnnnnnnnnnnnnnnnnnnnnnnnnnnnnnnnnnnnnnnnnnnnnnnnnnnnnnnnnnnnnnnnnnnnnnnnnnnnnnnnnnnnnnnnnnnnnnnnnnnnnnnnnnnnnnnnnnnnnnnnnnnnnnnnnnnnnnnnnnnnnnnnnnnnnnnnnnnnnnnnnnnnnnnnnnnnnnnnnnnnnnnnnnnnnnnnnnnnnnnnnnnnnnnnnnnnnnnnnnnnnnnnnnnnnnnnnnnnnnnnnnnnnnnnnnnnnnnnnnnnnnnnnnnnnnnnnnnnnnnnnnnnnnnnnnnnnnnnnnnnnnnnnnnnnnnnnnnnnnnnnnnnnnnnnnnnnnnnnnnnnnnnnnnnnnnnnnnnnnnnnnnnnnnnnnnnnnnnnnnnnnnnnnnnnnnnnnnnnnnnnnnnnnnnnnnnnnnnnnnnnnnnnnnnnnnnnnnnnnnnnnnnnnnnnnnnnnnnnnnnnnnnnnnnnnnnnnnnnnnnnnnnnnnnnnnnnnnnnnnnnnnnnnnnnnnnnnnnnnnnnnnnnnnnnnnnnnnnnnnnnnnnnnnnnnnnnnnnnnnnnnnnnnnnnnnnnnnnnnnnnnnnnnnnnnnnnnnnnnnnnnnnnnnnnnnnnnnnnnnnnnnnnnnnnnnnnnnnnnnnnnnnnnnnnnnnnnnnnnnnnnnnnnnnnnnnnnnnnnnnnnnnnnnnnnnnnnnnnnnnnnnnnnnnnnnnnnnnnnnnnnnnnnnnnnnnnnnnnnnnnnnnnnnnnnnnnnnnnnnnnnnnnnnnnnnnnnnnnnnnnnnnnnnnnnnnnnnnnnnnnnnnnnnnnnnnnnnnnnnnnnnnnnnnnnnnnnnnnnnnnnnnnnnnnnnnnnnnnnnnnnnnnnnnnnnnnnnnnnnnnnnnnnnnnnnnnnnnnnnnnnnnnnnnnnnnnnnnnnnnnnnnnnnnnnnnnnnnnnnnnnnnnnnnnnnnnnnnnnnnnnnnnnnnnnnnnnnnnnnnnnnnnnnnnnnnnnnnnnnnnnnnnnnnnnnnnnnnnnnnnnnnnnnnnnnnnnnnnnnnnnnnnnnnnnnnnnnnnnnnnnnnnnnnnnnnnnnnnnnnnnnnnnnnnnnnnnnnnnnnnnnnnnnnnnnnnnnnnnnnnnnnnnnnnnnnnnnnnnnnnnnnnnnnnnnnnnnnnnnnnnnnnnnnnnnnnnnnnnnnncctcagcctccttctctctctgattccctcctcccagaggccccagccggcttcgaagggcttcaggcagaggagtgcggcatcctgaacggctgtgagaatggccgctgtgtgcgcgtgcgggagggctacacctgcgactgttttgagggcttccagctggatgcggcccacatggcctgcgtag

SEQ ID NO: 27433 - DNA, 137 bp, Macaca Mulatta
ttgtcagtgtcatgatgtggccccttgctgtgtaccaccgactgtgggatcgagcatatgtgcggctgaagccagctctgcagcggctggacttcagtgtccgtggctacatgatgtccaagcagagagagagacaa

SEQ ID NO: 27434 - DNA, 96 bp, Macaca Mulatta
gattttctgccgcttaagtgtgatgcctgcttaggcatcttctgcgcagaccatgtggcctacgcccagcatcactgtggatctgcttaccaaaag

SEQ ID NO: 27435 - DNA, 292 bp, Macaca Mulatta
gactttactgcacaaggcaatgcttgatcagttgctttgaggctttgaaggaggctgtgtttccaaatccctctctggacatttttcttcactgttaatgcttctctcatcaaccttttaattatttttatctctttaattactgcaggcgagtttataccgaggtggctacagccgatttgccccctactgaagtgacgtgagacccctgcaaatgggacagccccccagttcatgaggcctggctattgcaatatttactagtagaggaactctatagcaagatgaagag

SEQ ID NO: 27436 - DNA, 365 bp, Macaca Mulatta
gaaaggaaggcaaagagtacaaataaaaaaggccaggcccagtaagtgtaccttgtattttcattataaactgcaagcagctcaaagttgtccttctaacctgttgtgtttatttcttggacttttggcattggtgggaagaagaaagctgaagtgaatcagagttctgaccttaaccagagggaactctgtgtccatacagtatccccagagaacttaagagctagggattccaaatggaagagacccagcactgccaggatggctctcttgcctctggaatgccaagcacacccaccccatccccaccagtggccctgagactttgtgacccacagtcaggatttccaagtgagtgggactgg

SEQ ID NO: 27437 - DNA, 424 bp, Macaca Mulatta
  misc_feature (1)...(424): n = A,T,C or G
ggaggagtccccaagccatgtgcatagcacacacatgcagtgcacacaaagaaatgacatggaaatagatgcaggcaggctggtccctgctgtgattaatgagtaactccaggtacaagtccgaccacaatggatgctgcaaaaacgttgactggggcaaaggnnnnnnnnnnnnnnnnnnnnnnnnnnnnnnnnnnnnnnnggggatgggaggtgatgtgtgtttttctccccttggttttcatttgctcaacacaaaagggacttttgtttactctatcatgaacaaaggaactgtccacatactgtaaaccatgagcagtgttgttgttttaaacagttatacagtatatttggtggtctctttgtctgtttttatttccagttggatcttctgggtttagttttgtctttaaaaagaatt

SEQ ID NO: 27438 - DNA, 94 bp, Macaca Mulatta
aggaataacattgccaaacgtcacgatgaatttgagagacatgctgaagggacctttaccagtgatgtaagttcttatttggaaggccaagctg

SEQ ID NO: 27439 - DNA, 2319 bp, Macaca Mulatta
  misc_feature (1)...(2319): n = A,T,C or G
ttgtgcgatctctggcctcttcaactgcatcaccatccaccctctgaacattgcggccggcgtgtggatgatnnnnnnnnnnnnnnnnnnnnnnnnnnnnnnnnnnnnnnnnnnnnnnnnnnnnnnnnnnnnnnnnnnnnnnnnnnnnnnnnnnnnnnnnnnnnnnnnnnnnnnnnnnnnnnnnnnnnnnnnnnnnnnnnnnnnnnnnnnnnnnnnnnnnnnnnnnnnnnnnnnnnnnnnnnnnnnnnnnnnnnnnnnnnnnnnnnnnnnnnnnnnnnnnnnnnnnnnnnnnnnnnnnnnnnnnnnggcgatgcgatctcctacgctaggatccagcagcagaggcagcaggcagatgaggagaagctcgcggagaccctggaggggtagctgtgaagggctgagcacccctccctccctgccccctcctctggctctgtgtgagtccaagtgaggcctggactgtccacactgaggcacagcctggagaggggcttctgcacctgcccctacacctggagtcctctgctcctttctccagacttgcttaagccaggagcccctggctgttggtgtgagagtctgggctgctggacttgaggcagagccgagcagagcctgcagcagctgtgtggacaccagctggccttgctcccccgctgggtgggtctgcagacctcacaccacagacagggctgccagtgacctgctgtgacctggcagcagcttcccctggagatgctggtcctggcttgaggggaggtgcaagtgggaccctgccacctgggcactgagcagagggacctcccccagctctcttggcaggtagagccccagggtccaggacagcctgccactgccagcaacctcccaccactgcttagggtgcagcgcccactgccaccccgccttctcaagaagcccatagggcccctaaggtgcatccctgtacctggaactgcagccttggcagtgaccggacagctgggtgggggatgctccctgccgactcctggaaccttggacaggccaccccaagacccctcagctgcccctgctccctgggcctgctaaggcccctaggttctgcccatcaccaccctccccggctggccttggtgctaaggaagtggggagagcaggctctccctggcctcactgagggtgcccaccctctccctggtgtggnnnnnnnnnnnnnnnnnnnnnnnnnnnnnnnnnnnnnnnnnnnnnnnnnnnnnnnnnnnnnnnnnnnnnnnnnnnnnnnnnnnnnnnnnnnnnnnnnnnnnnnnnnnnnnnnnnnnnnnnnnnnnnnnnnnnnnnnnnnnnnnnnnnnnnnnnnnnnnnnnnnnnnnnnnnnnnnnnnnnnnnnnnnnnnnnnnnnnnnnnnnnnnnnnnnnnnnnnnnnnnnnnnnnnnnnnnnnnnnnnnnnnnnnnnnnnnnnnnnnnnnnnnnnnnnnnnnnnnnnnnnnnnnnnnnnnnnnnnnnnnnnnnnnnnnnnnnnnnnnnnnnnnnnnnnnnnnnnnnnnnnnnnnnnnnnnnnnttggcagaagcggaagggtatggaagatattccatctgggtccgaccccaggctgggcctgtgctgagcttcgggagcagaggtactgggtcttgctaagtggactgtttcccaggaacgcctcttgggcccatctgcgtctgaggctgggagtggcnnnnnnnnnnnnnnnnnnntctgaggctgggagtggcaggctggagggctgagtgtggggttctttgggtcctgcccagtactgcccttaggacttgtctgtgggctcctgggtcagcagcaccccacccccgggagtctggccagctgagccccagggtggcaggggcattacagcctggtggacacgtgccttcagggttcctccggggccactttcctcaggccagtgctgggttcaaagggnnnnnnnnnnnnnnnnnnnnnnnnnnnnnnnnnnnnnnnnnnnnnnnnnnnnnnnnnnnnnnnnnnnnnnnnnnnnnnnnnnnnnnnnnnnnnnnnnnnnnnnnnnnnnnnnnnnnnnnnnnnnnnnnnnnnnnnnnnnnnnnnnnnnnnnnnnnnnnnnnnnnnnnnnnnnnnnnnnnnnnnnnnnnnnnnnnnnnnnnnnnnnnnnnngtgacagccagagacagcaggagaggggttggctgtggatcaatgaaggctgcccctgtgccctgtggggaaatggtgggtgcacggctggatgcagaggtggaaggccctcagccacaggccagagcgggcgggtcacctgtcccaggttcccagcaagtct

SEQ ID NO: 27440 - DNA, 1147 bp, Macaca Mulatta
  misc_feature (1)...(1147): n = A,T,C or G
ggattttatgcgacaagcaggtgaagtaacctatgcggatgcccacaaggaacgaacaaatgagggtgtaattgagtttcgctcctactctgacatgaagcgtgctttggacaaactggatggcacagaaataaatggcagaaatattaggcttattgaagataagccacgcacaagccataggcgatcttactctggaagcagatccaggtnaggtctcgatctagaagacggtcacgaagtnnnnnnnnnnnnnnnnnnnnnnnnnnnnnnnnnnnnnnnnnnnnnnnnnnnnnnnnnnnnnnnnnnnnnnnnnnnnnnnnnnnnnnnnnnnnnnnnnnnnnnnnnnnnnnnnnnnnnnnnnnnnnnnnnnnnnnnnnnnnnnnnnnnnnnnnnnnnnnnnnnnnnnnnnnnnnnnnnnnnnnnnnnnnnnnnnnnnnnnnnnnnnnnnnnnnnnnnnnnnnnnnnnnnnnnnnnnnnnnnnnnnnnnnnnnnnnnnnnnnnnnnnnnnnnnnnnnnnnnnnnnnnnnnnnnnnnnnnnnnnnnnnnnnnnnnnnnnnnnnnnnnnnnnnnnnnnnnnnnnnnnnnnnnnnnnnnnnnnnnnnnnnnnnnnnnnnnnnnnnnnnnnnnnnnnnnnnnnnnnnnnnnnnnnnnnnnnnnnnnnnnnnnnnnnnnnnnnnnnnnnnnnnnnnnnnnnnnnnnnnnnnnnnnnnnnnnnnnnnnnnnnnnnnnnnnnnnnnnnnnnnnnnnnnnnnnnnnnnnnnnnnnnnnnnnnnnnnnnnnnnnnnnnnnnnnnnnnnnnnnnnnnnnnnnnnnnnnnnnnnnnnnnnnnnnnnnnnnnaccctgtcccttctttgtagaattaagataactttgattttatagcttntgagctaaaataacttttgtaaagagtaagctcatttannnnnnnnnnnnnnnnnnnnnnnnnnnnnnnnnnnnnnnnnnagtatttcagcaggatctgctggcaggnnnnnnnnnnnnnnnnnnnnnnnnnnnnnnnaattaactgtttcaagctttgaatacttaagactttagagggagaacccaattttcaattatgttggctttttataaagcttgagttatgtaagatttaaataaaactttgctaccaag

SEQ ID NO: 27441 - DNA, 751 bp, Macaca Mulatta
ggggtactgagcactggcccttacgcttccatttccacccaccccatctccctggaaatgtgttccagcccaagcagcctccgtcggctttagatcctgtggttgctagatccagtcctttctaataccctgagtcaacacattactcctgcaggtcttacgctacaatgcaggtcccttgagggccaataacatggaggtgggcaatttctaggactgtccccagtacatctcaccacccacagcccttttttgccttgatttgagcctcaccctagccttttgggttgccctgcctgaggcagacctgaggaggggacagagcccagcctttctcctgtggctgagcaggcctctgtgtccatgacacctttttccgggcctgggggctgtgggtgtatgtcctccctgctggctccgctggcccctgctgcgtgacgctcttggaactcttccccaaggactcagtcccccaggcttatcagggaatccttttgtatctgcactttgggttttagtttcaaagctccatcaggtacagcttacatttcaggatgtgtagaaagctcaggtgagggctgccctggtttgtcatagctccaccttcctcggagggagagggctgttggagaccccccatccatggcacactagctcagcactgcatgtcccgagatgattcccaagacagctggtgcctcctggctttcctgcggcaggccaaggggcaccccagaggacgctggatcct

SEQ ID NO: 27442 - DNA, 253 bp, Macaca Mulatta
  misc_feature (1)...(253): n = A,T,C or G
cctgtttggcggccttttttcttgaaattcagcggctcgggacctggggtacctgctgtagtcacgagggacaagcggcagcctggtcggcagtgagtagcctgcaatattcggccgtggttacgatgnnnnnnnnnnnnnnnnnnnnnnnnnnnnnnnnnnnnnnnnnnnnnnnnnnnnnnnnnnnnnnnnntaagtggggaatggagtacaagggctatctggtatctgtagatggctacatgaacatgca

SEQ ID NO: 27443 - DNA, 331 bp, Macaca Mulatta
ggtagcttcataggagaagaaagaaatccccacgacctcaacccctgctgagattgtgtgctaggaacagtcttccctccatttcccctcaaacttgagccagcctctggatcgatgtgatcttgttgcacatttccatggggtgtacctatactttaagccaatcctgctgcattcactgctaagttaaataaaaagccaagaagattttgcatcatgcagatcctttgctatctgacttgcatctcttccctcacctgtcagctagccacctgcttgtttgtgttgggatattttttagcacctgaagcaccatctgaaaggggcacca

SEQ ID NO: 27444 - DNA, 75 bp, Macaca Mulatta
aggcctttcccctggtttgatctgaccgctgtgcaactcaaggaaactccatttagccagcatctctcaagcagt

SEQ ID NO: 27445 - DNA, 1669 bp, Macaca Mulatta
  misc_feature (1)...(1669): n = A,T,C or G
gtctgactccgagatagtgcgacttcagctgtgggatattgcaggnnnnnnnnnnnnnnnnnnnnnnnnnnnnnnnnnnnnnnnnnnnnnnnnnnnnnnnnnnnnnnnnnnnnnnnnnnnnnnnnnnnnnnnnnnnnnnnnnnnnnnnnnnnnnnnnnnnnnnnnnnnnnnnnnnnnnnnnnnnnnnnnnnnnnnnnnnnnnnnnnnnnnnnnnnnnnnnnnnnnnnnnnnnnnnnnnnnnnnnnnnnnnnnnnnnnnnnnnnnnnnnnnnnnnnnnnnnnnnnnnnnnnnnnnnnnnnnnnnnnnnnnnnnnnnnnnnnnnnnnnnnnnnnnnnnnnnnnnnnnngagtcctcattgaaaagatgatgagaaattccagagaagatatcatgtctttgtccacccaaggggactacatcaatctacaaaccaagtcctccagctggtcctgctgctagtagtgtttggcttgttttccatcccagttctgggaggtcttttaagtctcttccctttggttttccacctgacagttttaagtacatttgaattgtctcctgactactgtccagtaaggaggcccattgtcacttagaaaagacacctgggacctgtgtgcatttctgcatctcctggattagcctttgacgtgttgctggctcatgctagtgccagttagtgccttctgtgtaagatcatctcatcagccctcgatttgtgattcggaattttgtgagaaggattagaaatcagcacctgcgttttagagatgattctcacctacttttgagcttatttttccatttgatattcattgatatcatgacctccaattgagaggaaaatgagatcaaatgtcattccccaaatttcttgtgggccattgtttcagattctttctgtcttggaatgtaaacatctgattctggaatgcagaaggagggggtctggacatctacggatttttggctattagaagtgacccagaagtcactgtatttttgaaacttctaaagtcataattaagtttctcttgtcttggcatcaagaatagtcaagttttttggctgcacatggtggctcatgcctgtaatcctagcatttggggaggccaagacaggcagatcactagaggccaggagttcgagaccagcctggccagcatggcaaaaccccatctctactaaaagtacaaaaattagctgggcgtgatggcacgtgtctgtaatccctgtagctactctggagactgaggtgggagaatcgtttgagactgggagacagaggttgcagtgaaccgagatcatgccactgcacttcagcctgggtgacagagcaagactccatctcnnnnnnnnnnnnnnnnnnnnnntcatttttaaactacctatttcatgcaatgagagcattttcttccacaaagagcttaatcctcatgatagggttgtctagtgtctccgatttgcaggtttctgggtggatgtcttaatgcataatactgcaagtggcatcagttggctgtgatgcttcgaaataggtctgctcctcacagctttgggaatctaaatggaagaagaaaagggagaagttaacagcctccactggggcaagtttgtgagcacataggcacttagtcataggaaacatattacatgcaggccctagcct

SEQ ID NO: 27446 - DNA, 700 bp, Macaca Mulatta
  misc_feature (1)...(700): n = A,T,C or G
atataaacacaccacagnttactattatatatagnnnnnnnnnnnnnnnnnnnnnncannnnnnnnnnnnnnntggaatactcctcagccataaaaaggagtgaattaatggcatttgcagtgacctgggtaagattggagactattattctaagtgaaataactcaggaatggaaaatcaaacatcgctatgttctcactcataagtgggagctaagctatgaggatgcaaaggcataagaatgacacattggactttggggacccagggggacagggtgagaaggggataagggataaaagactacaaattgggtgcagtgtatactgctcaggtgatgggtgtaccaaaatctcaaatcaccactaaagaagttcaccaccaccacctgttccccaataacctatggaaagaaagaaatgtctcatgtttgtgcttaaattagtctttaatacttacctttagcgattctctgagtttggattataaaatagttttgctctttttgtattttctgttgtaagcctatatgattatgtaatggtgagtaaaattgctaggccagatatgcagttctaggaagttatgcaaagctgtgcttcagtgtattattttctacctttttaaagtcattttgagcttggcttttgagcctctgttttccaagatggggtttatgtctttgtcatgttacgctta

SEQ ID NO: 27447 - DNA, 9118 bp, Macaca Mulatta
  misc_feature (1)...(9118): n = A,T,C or G
gggccagtactgtgacatctgtacggctgcgaacagcaacagggcacaccccgcgagcaacgccatcgatggcacagagcgctggtggcagagcccgcccctgtcccgcggcctggagtacaacgaggtcaacgtcaccctggacctgggccaggnnnnnnnnnnnnnnnnnnnnnnnnnnnnnnnnnnnnnnnnnnnnnnnnnnnnnnnnnnnnnnnnnnnnnnnnnnnnnnnnnnnnncgcacctaccagccctggcagttctttgcccctccaagagggactgtctggagcggtttgggccacagactctggaacgcatcacacgggatgacgcggccatctgcaccaccgagtactcgcgcatcgtgaccctggagaatggagnagattgtggtgtccctggtgaatgggcgcccaggcgccatgaatttctcctactcgccgctgctgcgtgagttcaccaaggccactaacgtccgcctgcgcttcctgcgcaccaacacgctgctgggccacctcatggggaaggcgctgcgagaccccacggtcacccgccgnnnnnnnnnnnnnnnnnnnnnnnnnnnnnnnnnnnnnnnnnnnnnnnnnnnnnnnnnnnnnnnnnnnnnnnnnnnnnnnnnnnnnnnnnnnnnnnnnnnnnnnnnnnnnnnnnnnnnnnnnnnnnnnnnnnnnnnnnnnnnnnnnnnnnnnnnnnnnnnnnnnnnnnnnnnnnnnnnnnnnnnnnnnnnnnnnnnnnnnnnnnnnnnnnnnnnnnnnnnnnnnnnnnnnnnnnnnnnnnnnnnnnnnnnnnnnnnnnnnnnnnnnnnnnnnnnnnnnnnnnnnnnnnnnnnnnnnnnnnnnnnnnnnnnnnnnnnnnnnnnnnnnnnnnnnnnnnnnnnnnnnnnnnnnnnnnnnnnnnnnnnnnnnnnnnnnnnnnnnnnnnnnnnnnnnnnnnnnnnnnnnnnnnnnnnnnnnnnnnnnnnnctgcaactgcgagtccaacttcacggatggcacctgcgaggacctgacgggtcgctgctactgccggcccaacttctccggggagcggtgcgacgtgtgtgccgagggcttcacgggctttccaagttgctaccnnnnnnnnnnnnnnnnnnnnnnnnnnnnnnnnnnnnnnnnnnnnnnnnnnnnnnnnnnnnnnnnnnnnnnnnnnnnnnnnnnnnnnnnnnnnnnnnnnngccggaaggacccgagagtgggacgctgtgtgtgcaaacccaacttccaaggcacccattgtgagctctgcgtgccagggttctatggccccggctgccagcncctgccagtgttccagccctggagtgtccgatgaccgctgtgaccctgacacaggctggtgcaggtgccgagagggcttcgagggggccacatgtgatcgctgtgcccctggctacttccgattccctctctgccagtnnnnnnnnnnnnnnnnnnnnnnnnnnnnnnnnnnnnnnnnnnnnnnnnnnnnnnnnnnnnnnnnnnnnnnnnnnnnnnnnnnnnnnnnnnnnnnnnnnnnnnnnnnnnnnnnnnnnnnnnnnnnnnnnnnnnnnnnnnnnnnnnnnnnnnnnnnnnnnnnnnnnnnnnnnnnnnnnnnnnnnnnnnnnnnnnnnnnnnnnnnnnnnnnnnnnnnnnnnnnnnnnnnnnnnnnnnnnnnnnnnnnnnnnnnnnnnnnnnnnnnnnnnnnnnnnnnnnnnnnnnnnnnnnnnnnnnnnnnnnnnnnnnnnnnnnnnnnnnnnnnnnnnnnnnnnnnnnnnnnnnnnnnnnnnnnnnnnnnnnnnnnnnnnnnnnnnnnnnnnnnnnnnnnnnnnnnnnnnnnnnnnnnagctggctcttgccatcctgctggtctggctctggtggatcctgcccttcctgagnnnnnnnnnnnnnnnnnnnnnnnnnnnnnnnnnnnnnnnnnnnnnnnnnnnnnnnnnnnnnnnnnnnnnnnnnnnnnnnnnnnnnnnnnnnnnnnnnnnnnnnnnnnnnnnnnnnnnnnnnnnnnnnnnnnnnnnnnnnnnnnnnnnnnnnnnnnnnnnnnnnnnnnnnnnnnnnnnnnnnnnnnnnnnnnnnnnnnnnnnnnnnnnnnnnnnnnnnnnnnnnnnnnnnnnnnnnnnnnnnnnnnnnnnnnnnnnnnnnnnnnnctgccggtgtgacgctggcggtgccctggggcagagctgtgaaccgaggacgggtgcctgccgctgccgccccatttcccagggccccacctgcagcnngcctgtgagggaccactacctcccggacctgcaccacctgcgcctggagctggaggaggccgccacacctgagggtcacgctgtgcgctttggcttcaacccccttgagttcgagaacttcagctggaggggctacgcgcaaatggcacctgtccagnnnnnnnnnnnnnnnnnnnnnnnnnnnnnnnnnnnnnnnnnnnnnnnnnnnnnnnnnnnnnnnnnnnnnnnnnnnnnnnnnnnnnnnnnnnnnnnnnnnnnnnnnnnnnnnnnnnnnnnnnnnnnnnnnnnnnnnnnnnnnnnnnnnnnnnnnnnnnnnnnnnnnnnnnnnnnnnnnnnnnnnnnnnnnnnnnnnnnnnnnnnnnnnnnnnnnnnnnnnnnnnnnnnnnnnnnnnnnnnnnnnnnnnnnnnnnnnnnnnnnnnnnnnnnnnnnnnnnnnnnnnnnnnnnnnnnnnnnnnnnnnnnnnnnnnnnnnnnnnnnnnnnnnnnnnnnnnnnnnnnnnnnnnnnnnnnnnnnnnnnnnnnnnnnnnnnnnnnnnnnnnnnnnnnnnnnnnnnnnnnnnnnnnnnnnnnnnnnnnnnnnnnnnnnnnnnnnnnnnnnnnnnnnnnnnnnnnnnnnnnnnnnnnnnnnnnnnnnnnnnnnnnnnnnnnnnnnnnnnnnnnnnnnnnnnnnnnnnnnnnnnnnnnnnnnnnnnnnnnnnnnnnnnnnnnnnnnnnnnnnnnnnnnnnnnnnnnnnnnnnnnnnnnnnnnnnnnnnnnnnnnnnnnnnnnnnnnnnnnnnnnnnnnnnnnnnnnnnnnnnnnnnnnnnnnnnnnnnnnnnnnnnnnnnnnnnnnnnnnnnnnnnnnnnnnnnnnnnnnnacagcaccttgtgccggggcactgcccgggatacccaggaccgcctggccgtcttccacctggactcagaggccaacgtgaggctcacagctgagcaggcgcacttctacctnnnnnnnnnnnnnnnnnnnnnnnnnnnnnnnnnnnnnnnnnnnnnnnnnnnnnnnnnnnnnnnnnnnnnnnnnnnnnnnnnnnnnnnnnnnnnnncagtgccgcctgtctgccctcgcgcttcccaaagccgccccagcccatcatcctcagggactgccaggtgatcccgctgccgcccggtctcccgctgacccaggcacaggacctcatgccagccacgtccccaaccggaccccagcctcggccccccaccgccgtggaccctgatgtggagcccactttgctgcgtgagccccagnnnnnnnnnnnnnnnnnnnnnnnnnnnnnnnnnnnnnnnnnnnnnnnnnnnnnnnnnnnnnnnnnnnnnnnnnnnnnnnnnnnnnnnnnnnnnnnnnnnnnnnnnnnnnnnnnnnnnnnnnnnnnnnnnnnnnnnnnnnnnnnnnnnnnnnnnnnnnnnnnnnnnnnnnnnnnnnnnnnnnnnnnnnnnnnnnnnnnnnnnnnnnnnnnnnnnnnnnnnnnnnnnnnnnnnnnnnnnnnnnnnnnnnnnnnnnnnnnnnnnnnnnnnnnnnnnnnnnnnnnnnnnnnnnnnnnnnnnnnnnnnnnnnnnnnnnnnnnnnnnnnnnnnnnnnnnnnnnnnnnnnnnnnnnnnnnnnnnnnnnnnnnnnnnnnnnnnnnnnnagccccggcagctcatccctgttctgccgaaatgctgctgcctccctctccctcttctataacaacggagcccggccatgtggctgccacgaagtaggtgctacaggccccacgtgtgagcccttcgggggccagtgtccctgccgtgcccacgtcattggccgtgactgctcccgctgcgccaccggatactggggcttccccaactgcaggnnnnnnnnnnnnnnnnnnnnnnnnnnnnnnnnnnnnnnnnnnnnnnnnnnnnnnnnnnnnnnnnnnnnnnnnnnnnnnnnnnnnnnnnnnnnnnnnnnnnnnnnnnnnnnnnnnnnnnnnnnnnnnnnnnnnnnnnnnnnnnnnnnnnnnnnnnnnnnnnnnnnnnnnnnnnnnnnnnnnnnnnnnnnnnnnnnnnnnnnnnnnnnnnnnnnnnnnnnnnnnnnnnnnnnnnnnnnnnnnnnnnnnnnnnnnnnnnnnnnnnnnnnnnnnnnnnnnnnnnnnnnnnnnnnnnnnnnnnnnnnnnnnnnnnnnnnnnnnnnnnnnnnnnnnnnnnnnnnnnnnnnnnnnnnnnnnnnnnnnnnnnnnnnnnnnnnnnnnnnnnnnnnnnnnnnnnnnnnnnnnnnnnnnnnnnnnnnnnnnnnnnnnnnnnnnnnnnnnnnnnnnnnnnnnnnnnnnnnnnnnnnnnnnnnnnnnnnnnnnnnnnnnnnnnnnnnnnnnnnnnnnnnnnnnnnnnnnnnnnnnnnnnnnnnnnnnnnnnnnnnnnnnnnnnnnnnnnnnnnnnnnnnnnnnnnnnnnnnnnnnnnnnnnnnnnnnnnnnnnnnnnnnnnnnnnnnnnnnnnnnnnnnnnnnnnnnnnnnnnnnnnnnnnnnnnnnnnnnnnnnnnnnnnnnnnnnnnnnnnnnnnnnnnnnnnnnnnnnnnnnnnnnnnnnnnnnnnnnnnnnnnnnnnnnnnnnnnnnnnnnnnnnnnnnnnnnnnnnnnnnnnnnnnnnnnnnnnnnnnnnnnnnnnnnnnnnnnnnnnnnnnnnnnnnnnnnnnnnnnnnnnnnnnnnnnnnnnnnnnnnnnnnnnnnnnnnnnnnnnnnnnnnnnnnnnnnnnnnnnnnnnnnnnnnnnnnnnnnnnnnnnnnnnnnnnnnnnnnnnnnnnnnnnnnnnnnnnnnnnnnnnnnnnnnnnnnnnnnnnnnnnnnnnnnnnnnnnnnnnnnnnnnnnnnnnnnnnnnnnnnnnnnnnnnnnnnnnnnnnnnnnnnnnnnnnnnnnnnnnnnnnnnnnnnnnnnnnnnnnnnnnnnnnnnnnnnnnnnncaggaatgtgcccctggcttctatcgggacatcaaaggtctcttcctgggccgatgtgtcccttgtcagtgccacggacactcagaccgctgcctccctggctctggcatctgtgtgnnnnnnnnnnnnnnnnnnnnnnnnnnnnnnnnnnnnnnnnnnnnnnnnnnnnnnnnnnnnnnnnnnnnnnnnnnnnnnnnnnnnnnnnnnnnnnnnnnnnnnnnnnnnnnnnnnnnnnnnnnnnnnnnnnnnnnnnnnnnnnnnnnnnnnnnnnnnnnnnnnnnnnnnnnnnnnnnnnnnnnnnnnnnnnnnnnnnnnnnnnnnggtgtgcgcccggtttcttcgggaacccactggtgctgggcagctcctgccagccttgtgactgcagcggcaatggtgaccccaacctgctcttcagcgactgcgaccccctgacgggtgcctgccgtggctgcctgcgccacaccactgggccacgctgcgagatctgtgcccccggcttctatggcaacgcgctgctgcccggcannnnnnnnnnnnnnnnnnnnnnnnnnnnnnnnnnnnnnnnnnnnnnnnnnnnnnnnnnnnnnnnnnnnnnnnnnnnnnnnnnnnnnnnnnnnnnnnnnnnnnnnnnnnnnnnnnnnnnnnnnnnnnnnnnnnnnnnnnnnnnnnnnnnnnnnnnnnnnnnnnnnnnnnnnnnnnnnnnnnnnnnnnnnnnnnnnnnnnnnnnnnnnnnnnnnnnnnnnnnnnnnnnnnnnnnnnnnnnnnnnnnnnnnnnnnnnnnnnnnnnnnnnnnnnnnnnnnnnnnnnnnnnnnnnnnnnnnnnnnnnnnnnnnnnnnnnnnnnnnnnnnnnnnnnnnnnnnnnnnnnnnnnnnnnnnnnnnnnnnnnnnnnnnnnnnnnnnnnnnnnnnnnnnnnnnnnnnnnnnnnnnnnnnnnnnnnnnnnnnnnnnnnnnnnnnnnnnnngtgtgtgaccactgtgtggtcctgctcctggacgacctggaacgggccggcaccctcctccccgccatccgcgagcaactgcgtggcatcaatgccagctctgtggcctgggcccgtctgcacaggctgaacgcctccatcactgacctngcagagccagctccggggccccatgggcccccgccacgagacggcacagcagctggaggtgctggagcagcaaagcacaagccttgggcaggatgcacagcagctggacagccaggcagnnnnnnnnnnnnnnnnnnnnnnnnnnnnnnnnnnnnnnnnnnnnnnnnnnnnnnnnnnnnnnnnnnnnnnnnnnnnnnnnnnnnnnnnnnnnnnnnnnnnnnnnnnnnnngagctcatgtcccagaccggccacctggggctggccaatgcctcggctctgtcaggcgagcagctgcgccggacgctggccgaggtggagcggctgctctgggagatgcgggcccgggacctgggggccccgcgggcagnnnnnnnnnnnnnnnnnnnnnnnnnnnnnnnnnnnnnnnnnnnnnnnnnnnnnnnnnnnnnnnnnnnnnnnnnnnnnnnnnnnnnnnnnnnnnnnnnnnnnnnnnnnnnnnnnnnnnnnnnnnnnnnnnnnnnnnnnnnnnnnnnnnnnnnnnnnnnnnnnnnnnnnnnnnnnnnnnnnnnnnnnnnnnnnnnnnnnnnnnnnnnnnnnnnnnnnnnnnnnnnnnnnnnnnnnnnnnnnnnnnnnnnnnnnnnnnnnnnnnnnnnnnnnnnnnnnnnnnnnnnnnnnnnnnnnnnnnnnnnnnnnnnnnnnnnnnnnnnnnnnnnnnnnnnnnnnnnnnnnnnnnnnnnnnnnnnnnnnnnnnnnnnnnnnnnnnnnnnnnnnnnnnnnnnnnnnnnnnnnnnnnnnnnnnnnnnnnnnnnnnnnnnnnnnnnnnnnnnnnnnnnnnnnnnnnnnnnnnnnnnnnnnnnnnnnnnnnnnnnnnnnnnnnnnnnnnnnnnnnnnnnnnnnnnnnnnnnnnnnnnnnnnnnnnnnnnnnnnnnnnnnnnnnnnnnnnnnnnnnnnnnnnnnnnnnnnnnnnnnnnnnnnnnnnnnnnnnnnnnnnnnnnnnnnnnnnnnnnnnnnnnnnnnnnnnnnnnnnnnnnnnnnnnnnnnnnnnnnnnnnnnnnnnnnnnnnnnnnnnnnnnnnnnnnnnnnnnnnnnnnnnnnnnnnnnnnnnnnnnnnnnnnnnnnnnnnnnnnnnnnnntgtgggctgccctccagggtgccgggacccagctccgagatgtccgggccaagaaggaccaactggaggctcttttccaggcggcgcaggccatgcttgccatggacacagnnnnnnnnnnnnnnnnnnnnnnnnnnnnnnnnnnnnnnnnnnnnnnnnnnnnnnnnnnnnnnnnnnnnnnnnnnnnnnnnnnnnnnnnnnnnnnnnnnnnnnnnnnnnnnnnnnnnnnnnnnnnnnnnnnnnnnnnnnnnnnnnnnnnnnnnnnnnnnnnnnnnnnnnnnnnnnnnnnnnnnnnnnnnnnnnnnnnnnnnnnnnnnnnnnnnnnnnnnnnnnnnnnnnnnnnnnnnnnnnnnnnnnnnnnnnnnnnnnnnnnnnnnnnnnnnnnnnnnnnnnnnnnnnnnnnnnnnnnnnnnnnnnnnnnnnnnnnnnnnnnnnnnnnaggtcaaggtgcccatgaagttcaatgggcgctcaggggtgcagctgcgcaccccacgggatcttgccgaccttgctgcctacactgccctcaagttctacctgcagggcccagagcctgagcctgggcagggtaccgaggatcactttgtgatgtacatgggcagccgccagnnnnnnnnnnnnnnnnnnnnnnnnnnnnnnnnnnnnnnnnnnnnnnnnnnnnnnnnnnnnnnnnnnnnnnnnnnnnnnnnnnnnnnnnnnnnnnnnnnnnnnnnnnnnnnnnnnnnnnnnnnnnnnnnnnnnnnnnnnnnnnnnnnnnnnnnnnnnnnnnnnnnnnnnnnnnnnnnnnnnnnnnnnnnnnnnnnnnnnnnnnnnnnnnnnnnnnnnnnnnnnnnnnnnnnnnnnnnnnnnnnnnnnnnnnnnnnnnnnnnnnnnnnnnnnnnnnnnnnnnnnnnnnnnnnnnnnnnnnnnnnnnnnnnnnnnnnnnnnnnnnnnnnnnnnnnnnnnnnnnnnnnnnnnnnnnnnnnnnnnnnnnnnnnnnnnnnnnnnnnnnnnnnnnnnnnnnnnnnnnnnnnnnnnnnnnnnnnnnnnnnnnnnnnnnnnnnnnnnnnnnnnnnnnnnnnnnnnnnnnnnnnnnnnnnnnnnnnnnnnnnnnnnnnnnnnnnnnnnnnnnnnnnnnnnnnnnnnnnnnnnnnnnnnnnnnnnnnnnnnnnnnnnnnnnnnnnnnnnnnnnnnnnnnnnnnnnnnnnnnnnnncagagccagttcctgtgcttggccgtgcgagaaggcagcctcgtgctgctgtatgactttggcgctggcctgagagaggctgtcccgctgcagaccccaccgcccctgacctcggccagcaaggcgngatccaggtgttcctgctggggggcagccgcaagcgtgtgctggtgcgtgtggagcgggccacggtgttcagcgtggagcaggacaatgttctggaactggccgacgcctactacctggggggcgcgccgcccgaccagctgcccccgagnagcctgcgacggctcttccccatgggaggctcagtccgtggctgcgtcaaagggatcaaggccctgggcaagtatgtggacctcaagcggctgaacacaacaggcgtgagcgccggctgcaccgctgacctgctggtgnggtggggcgcgccatgactttccacggccacggcttccttcacctggcgctct

SEQ ID NO: 27448 - DNA, 4362 bp, Macaca Mulatta
  misc_feature (1)...(4362): n = A,T,C or G
gtgatcagactgcaggaagaagaaggggcacctttcacggctatcagggaannnnnnnnnnnnnnnnnnnnnnnnnnnnnnnnnnnnnnnnnnnnnnnnnnnnnnnnnnnnnnnnnnnnnnnnnnnnnnnnnnnnnnnnnnnnnnnnnnnnnnnnnnnnnnnnnnnnnnnnnnnnnnnnnnnnnnnnnnnnnnnnnnnnnnnnnnnnnnnnnnnnnnnnnnnnnnnnnnnnnnnnnnnnnnnnnnnnnnnnnnnnnnnnnnnnnnnnnnnnnnnnnnnnnnnnnnnnnnnnnnnnnnnnnnnnnnnnnnnnnnnnnnnnnnnnnnnnnnnnnggtcttgcaagagcaaaatccgtccctagccacacatactccaacgaagtggttaccttgtggtacagacctccagatgtccttctaggctcaacagaatattccacctgccttgacatgtgnnnnnnnnnnnnnnnnnnnnnnnnnnnnnnnnnnnnnnnnnnnnnnnnnnnnnnnnnnnnnnnnnnnnnnnnnnnnnnnnnnnnnnnnnnnnnnnnnnnnnnnnnnnnnnnnnnnnnnnnnnnnnnnnnnnnnnnnnnnnnnnnnnnnnnnnnnnnnnnnnnnnnnnnnnnnnnnnnnnnnnnnnnnnnnnnnnnnnnnnnnnnnnctcagctatgtgaaccatgcagaagacctggcctccaagctcctacaatgttccccaaagaacagactatcggcacaggctgccttgagccatgagtattttagtgacctgcccccacggctatgggaactcaccganngtcttctatttttactgtcccaaatgtgagattgcaaccagaagctggagaaagcatgcgggcctttgggaaaaacaatagttatggcaaaagtctatcaaacagcaagcactgacaagcagcacattctcaagagcacacaggnnnnnnnnnnnnnnnnnnnnnnnnnnnnnnnnnnnnnnnnnnnnnnnnnnnnnnnnnnnnnnnnnnnnnnnnnnnnnnnnnnnnnnnnnnnnnnnnnnnnnnnnnnnnnnnnnnnnnnnnnnnnnnnnnnnnnnnnnnnnnnnnnnnnnnnnnnnnnnnnnnnnnnnnnnnnnnnnnnnnnnnnnnnnnnnnnnnnnnnnnnnnnnnnnnnnnnnnnnnnnnnnnnnnnnnnnnnnnnnnnnnnnnnnnnnnnnnnnnnnnnnnnnnnnnnnnnnnnnnnnnnnnnnnnnnnnnnnnnnnnnnnnnnnnnnnnnnnnnnnnnnnnnnnnnnnnnnnnnnnnnnnnnnnnnnnnnnnnnnnnnnnnnnnnnnnnnnnnnnnnnnnnnnnnnnnnnnnnnnnnnnnnnnnnnnnnnnnnnnnnnnnnnnnnnnnnnnnnnnnnnnnnnnnnnnnnnnnnnnnnnnnnnnnnnnnnnnnnnnnnnnnnnnnnnnnnnnnnnnnnnnnnnnnnnnnnnnnnnnnnnnnnnnnnnnnnnnnnnnnnnnnnnnnnnnnnnnnnnnnnnnnnnnnnnnnnnnnnnnnnnnnnnnnnnnnnnnnnnnnnnnnnnnnnnnnnnnnnnnnnnnnnnnnnnnnnnnnnnnnnnnnnnnnnnnnnnnnnnnnnnnnnnnnnnnnnnnnnnnnnnnnnnnnnnnnnnnnnnnnnnnnnnnnnnnnnnnnnnnnnnnnnnnnnnnnnnnnnnnnnnnnnnnnnnnnnnnnnnnnnnnnnnnnnnnnnnnnnnnnnnnnnnnnnnnnnnnnnnnnnnnnnnnnnnnnnnnnnnnnnnnnnnnnnnnnnnnnnnnnnnnnnnnnnnnnnnnnnnnnnnnnnnnnnnnnnnnnnnnnnnnnnnnnnnnnnnnnnnnnnnnnnnnnnnnnnnnnnnnnnnnnnnnnnnnnnnnnnnnnnnnnnnnnnnnnnnnnnnnnnnnnnnnnnnnnnnnnnnnnnnnnnnnnnnnnnnnnnnnnnnnnnnnnnnnnnnnnnnnnnnnnnnnnnnnnnnnnnnnnnnnnnnnnnnnnnnnnnnnnnnnnnnnnnnnnnnnnnnnnnnnnnnnnnnnnnnnnnnnnnnnnnnnnnnnnnnnnnnnnnnnnnnnnnnnnnnnnnnnnnnnnnnnnnnnnnnnnnnnnnnnnnnnnnnnnnnnnnnnnnnnnnnnnnnnnnnnnnnnnnnnnnnnnnnnnnnnnnnnnnnnnnnnnnnnnnnnnnnnnnnnnnnnnnnnnnnnnnnnnnnnnnnnnnnnnnnnnnnnnnnnnnnnnnnnnnnnnnnnnnnnnnnnnnnnnnnnnnnnnnnnnnnnnnnnnnnnnnnnnnnnnnnnnnnnnnnnnnnnnnnnnnnnnnnnnnnnnnnnnnnnnnnnnnnnnnnnnnnnnnnnnnnnnnnnnnnnnnnnnnnnnnnnnnnnnnnnnnnnnnnnnnnnnnnnnnnnnnnnnnnnnnnnnnnnnnnnnnnnnnnnnnnnnnnnnnnnnnnnnnnnnnnnnnnnnnnnnnnnnnnnnnnnnnnnnnnnnnnnnnnnnnnnnnnnnnnnnnnnnnnnnnnnnnnnnnnnnnnnnnnnnnnnnnnnnnnnnnnnnnnnnnnnnnnnnnnnnnnnnnnnnnnnnnnnnnnnnnnnnnnnnnnnnnnnnnnnnnnnnnnnnnnnnnnnnnnnnnnnnnnnnnnnnnnnnnnnnnnnnnnnnnnnnnnnnnnnnnnnnnnnnnnnnnnnnnnnnnnnnnnnnnnnnnnnnnnnnnnnnnnnnnnnnnnnnnnnnnnnnnnnnnnnnnnnnnnnnnnnnnnnnnnnnnnnnnnnnnnnnnnnnnnnnnnnnnnnnnnnnnnnnnnnnnnnnnnnnnnnnnnnnnnnnnnnnnnnnnnnnnnnnnnnnnnnnnnnnnnnnnnnnnnnnnnnnnnnnnnnnnnnnnnnnnnnnnnnnnnnnnnnnnnnnnnnnnnnnnnnnnnnnnnnnnnnnnnnnnnnnnnnnnnnnnnnnnnnnnnnnnnnnnnnnnnnnnnnnnnnnnnnnnnnnnnnnnnnnnnnnnnnnnnnnnnnnnnnnnnnnnnnnnnnnnnnnnnnnnnnnnnnnnnnnnnnnnnnnnnnnnnnnnnnnnnnnnnnnnnnnnnnnnnnnnnnnnnnnnnnnnnnnnnnnnnnnnnnnnnnnnnnnnnnnnnnnnnnnnnnnnnnnnnnnnnnnnnnnnnnnnnnnnnnnnnnnnnnnnnnnnnnnnnnnnnnnnnnnnnnnnnnnnnnnnnnnnnnnnnnnnnnnnnnnnnnnnnnnnnnnnnnnnnnnnnnnnnnnnnnnnnnnnnnnnnnnnnnnnnnnnnnnnnnnnnnnnnnnnnnnnnnnnnnnnnnnnnnnnnnnnnnnnnnnnnnnnnnnnnnnnnnnnnnnnnnnnnnnnnnnnnnnnnnnnnnnnnnnnnnnnnnnnnnnnnnnnnnnnnnnnnnnnnnnnnnnnnnnnnnnnnnnnnnnnnnnnnnnnnnnnnnnnnnnnnnnnnnnnnnnnnnnnnnnnnnnnnnnnnnnnnnnnnnnnnnnnnnnnnnnnnnnnnnnnnnnnnnnnnnnnnnnnnnnnnnnnnnnnnnnnnnnnnnnnnnnnnnnnnnnnnnnnnnnnnnnnnnnnnnnnnnnnnnnnnnnnnnnnnnnnnnnnnnnnnnnnnnnnnnnnnnnnnnnnnnnnnnnnnnnnnnnnnnnnnnnnnnnnnnnnnnnnnnnnnnnnnnnnnnnnnnnnnnnnnnnnnnnnnnnnnnnnnnnnnnnnnnnnnnnnnnnnnnnnnnnnnnnnnnnnnnnnnnnnnnnnnnnnnnnnnnnnnnnnnnnnnnnnnnnnnnnnnnnnnnnnnnnnnnnnnnnnnnnnnnnnnnnnnnnnnnnnnnnnnnnnnnnnnnnnnnnnnnnnnnnnnnnnnataccggggcagattactgcctgccccttatacataggaatatgctgcataattgcgcataacttccttctcccttactggcttgtaggcagaggaaactgtatatgttactgccttgtaattttctcatacaccaaaaacacaaaaaaaaaatcaataaaataagcaatcttctattctcattccttttcccacagcagcatattttagaggcacatacaaaacctacattctctatttggaagtggnnnnnnnnnnnnnnnnnnnnnnnnnnnnnnnnnnnnntatgatgcactgagatgtgtactttctaacaggggattggtacccaagaaacgtggtagcattattcagaaaactattatactttcaaatgacacatattaaggagaatggaataatacatgttgcatatttgttaccagttgtaatttgtctgtattatgaaagatgtaatggtttgacagctgtcactgttgttttcttgtaacatgatatggaataaagtatagcagaatctc

SEQ ID NO: 27449 - DNA, 314 bp, Macaca Mulatta
tcttagccttggcaccaacgattattcaccctgacttcctccagggcaaggggagatcccaggaaaagggtttcctgcaggttttccgaagccaaggccctggcaagggacccccgcctccaaccttcattgtagggctacatggggcctgggctcagcatccgcatttggggtaaactgaggcctgggacaagcctggcagcgccccaggctgctcagggagtggggccaatctgagatggttggaaatgccagaaaatctaatcagatgacctcaaattcctcctccaaggttgaatagtggggaggagctg

SEQ ID NO: 27450 - DNA, 427 bp, Macaca Mulatta
gagagggccatgatgcctttgagcttaaagagcaccacacatctgcctactcccctccgcgtgcaggccgagagcactgaggacactctggttctcctggaaaggcagtcccacaggcagtggcacccatttctgggcccagccacaggacgtccgatgggagagcttgtctggctctactgatgatggataggccccttcctgagctttggtgtccctggaatgaggaaagattctctattcgagaagatgactgggagggccgagggaagaagtcggggccctcctattagaagcccagactggaagtgagaggcatgatggggagagaccagactgaatctacgggtgagccctgtaacctggctctggggcacagggccctcccctggcacttagtggatctaataaagtatgttgattcatt

SEQ ID NO: 27451 - DNA, 172 bp, Macaca Mulatta
gatttgtctgcctctgctcattccaaggtggtgatcttcacagtcaactccttgggtagttctcagtcctaccttgatgtggtacagagcaatgtggatatgttcagagcccttgtcccagctctgggacattatagtcaacacagtgtcctgctcattgcatctcaaccag

SEQ ID NO: 27452 - DNA, 203 bp, Macaca Mulatta
tccattcaaataatattctagtgggagtaacatgcttcttgattccttcgcaaggcccctgggtgctctctgattgcactagacaagaggacagtaaatttaaagtgttcctttagctcattcagtgctctggaaggaaatgctggcagacggctgctgggaaattttaatttgagaattgtgattccataggaagttaggtt

SEQ ID NO: 27453 - DNA, 870 bp, Macaca Mulatta
  misc_feature (1)...(870): n = A,T,C or G
gggcttttacctcgttgcacttcggagagcaagatgggtcaccagcagctgtactggagccacccgcgaaaattcggccagggttctcgctcttgtcgcgtgtgttcaaaccggcacggtctgatccggaaatatggcctcaatatgtgccgccagtgtttccgtcagtacgcgaaggatatcggtttcattaagttggactaaatgatcttccttcaaagcattatccaaggtcatctactcagtgaaaaactatgatagttctttgtacataaaataaacatttgaaaaaaccnnnnnnnnnnnnnnnnnnnnnnnnnnnnnnnnnnnnnnnnaaaaacccnnnnnnnnnnnnnnnnnnnnnnnnnnnnnnnnnnnnnnnaacgagatccctggaacaaaaatttaatttaatagattattcgattatacaaaataaggtgcggaggaccccttgcccattannnnnnnnnnnnnncnnnnnnnnnnnnnnnnnnnnncgggcccccaatttaggaatttacacaccacgaaaataaaatattatcaccaagaaaaataccgggcgcgaaacaaaaagggtgggtaacgtcccccccagaaaaaaaaaatcgccgggggagaaacgccaaggttgttcgaacaaaattcttcgaaaagggatattcataaggaattatttcgtggggatcatttcaaaaggggttgttctgaaggagagacgcagggcatctnatttttgaccccgccgcccccctgtgtaacnatacaaattagattatatgtgtggtataaaaccacctatatgaatctatttcacccacaagtgggcataacacctaacaataaaaggtgaggtttgtatgtaaa

SEQ ID NO: 27454 - DNA, 4505 bp, Macaca Mulatta
  misc_feature (1)...(4505): n = A,T,C or G
gatgtccttcaagaacccaaaactgaagatatagtagcagtgcagaaagcaaaaacattgtacaggtcttgtataaatgaatnnnnnnnnnnnnnnnnnnnnnnnnnnnnnnnnnnnnnnnnnnnnnnnnnnnnnnnnnnnnnnnnnnnnnnnnnnnnnnnnnnnnnnnnnnnnnnnnnnnnnnnnnnnnnnnnnnnnnnnnnnnnnnnnnnnnnnnnnnnnnnnnnnnnnnnnnnnnnnnnnnnnnnnnnnnnnnnnnnnnnnnnnnnnnnnnnnnnnnnnnnnnnnnnnnnnnnnnnnnnnnnnnnnnnnnnnnnnnnnnnnnnnnnnnnnnnnnnnnnnnnnnnnnnnnnnnnnnnnnnnnnnnnnnnnnnnnnnnnnnnnnnnnnnnnnnnnnnnnnnnnnnnnnnnnnnnnnnnnnnnnnnnnnnnnnnnnnnnnnnnnnnnnnnnnnnnnnnnnnnnnnnnnnnnnnnnnnnnnnnnnnnnnnnnnnnnnnnnnnnnnnnnnnnnnnnnnnnnnnnnnnnnnnnnnnnnnnnnnnnnnnnnnnnnnnnnnnnnnnnnnnnnnnnnnnnnnnnnnnnnnnnnnnnnnnnnnnnnnnnnnnnnnnnnnnnnnnnnnnnnnnnnnnnnnnnnnnnnnnnnnnnnnnnnnnnnnnnnnnnnnnnnnnnnnnnnnnnnnnnnnnnnnnnnnnnnnnnnnnnnnnnnnnnnnnnnnnnnnnnnnnnnnnnnnnnnnnnnnnnnnnnnnnnnnnnnnnnnnnnnnnnnnnnnnnnnnnnnnnnnnnnnnnnnnnnnnnnnnnnnnnnnnnnnnnnnnnnnnnnnnnnnnnnnnnnnnnnnnnnnnnnnnnnnnnnnnnnnnnnnnnnnnnnnnnnnnnnnnnnnnnnnnnnnnnnnnnnnnnnnnnnnnnnnnnnnnnnnnnnnnnnnnnnnnnnnnnnnnnnnnnnnnnnnnnnnnnnnnnnnnnnnnnnnnnnnnnnnnnnnnnnnnnnnnnnnnnnnnnnnnnnnnnnnnnnnnnnnnnnnnnnnnnnnnnnnnnnnnnnnnnnnnnnnnnnnnnnnnnnnnnnnnnnnnnnnnnnnnnnnnnnnnnnnnnnnnnnnnnnnnnnnnnnnnnnnnnnnnnnnnnnnnnnnnnnnnnnnnnnnnnnnnnnnnnnnnnnnnnnnnnnnnnnnnnnnnnnnnnnnnnnnnnnnnnnnnnnnnnnnnnnnnnnnnnnnnnnnnnnnnnnnnnnnnnnnnnnnnnnnnnnnnnnnnnnnnnnnnnnnnnnnnnnnnnnnnnnnnnnnnnnnnnnnnnnnnnnnnnnnnnnnnnnnnnnnnnnnnnnnnnnnnnnnnnnnnnnnnnnnnnnnnnnnnnnnnnnnnnnnnnnnnnnnnnnnnnnnnnnnnnnnnnnnnnnnnnnnnnnnnnnnnnnnnnnnnnnnnnngcagaaactttaacaaagatggagacctggttgactggtggactcaacagtctgcaagtaactttaaagagcaatcccaatgcatggtgtatcagtatggaaacttttcctgggacctggcaggtggacagcacnnnatggaattaatacactgggagaaaacattgctgataacggaggtattggtcaagcatacagagnnnnnnnnnnnnnnnnnnnnnnnnnnnnnnnnnnnnnnnnnnnnnnnnnnnnnnnnnnnnnnnnnnnnnnnnnnnnnnnnnnnnnnnnnnnnnnnnnnnnnnnnnnnnnnnnnnnnnnnnnnnnnnnnnnnnnnnnnnnnnnnnnnnnnnnnnnnnnnnnnnnnnnnnnnggattattgggactttgcaaaactctgcagagttttcagaagcctttcactgccgcaagaattcctacatgaatccacaaaagaaatgccgggttaggtgatcttcaaaagaagcagtgcagccctcggctagacttgccaacaccacagaaatggggaactctctaactgagaaaaaatgggccctaggggtcactgtactgactcgggggtgattaacagagaggggagcatcacaatacaaataacattatgttgttctagaaagggtgtggagggaggaatacggtctgacgtctgtcaagtcaatcacttctcactgtgtaaataatgcttaatttctaaagataacattactgattatttctnnnnnnnnnnnnnnnnnnnnnnnnnnnnnnnnnnnnnnnnnnnnnnnnnnnnnnnnnnnnnnnnnnnnnnnnnnnnnnnnnnnnnnnnnnnnnnnnnnnnnnnnnnnnnnnnnnnnnnnnnnnnnnnnnnnnnnnnnnnnnnnnnnnnnnnnnnnnnnnnnnnnnnnnnnnnnnnnnnnnnnnnnnnnnnnnnnnnnnnnnnnnnnnnnnnnnnnnnnnnnnnnnnnnnnnnnnnnnnnnnnnnnnnnnnnnnnnnnnnnnnnnnnnnnnnnnnnnnnnnnnnnnnnnnnnnnnnnnnnnnnnnnnnnnnnnnnnnnnnnnnnnnnnnnnnnnnnnnnnnnnnnnnnnnnnnnnnnnnnnnnnnnnnnnnnnnnnnnnnnnnnnnnnnnnnnnnnnnnnnnnnnnnnnnnnnnnnnnnnnnnnnnnnnnnnnnnnnnnnnnnnnnnnnnnnnnnnnnnnnnnnnnnnnnnnnnnnnnnnnnnnnnnnnnnnnnnnnnnnnnnnnnnnnnnnnnnnnnnnnnnnnnnnnnnnnnnnnnnnnnnnnnnnnnnnnnnnnnnnnnnnnnnnnnnnnnnnnnnnnnnnnnnnnnnnnnnnnnnnnnnnnnnnnnnnnnnnnnnnnnnnnnnnnnnnnnnnnnnnnnnnnnnnnnnnnnnnnnnnnnnnnnnnnnnnnnnnnnnnnnnnnnnnnnnnnnnnnnnnnnnnnnnnnnnnnnnnnnnnnnnnnnnnnnnnnnnnnnnnnnnnnnnnnnnnnnnnnnnnnnnnnnnnnnnnnnnnnnnnnnnnnnnnnnnnnnnnnnnnnnnnnnnnnnnnnnnnnnnnnnnnnnnnnnnnnnnnnnnnnnnnnnnnnnnnnnnnnnnnnnnnnnnnnnnnnnnnnnnnnnnnnnnnnnnnnnnnnnnnnnnnnnnnnnnnnnnnnnnnnnnnnnnnnnnnnnnnnnnnnnnnnnnnnnnnnnnnnnnnnnnnnnnnnnnnnnnnnnnnnnnnnnnnnnnnnnnnnnnnnnnnnnnnnnnnnnnnnnnnnnnnnnnnnnnnnnnnnnnnnnnnnnnnnnnnnnnnnnnnnnnnnnnnnnnnnnnnnnnnnnnnnnnnnnnnnnnnnnnnnnnnnnnnnnnnnnnnnnnnnnnnnnnnnnnnnnnnnnnnnnnnnnnnnnnnnnnnnnnnnnnnnnnnnnnnnnnnnnnnnnnnnnnnnnnnnnnnnnnnnnnnnnnnnnnnnnnnnnnnnnnnnnnnnnnnnnnnnnnnnnnnnnnnnnnnnnnnnnnnnnnnnnnnnnnnnnnnnnnnnnnnnnnnnnnnnnnnnnnnnnnnnnnnnnnnnnnnnnnnnnnnnnnnnnnnnnnnnnnnnnnnnnnnnnnnnnnnnnnnnnnnnnnnnnnnnnnnnnnnnnnnnnnnnnnnnnnnnnnnnnnnnnnnnnnnnnnnnnnnnnnnnnnnnnnnnnnnnnnnnnnnnnnnnnnnnnnnnnnnnnnnnnnnnnnnnnnnnnnnnnnnnnnnnnnnnnnnnnnnnnnnnnnnnnnnnnnnnnnnnnnnnnnnnnnnnnnnnnnnnnnnnnnnnnnnnnnnnnnnnnnnnnnnnnnnnnnnnnnnnnnnnnnnnnnnnnnnnnnnnnnnnnnnnnnnnnnnnnnnnnnnnnnnnnnnnnnnnnnnnnnnnnnnnnnnnnnnnnnnnnnnnnnnnnnnnnnnnnnnnnnnnnnnnnnnnnnnnnntccttccaaatagtattataagcattgaaattatagtttcaggccaactgtggatacccttaccctttcctcctttatcacaaccacnnnnnnnnnnnnnntatatgtccttaaagtaaatttaaaacttacctaagtgatacttgtagttgaagtaataggagcttccagctgtaataaaacagctatctcttaacttattttatttccatcatgtcagagcaggtgaagagccagaagtgaagagtgtctagtacaaatcataaaaagccactagactcttcactgttagctttttaaaacatcaggctcgcatccctatggaggaacaactctccggtgccaggatctcctctgtctataaatataagattttgtgggcctaaaggacagatcaaactcaaaatagcaatacctccctatccctaacacatccagacatcgtgaattttacatggtactcccgttgaattctatagggctttgtgatgtctctaaaactctacctattctttagagttgtcacatcagatgagacatatctctaatcccatccataaatccagttcttctgtggctgagttgtggtcaaagaaagaaggtttagaagatgagacacaaaggattgggagctgatgaaactcaca

SEQ ID NO: 27455 - DNA, 1741 bp, Macaca Mulatta
  misc_feature (1)...(1741): n = A,T,C or G
ggctcatccagctgtaccaccgtatccctcacaagctacacatcataccactttgggaccgggaccccagcaccagccttctggaacagggccacattgtccattacctgtcacaggtcctcatctccagccccaaggaccaaacagtattccaacacctactgcttcagggttctgtcctcatcctggctctgtggccctgccacatggggttcaaggacctcagcaggcatctccagtgcctggacagattccaattcacagagcacaggtgccaccaacatttcaaaacaattaccatgggtcagggtggcattaaaatggactccnnnnnnnnnnnnnnnnnnnntctgtaagataaactgtatatttcatatgtacctgttaaggtactttttaaagcttgtacatgaatctttgtataaaaaacaccagtgctctttcattgtatttttctcatttttgctttttgaaattcctttaaaaaatgtgctgttaagccagtattaggtatctttattttgtaagtgaacattccagctgttttttctggcagatctgatgctgatttgatgctgtatgatctttaaattttattgttgcagttaaattcatttagtgaatgttctattaattttatacatacacatttaagtactcacgctaaagtaatggcacctatggaggaattttcctttttctcccccttttcctggtcaacagcagttctgtgaatgcttcttaggtataaaaatgcaatacagatttttatattttggtgtggacatggctcatttttgttttaccagttatttgcaagcaaaatgtaatttaatgtataaatgatttctagtgtctcctgacaaactgtatatactgcatttcttttgcgtttataattagcttaacggctttttctcatttggatataatgacatttgtaaaatatcaaccaagtcttttttgccaaacatgggaagaatcctcgtgttcaaaacttaatgaataggcaataatggaaccccgtctttaactctccgtatactctagaacctaatcagaaaataaattacttgggtcacgcgaaatttatacacaacaccaatactgacagaatttaggggatcgccacttatatatctataatatttatctatcacgagtgtctatccagtccgaaaaaaaacaacactcaaactgaaaaaattatatttatttatgagtctcgccaaggacttttttttttattatataccaccgattcgaaaacactattttgggtgataacaccccttacgaatatcaccacanagtaccactatatacctctaaccaaaataataataccaatgtgggtgtgtctcccccttgagtcgtgtatatgtatctccattctcacacacatcgatacatagacgcatatcttccttgaaggcntcttattcttacacttcaaaagctatttactgaatgtgttcgattataaaagagagacaagtccccactctacaaacacacctgaataaccgaataataagtctaagattcattgctactaaccaatcacctatcaaattacaacagcgaatacgactatgcttagtatatgacgcgtgactgatctacccatcaacacaagtaatggcgaacaccatctaatcaataaaacccaaaaacataatactttctcacgtaactctcacttcgacatgaacctcatatgaaaaaagaaggctcccga

SEQ ID NO: 27456 - DNA, 463 bp, Macaca Mulatta
tattgtgctctttgtgggatagaaaaagttgttttttattgtgctgttcacaggtttaaaaacttttttttgttttcaaaataattattactggagcatgtaatacaaggcaagacattttttaaacatcgaaaggtaaacaaaaataatagtcctgttaccagaaatatctcttggtatagccaaagatgagtaaagtggccagaggtctgggtgaagtaaaggtggtaaaacttgggacttaggacacgatactgaggagcattgtgttaaaaagtcataaaatcatatatgatcagtgtataatctcagtttcaggagttagaagaaattttcaagaaactactgggcctcttcaaaaaataccagaaaatgtgccatttttgaagtagaaacagaaagacgtaatgaaagaacaggccaaggtgagaatgctggaaccacaggaacttaaaaatgcaga

SEQ ID NO: 27457 - DNA, 155 bp, Macaca Mulatta
agaaaatagaacttccaaagaaactggcaaaacgctatcccgcatatgagttgtatctttatggagagggatcatatgctgaagaacacaaaattctccctttgacgggtattccagttctctttcttcctggtaatgctggaagttataagcaa

SEQ ID NO: 27458 - DNA, 781 bp, Macaca Mulatta
  misc_feature (1)...(781): n = A,T,C or G
acgtagccccagtgcgcttcgcagcgcaccattacgcggcaaaccctgcgcgcactcgaggtgcgcgcagccgcttcagccaagctgaacgccgcgctggaggagctggcggcgcgctgcgcggccctgcgcgaggtgcatgcnttctgcgtgtgagccactcgtgctgggaagccttccgcgcgcatgtccgcgcctgcgcacctataccctcaagctcacgcgcgaaccgcatccctggcggcccacgctggtggcgcgattgggcgacttctctccnccgtccccgcagacgtaagcgctccgagatgggacggatgtgcccaggcgcgccccgactgctagtgccttctttcgggattgttgcccgcccgggtctttacggagttgggaactgtgatggcatcgggaccagtactgggcgccctcagaccactagctgctctcaccctctgcagacgccccacccgctcggtcctggacacactgccccccctcttgcctccacccctctgcggactctgcatctctgcggccctggcgcggggagagggagggcacgggcgcgggccgggcctcaggggtgagtgtgaaataaacaaatcctgcagtgtttctgagagtcctgttaaaggcggggtcggatctgaaagggaagggcagggaactcacgggggaccggaggagccatcccggcagaggtggggtttcctcagggtcctctgaactgacacagctgcggggggtcaggggcgggacactcgcacccttggaatgacta

SEQ ID NO: 27459 - DNA, 438 bp, Macaca Mulatta
tttcccccatttgactatattaatttggattttgttttaacagctcaggtgcctaaaaggccagaggggcttctcaggccaaccgccttttgatggaatccacattgtcaaccatttaataggagatgatgaatcattccattcctccgatgaagattttatagataattccttacaggaaactggtgttggttttcctttgcacggaaaatctggctcgatgtctttggaccccgcagtggcagatggtagtgagagcgaaacagaagacagtgtgctggagactagagagagcaatcaagtggttcaaaaggagcggcccccgagaagaagagagtcgtattcaaccactgtctgaccatcactgtgacctagactatggatttatttaagggatcagctatcatatgattagggatttttggaaataatttgttt

SEQ ID NO: 27460 - DNA, 155 bp, Macaca Mulatta
agctaaagtgctgtggggtgaataactacacagatttttctggctcttccttcgaaatgacaacgggccacacctaccccaggggttgctgtaaatccatcggaactgtaacctgtgatggacgcaatgtgtctacaaacgtcatccaccagaag

SEQ ID NO: 27461 - DNA, 465 bp, Macaca Mulatta
  misc_feature (1)...(465): n = A,T,C or G
aggtgctgcattgctctggacatatgagggcctacaagccccctgcacagacttctccagctgggagccctgactcagagccgccactgcagtgcctggtgctcatctgcgaagccatcccccacccaggcagcctggagacccccgctgggccggggggccttcctcagccgccacagcctggacatgaannnnnnnnnnnnnnnnnnnnnnnnnnnnnnnnnnnnnnnnnnnnnnnnnnnnnnnnnnnnnnnnnnnnnnnnnnnnnnnnnnnnnnnnnnnnnnnnnnnnnnnnnnnnnnnnnnnnnnnnnnnnnnntgctgagcaagggccaggcagtaacagggcagtatcgcttcctggcccggaacggtggctacctgtggacccagacccaggccacagtggtgtcagggggacggggcccccagtcggagagtatcgtctgtgtccattttttaatca

SEQ ID NO: 27462 - DNA, 517 bp, Macaca Mulatta
atgtccgggcacccaaggccccaggcaccacttcctgccggtcgtctgagggccaaggcctcctgtagccccttgggtgcggggtctgccaagccctccaccttttcaccgtgccctgccgtgccccgccgtgcctggcaaggtggctggctgcagtgaggtccttggaagccacctcggcctccagcctcctggctcggcacccgcccctcccgagcacagaccaccccgtcctgtgccggtcccactgaccaccccttgcctcctgcccccaggagaacgagacctggtggctgtgcgactgcttcatggccacgtgcaagtacaacaacacagtggagatcgtgagggtggagtgtgagccgccgcccatgcccacctgctccaacggcctcacccccgtgcgcgtcagcgaccctgacggctgctgctggcattgggagtgcgactgtgagtccggggtccccaggccttccccgcatctcctgccctctccgtgggtgggggctgcagggca

SEQ ID NO: 27463 - DNA, 222 bp, Macaca Mulatta
cctggctctgtattcctcctgtactgctggatgaggctgtctggaagacaaaagtcacccttaactgagataagcaaggtcatgttgaaatctggattctaaaatccacaactagactggagaaatgttctgtatcctggatccaagtcctagtccatgaattggcccttaaaaatttagctcataaatatttgattgaaggaatgaatataatcagtgctg

SEQ ID NO: 27464 - DNA, 2452 bp, Macaca Mulatta
  misc_feature (1)...(2452): n = A,T,C or G
acaccaaggtgcccctctcccgagccgcctatcacccagcggggctgctgctcatcctatccacccattaaagatgggggtcttggcccttgtgggaagtgccaggagggcctggacggggttgccagtggatccaacggacccagcgaggaagtgaacaaggcctctggccccnnnnnnnnnnnnnnnnnnnnnnnnnnnnnnnnnnnnnnnnnnnnnnnnnnnnnnnnnnnnnnnnnnnnnnnnnnnnnnnnnnnnnnnnnnnnnnnnnnnnnnnnnnnnnnnnnnnnnnnnnnnnnnnnnnnnnnnnnnnnnnnnnnnnnnnnnnnnnnnnnnnnnnnnnnnnnnnnnnnnnnnnnnnnnngacccttttccaggcactgcagaacagggggctgggggttggcaggaggtattggacacatcgatagggaacaaggaggcggactcgggacaccatgatgaccagannnnnnnnnnnnnnnnnnnnnnnnnnnnnnnnnnnnnnnnnnnnnnnnnnnnnnnnnnnnnnnnnnnnnnnnnnnnnnnnnnnnnnnnnnnnnnnnnnnnnnnnnnnnnnnnnnnnnnnnnnnnnnnnnnnnnnnnnnnnnnnnnnnnnnnnagatcacctctgggaggggaactgcagcaggaggaagacacagccgccaactccagctctgaggaaggcccagggtccggccctgatggcaggctcagcacaggactctccaagcacctgctcagtagtctaggggaccgactgtgccgtctgctgcggagagagcgggaagccctggcctgggcccagcgggaagnnnnngccagccgtgacagattaccacccaggcattccacgctgctgcagccgttgccaccacggactcttcaacacccactggcgatgtccccgttgcagccaccggctgtgtgtggcctgcggtcgtgtggcaggcgctgggcgggccagggagaaagcaggncaggctctcgggagcagtccacggaggagtgcacgcaggaggctgggcacgctgcctgttccctgacgctgacccagtttgtctccagccaggnnnnnnnnnnnnnnnnnnnnnnnnnnnnnnnnnnnnnnnnnnnnnnnnnnnnnnnnnnnnnnnnnnnnnnnnnnnnnnnnnnnnnnnnnnnnnnnnnnnnnnnnnnnnnnnnnnnnnnnnnnnnnnnnnnnnnnnnnnnnnnnnnnnnnnnnnnnnnnnnnnnnnnnnnnnnnnnnnnnnnnnnnnnnnnnnnnnnnngagacccccgattccactgagaccccagcagaggaccgtgctggccaagcgcccctgccttgtccttctctctgcgaactgctggcttccactgctgtcaaactctgcttgggtcatgagcgaatacacatggccttcgcccccgtcactccggccctgcccagtnnnnnnnnnnnnnnnnnnnnnnnnnnnnnnnnnnnnnnnnnnnnnnnnnnnnnnnnnnnnnnnnnnnnnnnnnnnnnnnnnnnnnnnnnnnnnnnnnnnnnnnnnnnnnnnnnnnnnnnnnnnnnnnnnnnnnnnnnnnnnnnnnnnnnnnnnnnnnnnnnnnnnnnnnnnnnnnnnnnnnnnnnnnnnnnnnnnnnnnnnnnnnnnnnnnnnnnnnnnnnnnnnnnnnnnnnnnnnnnnnnnnnnnnnnnnnnnnnnnnnnnnnnnnnnnnnnnnnnnnnnnnnnnnnnnnnnnnnnnnnnnnnnnnnnnnnnnnnnnnnnnnnnnnnnnnnnnnnnnnnnnnnnnnnnnnnnnnnnnnnnnnnnnnnnnnnnnnnnnnnnnnnnnnnnnnnnnnnnnnnnnnnnnnnnnnnnnnnnnnnnnnnnnnnnnnnnnnnnnnnnnnnnnnnnnnnnnnnnnnnnnnnnnnnnnnnnnnnnnnnnnnnnnnnnnnnnnnnnnnnnnnnnnnnnnnnnnnnnnnnnnnnnnnnnnnnnnnnnnnnnnnnnnnnnnnnnnnnnnnnnnnnnnnnnnnnnnnnnnnnnnnnnnnnnnnnnnnnnnnnnnnnnnnnnnnnnnnnnnnnnnnnnnnnnnnnnnnnnnnnnnnnnnnnnnnnnnnnnnnnnnnnnnnnnnnnnnnnnnnnnnnnnnnnnnnnnnnnnnnnnnnnnnnnnnnnnnnnnnnnnnnnnnnnnnnnnnnnnnnnnnnnnnnnnnnnnnnnnnnnnnnnnnnnnnnnnnnnnnnnnnnnnnnnnnnnnnnnnnnnnnnnnnnnnnnnnnnnnnnnnnnnnnnnnnnnnnnnnnnnnnngtgtgcccggccggggcaggcgccctggagcctggcgccccaggcagctgttacctggacgcagggctgcggcggcgcctgcgggaggagtggggcgtgagctgctggaccctgctccaggcccccggagaggccgtgctggtgcctgcaggggctccccaccaggtgc

SEQ ID NO: 27465 - DNA, 1793 bp, Macaca Mulatta
  misc_feature (1)...(1793): n = A,T,C or G
aaaagtcgtgtatcccaccgagaaagtcaactgcctggataaggtntattggcatanaggatgtttccattgtgaggtctgcaagatggcactcaacatgaacaactacaaaggctatgaaaagaannnnnnnnnnnnnnnnnnnnnnnnnnnnnnnnnnnnnnnnnnnnnnnnnnnnnnnnnnnnnnnnnnnnnnnnnnnnnnnnnnnnnnnnnnnnnnnnnnnnnnnnnnnnnnnnnnnnnnnnnnnnnnnnnnnnnnnnnnnnnnnnnnnnnnnnnnnnnnnnnnnnnnnnnnnnnnnnnnnnnnnnnnnnnnnnnnnnnnnnnnnnnnnnnnnnnnnnnnnnnnnnnnnnnnnnnnnnnnnnnnnnnnnnnnnnnnnnnnnnnnnnnnnnnnnnnnnnnnnnnnnnnnnnnnnnnnnnnnnnnnnnnnnnnnnnnnnnnnnnnnnnnnnnnnnnnnnnnnnnnnnnnnnnnnnnnnnnnnnnnnnnnnnnnnnnnnnnnnnnnnnnnnnnnnnnnnnnnnnnnnnnnnnnnnnnnnnnnnnnnnnnnnnnnnnnnnnnnnnnnnnnnnnnnnnnnnnnnnnnnnnnnnnnnnnnnnnnnnnnnnnnnnnnnnnnnnnnnnnnnnnnnnnnnnnnnnnnnnnnnnnnnnnnnnnnnnnnnnnnnnnnnnnnnnnnnnnnnnnnnnnnnnnnnnnnnnnnnnnnnnnnnnnnnnnnnnnnnnnnnnnnnnnnnnnnnnnnnnnnnnnnnnnnnnnnnnnnnnnnnnnnnnnnnnnnnnnnnnnnnnnnnnnnnnnnnnnnnnnnnnnnnnnnnnnnnnnnnnnnnnnnnnnnnnnnnnnnnnnnnnnnnnnnnnnnnnnnnnnnnnnnnnnnnnnnnnnnnnnnnnnnnnnnnnnnnnnnnnnnnnnnnnnnnnnnnnnnnnnnnnnnnnnnnnnnnnnnnnnnnnnnnnnnnnnnnnnnnnnnnnnnnnnnnnnnnnnnnnnnnnnnnnnnnnnnnnnnnnnnnnnnnnnnnnnnnnnnnnnnnnnnnnnnnnnnnnnnnnnnnnnnnnnnnnnnnnnnnnnnnnnnnnnnnnnnnnnnnnnnnnnnnnnnnnnnnnnnnnnnnnnnnnnnnnnnnnnnnnnnnnnnnnnnngaaacttcttagctgtcactttggaatcaccccaagccaattctcttaacttggtaatgcagccaataatttaaaacccattttgcttttgagtcatgaggcaatttccaatattagtgaaaattgcccaatataataagtgtaaacagtggcagaaggacagtctggttaaaattatattgactggtggccttagggatctagaaacttctactaaacagagaaatttccttgttccctaggctgactgggatctatttatttctcatttgtaccaaggcatctcctactctccatttatattctatggacccaagtctatgctccgttccacagaacgccaggaccaaataacttcacagctactctgcaaagggcaaattataatgtcattgatataatttccctagtagcatttaccctgttgcatgtcatgtagattcaagcttctgtaacataggcagctgcactgcgcgttcctattattgaagcaaaaagggtgactgatacctaaaagccctttcttcctctagtcgccagctcatcagaaaaccatactttgaaaagatgcttgagattttcctcctgcattgcactctagttttgaaggatttacaccttaggaaataacatgtataatctagtaaataagcgattt

SEQ ID NO: 27466 - DNA, 2069 bp, Macaca Mulatta
  misc_feature (1)...(2069): n = A,T,C or G
ttggtggagatcgagctggcaaaacgcatcaagctccagatctgggataccgcgggtcaagagaggttcagnnnnnnnnnnnnnnnnnnnnnnnnnnnnnnnnnnnnnnnnnnnnnnnnnnnnnnnnnnnnnnnnnnnnnnnnnnnnnnnnnnnnnnnnnnnnnnnnnnnnnnnnnnnnnnnnnnnnnnnnnnnnnnnnnnnnnnnnnnnnnnnnnnnnnnnnnnnnnnnnnnnnnnnnnnnnnnnnnnnnnnnnnnnnnnnnnnnnnnnnnnnnnnnnnnnnnnnnnnnnnnnnnnnnnnnnnnnnnnnnnnnnnnnnnnnnnnnnnnnnnnnnnnnnnnnnnnnnnnnnnnnnnnnnnnnnnnnnnnnnnnnnnnnnnnnnnnnnnnnnnnnnnnnnnnnnnnnnnnnnnnnnnnnnnnnnnnnnnnnnnnnnnnnnnnnnnnnnnnnnnnnnnnnnnnnnnnnnnnnnnnnnnnnnnnnnnnnnnnnnnnnnnnnnnnnnnnnnnnnnnnnnnnnnnnnnnnnnnnnnnnnnnnnnnnnnnnnnnnnnnnnnnnnnnnnnnnnnnnnnnnnnnnnnnnnnnnnnnnnnnnnnnnnnnnnnnnnnnnnnnnnnnnnnnnnnnnnnnnnnnnnnnnnnnnnnnnnnnnnnnnnnnnnnnnnnnnnnnnnnnnnnnnnnnnnnnnnnnnnnnnnnnnnnnnnnnnnnnnnnnnnnnnnnnnnnnnnnnnnnnnnnnnnnnnnnnnnnnnnnnnnnnnnnnnnnnnnnnnnnnnnnnnnnnnnnnnnnnnnnnnnnnnnnnnnnnnnnnnnnnnnnnnnnnnnnacaggacaactattacttggtatttgagctcacttataggccatgaacataaagaaacacataaaggggaaaaaagtatcacattggggacannnnnnnnnnnnnacaaagattatgagctctacttattccatgagaataccctgcaccaaaggtgtttgctgggtttggttaaaaggtaccaattagcttttaacagctcatctgtaaaatgaggaacatagaccaaaaggtctggtgttcaagtaaaaatgatgtgaatatgaaagaaaggctatctacacagttattagcacatttgaacactcttgtggtaaaattaccagctgtatgaaacaaattgtcccgtgcaaattaccctataactaggaaagggacnnnnnnnnnnnnnnnnnnnnnnnnnnnnnnnnnnnnnnnnnnnnnnnnnnnnnnnnnnnnnnnnnnnnnnnnnnnnnnnnnnnnnnnnnnnnnnnnnnnnnnnnnnnnnnnnnnnnnnnnnnnnnnnnnnnnnnnnnnnnnnnnnnnnnnnnnnnnnnnnnnnnnnnnnnnnnnnnnnnnnnnnnnnnnnnnnnnnnnnnnnnnnnnnnnnnnnnnnnnnnnnnnnnnnnnnnnnnnnnnnnnnnnnnnnnnnnnnnnnnnnnnnnnnnnnnnnnnnnnnnnnnnnnnnnnnnnnnnnnnnnnnnnnnnnnnnnnnnnnnnnnnnnnnnnnnnnnnnnnnnnnnnnnnnnnnnnnnnnnnnnnnnnnnnnnnnnnnnnnnnnnnnnnnnnnnnnnnnnnnnnnnnnnnnnnnnnnnnnnnnnnnnnnnnnnnnnnnnnnnnnnnnnnnnnnnnnnnnnnnnnnnnnnnnnnnnnnnnnnnnnnnnnnnnnnnnnnncaaaggtaaagcccattcaggtattattgacaagagggctttaaaacaagtgaataattgcacaactaaaaagacattagaactgtgtgggctataagtgctcttatcaccgagacactggatttttattgaaaggaaccacatacagcaatggcaatggggagtgggatagggataaaatactcaccccaaaatgaccttggccacctgtctgccgtatacgtacactgagctcctgtctacccaacagagtcagcccttaattctcaggtgaacaaacagctaactgcatcagcaaattggaatggctggcttgaagtttccattattttcttgaagagaggtgatgctttaaattactttttggattgt

SEQ ID NO: 27467 - DNA, 779 bp, Macaca Mulatta
  misc_feature (1)...(779): n = A,T,C or G
gggagatggcccgccacctgcgcgagtaccaggacctgctcaatgtgaagatggccctggatgtggagatcgccacctaccggaagctgctggagggagaggagagccggatcaatctccccatccaaaccttctctgccctcaacttccgagaaaccagccctgagcaaaggggttctgaggttcataccaagaagacggtgatgatcaagaccatcgagacacgggatggggaggtcgtcagtgaggccacacagcagcagcatgaagtgctctaaagacagagaccctctgccaccagagaccgtcctcacccctgtactcactgctccctgaagccagccttcttccatcccaggacaccacacccagcctcagtcctcccatcacagcctctgacccctcctcactggccatccctcgtggtccccaacagggacatagcccatccctgcctggtcacagggcacgccccggccacctctgcgggccccaaccgtgagccttggctgttggcagtgagtgagcctggctcttgtgctggatggagcccaggctggagcaatggccctgtccctcccacctctgtgacctcaggcactagcctctggctctggagatagccccagagcagggtgttgggatactgcagggccagnactgagccccgcagacctccccagcccccagcccaggagagagaaagcaggcaagtagccagggggactagcccctgtggagactgggggacttgaaatttgtccctgcggtctccttat

SEQ ID NO: 27468 - DNA, 698 bp, Macaca Mulatta
ggggggggatgaggtgtggctgcaggtgacaggaggagacaggttcaatggcttgtttgctgatgaggacgatgacacaactttcacagggttccttctgtttggcagcccgtgacaggagagttgatgaatcggccgccccatctcagaatcagcttggtgacgaacttactcagatggttttactttactaattcctccagttattacaataatcataaaaaggtgaaaacggaaaagttattcccaaaactgattctgtctaacttactgtctttccaggagtaaatattgaaaatagctgcatggtttattctaatttacctcacatttcttattcctattatctgaagaatcctctgcctgtgtgtttcttgtgggaagagtgttttgatcccatttgagtgctctgaggagtcatgtgaggatgtatccctcatctgtgtttctgaggacagtaaggggaaagtaaagggaaatctttattccattcagtactagtaacagctttaagttggtgatgctgtcacgctccagaaagctgtagacactgctcattttgtctttttttacaaattatttttaagtcctggatacatatgcagaacgtgcttggttggtatataataaacagtgctgtggtgcttgctgctctatcacccgtccctagtataagcctgcagcatacttttgtctgg

SEQ ID NO: 27469 - DNA, 430 bp, Macaca Mulatta
cgtagatcttcaatttggatatttggaggagtaaacatcgttgttttgctggagggatgatcttgatgatgtttctttccccaaaaattgacttagatattaaaatttggtgcttataagagagagttaaaaaaataaataggattgcttcaattaaaattacaaaagagacatttcacgtgttctgtcgttttatttcagcccagtcccttctttctaacttgtgatctcatagatcaacggtatctcctggtctgtttctggttctatcactccatgtcatttatctctttataataggatggccttggggccttttttgaacagtagtaatgacttcattcgccactgtgctaaatgatacacaacctattacatacaccagtccttcattataccattgacctgaggctagcaagagattttgtct

SEQ ID NO: 27470 - DNA, 945 bp, Macaca Mulatta
  misc_feature (1)...(945): n = A,T,C or G
ggctcttcgggtaaagatggcggagcgcgggtacagcttttcgctgactacattcagcccgtctggtaaacttgtccagattgaatatgctttggctgctgtagctggaggagccccgtcagtgggaattaaagctgcaaatggtgtggtattagcaactgagaaaaaacagaaatccattctgtatgatgagcgaagtgtacacaaagtggaaccaattaccaagcatataggtttggtgtacagtggcatgggcccccattacagagtgcttgtgcacagagcttcgaagctagctcaacagtactatcttgtgtaccaagaacccattcctatcgcctcagctagtacagaagagtaaactttctgttgatgcgaagaaatatatgcagctcaggggggatggtcccgtccaatttcggaaggtttacttttaacataattttagtggggctaggggaattgcagcggggaccccaacccccctaatttttaatcttttcaagatttgcaggtaattccccatttccttgggggaagccctctgttatccttgtatggcgccattagggaaaaagaagctccaaccatagactagcattcgcggggtacaacagaaaacccgctttggttggacaatctgggggagaaaatacactgtataataccttttggaagctcaccacaggggtattattaacgggaaagagaaatacatggggagaaccctcttgggggggaatatgcgccccgtttaaagacaacaggtcccaaatatactttcacactcccctctataagcgaaaaaaacctttgttgtgtacaggggggcccaataattgtactttnaaacggtcatatataacatcacgcgaacagattttgggcaatctccgtcccacaagtgaaagcccaggggaaattctatactatacaacactccac

SEQ ID NO: 27471 - DNA, 918 bp, Macaca Mulatta
cacacttgatggttgttgctgaaatattttctaacagaaactcttaggtggaatgtttctgaaggctttaaaaaaatacaataaagtaaaaaccccaattggaactctttcccctccccagcccctttaccttcactcccatactggacaagacattttggacatgacttcaaggggacaggttaattcctggcattgccagttatcttcattcagaatctgttttatttatcaagcgactgtccccgtaaaaagtagaagataagtttgttaaagtattttttataaacagcttaatataaaacattatagatttagtgtttggctttttccttataagtttataagtttgatttcaaatgttggaaatgtgtgctttatagtgtttactaaagtgacaagaaaatataccatttgacacactatagattccaaacataacgttgcaccaaatagaaatgtatattttattatgcaatgccttagtcataaactgggctcaaacaattctcagcctaaaacactgttgtcttttaaaatgcttccaacccaaaggcctttcatctcaatatctgtcaaacttgaataatgtcttctctttaatatacataaggcagcctattaactgtgtcttagcaatgttgtatatagttcttttaatattcataaggtatatttttgaattttggtatttgttgagattgcatagaagaatagtaggaaatccaatgaaatggctgtttccaccaagaattcttagcactggtgtaaatatcatggtgcctactcgaaagaaatgtagatgctatgcattttgaaaataatctgcatcagttagaactgcagaagtttttttaatgccactttaacactaatgcactgacagattctaaatattttgtgagaagaaatgttaaa

SEQ ID NO: 27472 - DNA, 181 bp, Macaca Mulatta
ctgggccccgctgtctaccctccatctcatccccaattcacttgtttagtgaaacttgagcccaatcagtcgctgctggctgctaggccagatgctggggacgccagcgggaggagccggagcccacactcacagcccaggaagaggacaggcaagggaacagatttttagggcctggtga

SEQ ID NO: 27473 - DNA, 1179 bp, Macaca Mulatta
  misc_feature (1)...(1179): n = A,T,C or G
atcacacgcgctgcaatgtgtggattctggatggagacttgtaccacaaaggcctgctgaaatttgcagtttctgctgaatccttgccagagaccctcgtcatttttgttgcagacatgtctagaccttggactgtgatggaatctctgcagaaatgggctagtgttttacgtgagcacattgataaaatgaaaattccaccagaaaaaatgagggagctggaacggaagtnnnnnnnnnnnnnnnnnnnnnnnnnnnnnnnnnnnnnnnnnnnnnnnnnnnnnnnnnnnnnnnnnnnnnnnnnnnnnnnnnnnnnnnnnnnnnnnnnnnnnnnnnnnnnnnnnnnnnnnnnnnnnnnnnnnnnnnnnnnnnnnnnnnnnnnnnnnnnnnnnnnnnnnnnnnnnnnnnnnnnnnnnnnnnnnnnnnnnnnnnnnnnnnnnnnnnnnnnnnnnnnnnnnnnnnnnnnnnnnnnnnnnnnnnnnnnnnnnnnnnnnnnnnnnnnnnnnnnnnnnnnnnnnnnnnnnnnnnnnnnnnnnnnnnnnnnnnnnnnnnnnnnnnnnnnnnnnnnnnnnnnnnnnnnnnnnnnnnnnnnnnnnnnnnnnnnnnnnnnnnnnnnnnnnnnnnnnnnnnnnnnnnnnnnnnnnnnnnnnnnnnnnnnnnnnnnnnnnnnnnnnnnnnnnnnnnnnnnnnnnnnnnnnnnnnnnnnnnnnnnnnnnnnnnnnnnnnnnnnnnnnnnnnnnnnnnnnnnnnnnnnnnnnnnnnnnnnnnnnnnnnnngagcaggtgttcataatgaagcaacannnnnnnnnnnnnnnnnnnnnnnnnnnnnnnnnnnnnnnnnnnnnnnnnnnnnnnnnnnnnnnnnnnnnnnnnnnnnnnnnnnnnnnnnnnnnnnnnnnnnnnnnnnnnnnnnnnnnnnnnnnnnnnnnnnnnnnnnnnnnnnnnnnnnnnnnnnnnnnnnnnnnnnnnnnnnnnnnnnnnnnnnnnnnnnnnnnnnnnnnnnnnnnnnnnnnnnnnnnnnnnnnnnnnnnnnnnnnnnnnnnnnnnnnnnnnnnnnnnnnnnnnnnnnnnnnnaggacaaaagactgtgttgtcaaatgttcaggaagaactggatagaatgactcgaaagccagactctatggtaacaaactcttcaacagaaaatgaagcctga

SEQ ID NO: 27474 - DNA, 294 bp, Macaca Mulatta
aatggccttctccaaatggcccctctttatttctttacaagtccaccaaaattcgaactgtcagctgtccctctggggcacagggacacagctgcacctctggagcaggctgcctggaagcaggtgggagggagagtgttgccacccgaagtgggagagaagggggagatgtcaggcttcacagccagctgtggggagggccaaggaatctgaccctggaatgttttctcctctggagtctgcccttgatctgtgctgtgcagtaagtactcactagtcacataagactccttg

SEQ ID NO: 27475 - DNA, 1728 bp, Macaca Mulatta
  misc_feature (1)...(1728): n = A,T,C or G
ggttttccattattatggccctgctttagaatttgtgcagatgataaaattatcagatctaccctcctgctatatgtcggacattgaatttgagttnnnnnnnnnnnnnnnnnnnnnnnnnnnnnnnnnnnnnnnnnnnnnnnnnnnnnnnnnnnnnnnnnnnnnnnnnnnnnnnnnnnnnnnnnnnnnnnnnnnnnnnnnnnnnnnnnnnnnnnnnnnnnnnnnnnnnnnnnnnnnnnnnnnnnnnnnnnnnnnnnnnnnnnnnnnnnnnnnnnnnnnnnnnnnnnnnnnnnnnnnnnnnnnnnnnnnnnnnnnnnnnnnnnnnnnnnnnnnnnnnnnnnnnnnnnnnnnnnnnnnnnnnnnnnnnnnnnnnnnnnnnnnnnnnnnnnnnnnnnnnnnnnnnnnnnnnnnnnnnnnnnnnnnnnnnnnnnnnnnnnnnnnnnnnnnnnnnnnnnnnnnnnnnnnnnnnnnnnnnnnnnnnnnnnnnnnnnnnnnnnnnnnnnnnnnnnnnnnnnnnnnnnnnnnnnnnnnnnnnnnnnnnnnnnnnnnnnnnnnnnnnnnnnnnnnnnnnnnnnnnnnnnnnnnnnnnnnnnnnnnnnnnnnnnnnnnnnnnnnnnnnnnnnnnnnnnnnnnnnnnnnnnnnnnnnnnnnnnnnnnnnnnnnnnnnnnnnnnnnnnnnnnnnnnnnnnnnnnnnnnnnnnnnnnnnnnnnnnnnnnnnnnnnnnnnnnnnnnnnnnnnnnnnnnnnnnnnnnnnnnnnnnnnnnnnnnnnnnnnnnnnnnnnnnnnnnnnnnnnnnnnnnnnnnnnnnnnnnnnnnnnnnnnnnnnnnnnnnnnnnnnnnnnnnnnnnnnnnnnnnnnnnnnnnnnnnnnnnnnnnnnnnnnnnnnnnnnnnnnnnnnnnnnnnnnnnnnnnnnnnnnnnnnnnnnnnnnnnnnnnnnnnnnnnnnnnnnnnnnnnnnnnnnnnnnnnnnnnnnnnnnnnnnnnnnnnnnnnnnnnnnnnggaaaagacttttgttttgacaccagaacttagtcctgggaaacttcaggtcttaccttttgagaaagcctcagtatgtcattatcatggaattgannnnnnnnnnnnnnnnnnnnnnnnnnnnnnnnnnnnnnnnnnnnnnnnnnnnnnnnnnnnnnnnnnnnnnnnnnnnnnnnnnnnnnnnnnnnnnnnnnnnnnnnnnnnnnnnnnnnnnnnnnnnnnnnnnnnnnnnnnnnnnnnnnnnnnnnnnnnnnnnnnnnnnnnnnnnnnnnnnnnnnnnnnnnnnnnnnnnnnnnnnnnnnnnnnnnnnnnnnnnnnnnnnnnnnnnnnnnnnnnnnnnnnnnnnnnnnnnnnnnnnnnnnnnnnnnnnnnnnnnnnnnnnnnnnnnnnnnnnnnnnnnnnnnnnnnnnnnnnnnnnnnnnnnnnnnnnnnnnnnnnnnnnnnnnnnnnnnnnnnnnnnnnnnnnnnnnnnnnnnnnnnnnnnnnnnnnnnnnnnnnnnnnnnnnnnnnnnnnnnnnnnnnnnnnnnnnnnnnnnnnnnnnnnnnnnnnnnnnnnnnnnnnnnnnnnnnnnnnnnnnnnnnnnnnnnnnnnnnnnnnnnnnnnnnnnnnnngatactgaaagaagtagttactgaaaccctgaagaaacacagtattaccgagacccatgaatgtttcactgcatgcagccagcgtctctttgaaatctctaagttctatctaaag

SEQ ID NO: 27476 - DNA, 348 bp, Macaca Mulatta
aaactggaaagaatcaatgagtttaattaaccagttcattggggtttttcagttcctctctaggaattaaaatgtctggattagttacaaaaacacagattatttttatttctctttgcacattattttttactggagtcaagggatgttgagtagtagcctcctcactatgaggtgggtggagattggcttataagtctgtatcaacttagtaaaaaaatagtaatcattaacaaattaattatttataatcatgtttgtttttttctgtatccacttaggcatctttctatttaaactggctttaaatagccaagaatttaaatgctagccaaaaattgatgtatt

SEQ ID NO: 27477 - DNA, 122 bp, Macaca Mulatta
ctgcgtggtggatgagatggacttctctaccatggagctggacgaggccctcaggaaattccaggcgcacatccgtgtccaaggggaggctcagaaagtggagcggctcatcgaggcgttca

SEQ ID NO: 27478 - DNA, 398 bp, Macaca Mulatta
tcttgttaatgccatcagcatgggaaaatgggcagctgggcaagatggggacccctccgatccctggctgctccctatggggctgaagctctcccagcacacaaatccccaggatctagctgctgatcctccgaggccactctgggccctggcaggccctagagctgcagctgtgaatggtacagctgtgtgtcctttctgtcccccggctgtccactgggctggagtctccagactgtgagggttagatacatacaataacaggatgggagctggggctgagttgtctctagaggtggcaagcactgaacattctgtcttagaggtaaaccatggataacaacagcgccttatgatggagaggcccttattatcagatctaggcagggacagaaggt

SEQ ID NO: 27479 - DNA, 199 bp, Macaca Mulatta
atgtaaagaagcagttttagtgcagatttaacacatcattaatggaaaatttaaatatttataaaattaaaatcctactacatgaaggagaagaaaatttgtattttgcaaatcagaaatcagaatgtgacttacctaaattaaacataagattagcttaagaataaaatcattgagtgtgaccaacttgggcagtact

SEQ ID NO: 27480 - DNA, 806 bp, Macaca Mulatta
  misc_feature (1)...(806): n = A,T,C or G
gggcctttcggccggaaccgccatcttccagtaatttgccaaaatgacgaacacaaagggaaagaggagaggcacccgatatatgttctctaggccttttagaaaacatggagttgttcctttggccacgtatatgcgaatctataagaaaggtgatatcgtagacatcaagggaatgggtaccgttcaaaaaggaatgccccacaagtgttaccatggcaaaactgggagagtctacaacgttacccagcatgctgttggcattgttgtaaacaaacaagttaagggcaagattcttgccaagagaattaatgtacgtattgagcacattaagcattctaagagcagagatagcttcctgaaacgcgtgaaggaaaatgatcagaaaaagaaagaagccaaagagaaaggtacctgggttcaactgaagcgccagcctgctccacccagagaagcacactttgtgagaaccaatgggaaggagcctgagctgctggaacctattccctatgaattcatggcataataggnnnnnnnnnnnnnnnnnnnnnnnnncctctgggctgaaaaatgtttctcttcattgagtagaagtgtggtgtcctctcccccaaagaaatactttaagcaaattttaagttgtgtcctaatttcattatgtaatgtcctttccctattcaaattttaatgtattccccttgctgaaaggatgtaaaggtagcttttattgtgcaaccagaattactcacgttggggttagaaaaatggccaaggtattattgtttcggaaatattttgtaatgggt

SEQ ID NO: 27481 - DNA, 117 bp, Macaca Mulatta
ctggaattattaaaacatatagtatgctagctatccttttaaattatgctgattctcttctgaaattatggtcacactatacactatagcatttcagttttatcctttgataaaaca

SEQ ID NO: 27482 - DNA, 214 bp, Macaca Mulatta
tgtccactttacaaaagaaaacagcattgtgattactcccagggactgtattttatcttcagtggctgcctgattttacccccacaattaaagttgaaggaatcctgaacaaacttgtgatctatttgctcgtgtttttacattttcagcaaggctgtttctcccacgtttgggtagacattctcatggcttaatgttaaacacagttaacact

SEQ ID NO: 27483 - DNA, 1721 bp, Macaca Mulatta
  misc_feature (1)...(1721): n = A,T,C or G
atgtatggaagtgctcgctctgttgggaaggtggaaccgagcaaccagagccctgggcgttcacccaggcttccacgttcccctcgcttgggtcatcgtcgaaccaatagtacaggagggagttcgggaagcagtgttggaggtggcagtgggaaaaccctttctatggaaaatatacagtctttaaatgctgcctatgccacctctggccctatgtatctaagtgaccatgaaaatgtgggttcagaaacacctaaaagcaccatgacacttggccgttctgggggacgtctgccttacggtgttcggatgactgctatgggcagtagccccaacatagctagcagtggggttgccagtgacaccatagcgtttggagagcatcacctccctcctgtgagtatggcatccactgtgcctcactcccttcgtcaggcgagagataacacaatcatggatctgcagacacagctgaaggaagtattaagggaaaatgatctcttgcggaaggatgtggaagtaaaggagagcaaattgagttcttccatgaatagcatcaagaccttctggagcccagagctgaagaaagaacgagccctgagaaaagatgaagcttccaaaatcaccattttggaagaacagtacagagttgtacaggaggagaaccaggtnnnnnnnnnnnnnnnnnnnnnnnnnnnnnnnnnnnnnnnnnnnnnnnnnnnnnnnnnnnnnnnnnnnnnnnnnnnnnnnnnnnnnnnnnnnnnnnnnnnnnnnnnnnnnnnnnnnnnnnnnnnnnnnnnnnnnnnnnnnnnnnnnnnnnnnnnnnnnnnnnnnnnnnnnnnnnnnnnnnnnnnnnnnnnnnnnnnnnnnnnnnnnnnnnnnnnnnnnnnnnnnnnnnnnnnnnnnnnnnnnnnnnnnnnnnnnnnnnnnnnnnnnnnnnnnnnnnnnnnnnnnnnnnnnnnnnnnnnnnnnnnnnnnnnnnnnnnnnnnnnnnnnnnnnnnnnnnnnnnnnnnnnnnnnnnnnnnnnnnnnnnnnnnnnnnnnnnnnnnnnnnnnnnnnnnnnnnnnnnnnnnnnnnnnnnnnnnnnnnnnnnnnnnnnnnnnnnnnnnnnnnnnnnnnnnnnnnnnnnnnnnnnnnnnnnnnnnnnnnnnnnnnnnnnnnnnnnnnnnnnnnnnnnnnnnnnnnnnnnnnnnnnnnnnnnnnnnnnnnnnnnnnnnnnnnnnnnnnnnnnnnnnnnnnnnnnnnnnnnnnnnnnnnnnnnnnnnnnnnnnnnnnnnnnnnnnnnnnnnnnnnnnnnnnnnnnnnnnnnnnnnnnnnnnnnnnnnnnnnnnnnnnnnnnnnnnnnnnnnnnnnnnnnnnnnnnnnnnnnnnnnnnnnnnnnnnnnnnnnnnnnnnnnnnnnnnnnnnnnnnnnnnnnnnnnnnnnnnnnnnnnnnnnnnnnnnnnnnnnnnnnnnnnnnnnnnnnnnnnnnnnnnnnnnnnnnnnnnnnnnnnnnnnnnnnnnnnnnnnnnnnnnnnnnnnnnnnnnnnnnnnnnnnnnnnnnnnnnnnnnnnnnnnnnnnnnnnnnnnnnnnnnnnnnnnnnnaggacagtctccgtaagaaggatgacaggattgaagagctggaagaagcactaagagaaagtgtacagataactgcagagcgggaaatggtgctagcacaagaggaatcagccaggaccaatgctgaaaaacaggt

SEQ ID NO: 27484 - DNA, 769 bp, Macaca Mulatta
  misc_feature (1)...(769): n = A,T,C or G
ttgtatccagaatctcatggcataattgacaataaaatgtatgatcccaaaaatgaatgcttccttttcacttaaaagtaaagagaaatttaatcctgagtggtacaaaggagaaccannnnnnnnnnnnnnnnnnnnnnnnnnnnnnnnnnnnnnnnnnnnnnnnnnnnnnnnnnnnnnnnnnnnnnnnnnnnnnnnnnnnnnnnnnnnnnnnnnnnnnnnnnnnnnnnnnnnnnnnnnnnnnnnnnnnnnnnnnnnnnnnnnnnnnnnnnnnnnnnnnnnnnnnnnnnnnnnnnnnnnnnnnnnnnnnnnnnnnnnnnnnnnnnnnnnnnnnnnnnnnnnnnnnnnnnnnnnnnnnnnnnnnnnnnnnnnnnnnnnnnnnnnnnnnnnnnnnnnnnnnnnnnnnnnnnnnnnnnnnnnnnnnnnnnnnnnnnnnnnnnnnnnnnnnnnnnnnnnnnnnnnnnnnnnnnnnnnnnnnnnnnnnnnnnnnnnnnnnnnnnnnnnnnnnnnnnnnnnnnnnnnnnnnnnnnnnnnnnnnnnnnnnnnnnnnnnnnnnnnnnnnnnnnnnnnnnnnnnnnnnnnnnnnnnnnnnnnnnnnnnnnnnnnnnnnnnnnnnnnnnnnnnnnnnnnnnnnnnnnnntgccgggaaccaaaccaacacttcaaaccttacctgaaacatttcttacctaagcgtttgcactttgctaagagtgatagaattgagcccttgacattctatttggaccctcagtggcaacttgcattg

SEQ ID NO: 27485 - DNA, 212 bp, Macaca Mulatta
gcagcagctgtcgattcggcagaccgaagtcctcggcccacttctgcacccgccattgctcagggtcaggttgcagaaggtggcgtcctagatgcctctgctaaaaaagcagtggtccctaaagcacagaaggaaacagtgaaggctgaagtgaaaaaggaagacgagccacctgagcaagctgagccagagcccacagaagcatggaaggt

SEQ ID NO: 27486 - DNA, 4221 bp, Macaca Mulatta
  misc_feature (1)...(4221): n = A,T,C or G
ggacctgtttcagaagcccgaggtgtccaccgtcaagttcctctttctggtgggcggctttgccgaggcgcccctcctgcagcaggcagtgcaggctgccttcggggaccagtgccggatcatcattccccaggacgtgggcctcaccatcctcaagggcgccgtcctctttggtctggaccctgcggtcatcaaggttcgccggtcgccgctcacctatggngntggngtgtgttgaaccgctacgtggagggcaagcacccgcccgagaagctgctggtgaaggatggcactcggnnnnnnnnnnnnnnnnnnnnnnnnnnnnnnnnnnnnnnnnnnnnnnnnnnnnnnnnnnnnnnnnnnnnnnnnnnnnnnnnnnnnnnnnnnnnnnnnnnnnnnnnnnnnnnnnnnnnnnnnnnnnnnnnnnnnnnnnnnnnnnnnnnnnnnnnnnnnnnnnnnnnnnnnnnnnnnnnnnnnnnnnnnnnnnnnnnnnnnnnnnnnnnnnnnnnnnnnnnnnnnnnnnnnnnnnnnnnnnnnnnnnnnnnnnnnnnnnnnnnnnnnnnnnnnnnnnnnnnnnnnnnnnnnnnnnnnnnnnnnnnnnnnnnnnnnnnnnnnnnnnnnnnnnnnnnnnnnnnnnnnnnnnnnnnnnnnnnnnnnnnnnnnnnnnnnnnnnnnnnnnnnnnnnnnnnnnnnnnnnnnnnnnnnnnnnnnnnnnnnnnnnnnnnnnnnnnnnnnnnnnnnnnnnnnnnnnnnnnnnnnnnnnnnnnnnnnnnnnnnnnnnnnnnnnnnnnnnnnnnnnnnnnnnnnnnnnnnnnnnnnnnnnnnnnnnnnnnnnnnnnnnnnnnnnnnnnnnnnnnnnnnnnnnnnnnnnnnnnnnnnnnnnnnnnnnnnnnnnnnnnnnnngaaacggccacagagaaggaaatcagtacattgctgcagcagtggttgcgctgctttgaacagatctcctttaagtagaatttaggatgccctattgctgtctttctagatttaaaatgacatctttgaaccaggaggagatcttcatctgagacttttctttctaaagtttttggatggcagtcaatataaaatgccacccatctgcagttaatttcttttcatcatcatgtgattaaaagtggtgaatcagtgggaactgggaatgtttttagctggtggtagaaggctgcctacactgggcactgttttaggttctcatataatttaaatagcaaggaggttcggggaagaataaccgtagccttgggtaatccaccagggcttttgcgagtaggagagctgatacctcacattcttagcaggtgaaaacttgccatgatggaaatagatagtaaagagttactgacgtatcccaaattctatgctgtggtataaattccctgcatgcccagccctgatttctgagttcataagtaactctagtgaaccttagtaggaattctgggtaagaaaataaggttgcctttggtcttgtttgcatcaccaagcccaggcatccagaagagcccctcaccttgaaaagcagacagattttaaattaacccccgccttcccactcgccttcatctccctaagagttctggccatttagtcccacattttgaaaggaatacatgggtgaaatttgggaagagaatctgtgctatgcaatgtttcattaanatcttcagttttttaagtctctctcaaaataatttgtagatctatacttgatgnnnnnnnnnnnnnnnnnnnnnnnnnnnnnnnnnnnnnnnnnnnnnnnnnnnnnnnnnnnnnnnnnnnnnnnnnnnnnnnnnnnnnnnnnnnnnnnnnnnnnnnnnnnnnnnnnnnnnnnnnnnnnnnnnnnnnnnnnnnnnnnnnnnnnnnnnnnnnnnnnnnnnnnnnnnnnnnnnnnnnnnnnnnnnnnnnnnnnnnnnnnnnnnnnnnnnnnnnnnnnnnnnnnnnnnnnnnnnnnnnnnnnnnnnnnnnnnnnnnnnnnnnnnnnnnnnnnnnnnnnnnnnnnnnnnnnnnnnnnnnnnnnnnnnnnnnnnnnnnnnnnnnnnnnnnnnnnnnnnnnnnnnnnnnnnnnnnnnnnnnnnnnnnnnnnnnnnnnnnnnnnnnnnnnnnnnnnnnnnnnnnnnnnnnnnnnnnnnnnnnnnnnnnnnnnnnnnnnnnnnnnnnnnnnnnnnnnnnnnnnnnnnnnnnnnnnnnnnnnnnnnnnnnnnnnnnnnnnnnnnnnnnnnnnnnnnnnnnnnnnnnnnnnnnnnnnnnnnnnnnnnnnnnnnnnnnnnnnnnnnnnnnnnnnnnnnnnnnnnnnnnnnnnnnnnnnnnnnnnnnnnnnnnnnnnnnnnnnnnnnnnnnnnnnnnnnnnnnnnnnnnnnnnnnnnnnnnnnnnnnnnnnnnnnnnnnnnnnnnnnnnnnnnnnnnnnnnnnnnnnnnnnnnnnnnnnnnnnnnnnnnnnnnnnnnnnnnnnnnnnnnnnnnnnnnnnnnngaacaaaccacagaactagagagtgctggttagtcacataacttagtagcgggattgtgtatccaggcacaaaggtgtctttgctagtgttctcttgctccctgccctgcttccaacgctaaatggtatgggtctttctttgttgccagccatattctacaaataagacttttcaatgtagttatgagtaatataattttatgtacatataatgttagaatattgtacagaatctttgtttctatgatgcgcttttcttgtttcaaaaaggaaaatgatccttgatttttgttgatgatacttttgttactgtccttaattttccacagtttgatttcttaattgtgctcactaagcatcagtttgtgctgatgccaagctatggactatgtacgcaagactgagcaatagacagaggtgcctagggtcagaacacactgaacatacatggaccacctggatcaggagcctcatcagacccttctccatgcacatccttcccaaagagtcacagattccattgaaaggagcagattctatcaattctcctgtgcagactttaagagctgaatgttcttggtctggaagcaatgtgactgcgcagaacaacctaagaaacgcttgtgtcctcaggggtcgttgacctctccttccgggacagatcagtcactctgagggcaaagcgtggtccactgtgtgtgacgttttcaggatgctagggtcaaagaaggaaaccaagtggtacataagcccagcttttctgcttggctaagtgtaagtgtgagtaacatggccaagcccctcttttttgggctaatgtaaagcctttcccgccttgcattaacgctatctccctgtgtactgtttctcgtaaatgagcagnnnnnnnnnnnnnnnnnnnnnnnnnnnnnnnnnnnnnnnnnnnnnnnnnnnnnnnnnnnnnnnnnnnnnnnnnnnnnnnnnnnnnnnnnnnnnnnnnnnnnnnnnnnnnnnnnnnnnnnnnnnnnnnnnnnnnnnnnnnnnnnnnnnnnnnnnnnnnnnnnnnnnnnnnnnnnnnnnnnnnnnnnnnnnnnnnnnnnnnnnnnnnnnnnnnnnnnnnnnnnnnnnnnnnnnnnnnnnnnnnnnnnnnnnnnnnnnnnnnnnnnnnnnnnnnnnnnnnnnnnnnnnnnnnnnnnnnnnnnnnnnnnnnnnnnnnnnnnnnnnnnnnnnnnnnnnnnnnnnnnnnnnnnnnnnnnnnnnnnnnnnnnnnnnnnnnnnnnnnnnnnnnnnnnnnnnnnnnnnnnnnnnnnnnnnnnnnnnnnnnnnnnnnnnnnnnnnnnnnnnnnnnnnnnnnnnnnnnnnnnnnnnnnnnnnnnnnnnnnnnnnnnnnnnnnnnnnnnnnnnnnnnnnnnnnnnnnnnnnnnnnnnnnnnnnnnnnnnnnnnnnnnnnnnnnnnnnnnnnnnnnnnnnnnnnnnntagaaatgtatagctgtgattaagctgcatatgtatgctgggaaatggcttaagtggatggctagtataaaagttgttggccataacgtcacacctctcatctgcttgaaatatggaccactattctaaaatatcagctactggggtctcgttcactacaagataaattcaaacttcacagaactttgcagcagttcgccaccagacaggattgtgtctgcaaactcttgtcttcacagatgcctaataaagcaaaactctgaatct

SEQ ID NO: 27487 - DNA, 608 bp, Macaca Mulatta
  misc_feature (1)...(608): n = A,T,C or G
tcagacttggagagcaaaacaaaaaccaaagagtcagccttacagaatgatatttcatgggaagaattacattgtggcctaatgatggaaagatctacaaaaggaagcaccatgtattccaccttgggaagaatccccaaatgtaataagctagaaagccaacaagagaaccaaagaatggngatttagttaatcattcaaggagttacacaaaaatgaaaacctttgaatgtaatatttgtgaaaaaatcttcaaacagcttattcaccttactgaacacatgagaattcataccggggagaaacctttcagatgtaaggaatgtggaaaagcctttagccaaagttcatctcttattccacatcagagaattcatactggtgagaaaccctatgaatgtaaggaatgtgggaaaaccttcagacatccttcatcacttactcaacatgttagaattcatactggggagaagccctatgaatgtagggtatgtgagaaagccttcagccaaagcattggactgatccagcatttgagaactcatgttagagagaaaccttttacctgcaaagactgtggaaaaacgtttttccagattagacacctt

SEQ ID NO: 27488 - DNA, 1103 bp, Macaca Mulatta
  misc_feature (1)...(1103): n = A,T,C or G
gggtttctccgctggcaccggcgctgctccctgctcctcctccctaaccatggcgttcacgttcgcggccttctgctacatgctggcgctgctgctcactgccgcgctcatcttcttcgccatttggcacattatagcatttgatgagctgaagactgattacaagaatcctatagaccagtgtaataccctgaatccccttgtactcccagagtacctcatccacgctttcttctgtgtcatgtttctctgtgcagcggagtggcttacactgggcctcaacatgcccctcttggcatatcatatttggaggtatatgagtagaccagtgatgagtggcccaggactctatgaccctacaaccatcatgaatgcagatattctagcatattgtcagaaggaaggatggtgcaaattagctttttatcttctagcatttttttactacctatacggcatgatctatgttttggtgagctcttagaacaacacacagaagaattggtccagttaagtgcatgcaaaaagccaccaaatgaagggattctatccagcaagatcctgtccaagagtagcctgtggaatctgatcagttactttaaaaaatgactccttatttttaaatgtttccacattttttgcttgtggaaagactgttttcatatgttatacttgggatgaagaatttaaatggaattacgtataaattaatataaaatgattacctctggtgttgacaggtttgaacttgcacttcttaaggaacagccataatcctctgaatgatgcattaattactgactgtcctagtacattggaagcttttgttcataggaacttgtagggctcattttggtttcattggaacagtatctaattataaatagctgtagatatcaggtgcttctgatgaattgaaatgtgtatctgactagtgggaaacttcatgggcccccttaccggtctgtaaatgattatatacggatccttttacaaaataaaagggggaatttccccttcaactcaaattttccctggaattgaagaagaaaaattccccatttccannnnnnnnnnnnnnnnnnctttattctaagcaaaaa

SEQ ID NO: 27489 - DNA, 525 bp, Macaca Mulatta
tgtatttgtacattgaactgctgtagttatacttttatattaaagggggaaaagtccttataagtaatgcctattaggctagtgctattactttgttcagcaaattctaccctggctttagagtttttaatagatgctacacctaataaaagtgcctctcatattgcaggaatgatttcagatgtgtaaggagactgaagaggagataccagtttttagtcttggaaagcgagttcacagtataaggaggttgagatctttcttttacatgagaaatctttgaatctcattcatgcaatcagagttgtagccagtttttgaaaaccttattttcaaaggaaataaatgattcactgtaggattcatttaaatatcaagcatcaccagtatatgctttgacggtgtgtgtatataacttaaagttctttcaaaagcctgatacagaaatgtgtccccagtttggtagcaatgtggaaaacctggcttgagatgatgtggagctgtccctcagaaaacaaagccatg

SEQ ID NO: 27490 - DNA, 776 bp, Macaca Mulatta
gctccacgcctccacatccctatgtacatcttcctcagtaatttggccttgacagacatctgcttcacctccaccatggtccccaagatgctgcagaatattttctcccctacaaaggtaatttcctacacaggctgtttagcccaaacttatttcttcatttgcttcacagccatggaaaacttcatcctggctgtgatggcctatgacaggtacatcgccatctgcaaccctttccactaccctatgatcctgactaggatgctgtgtgtgaagatggtgatgatgtgccatgccctctcccaccttcatgcactgctgcacaccttttccatgggccgactaatcttctgtgcagataagagaatccctcacttcttctgtgacctctatgctctgatgaagatctcctgcaccagtacctacctcaacaccctgatgattcacacagaaggtgctgttgtaatcagtggagctctggccttcatttctgcctcctatgcctgcatcattttggtggtcctccggatcccctcagccaagggcaagtggaaagccttttctacctgtggctcccacctcactgtggtagccatattctatggcaccctcagttgggtctacttctggcccctttccagctattcagtgaccaagggtcgcattgtaacagttgtgtacacagtggtgactcccatgctgaaccccttcatctatagcctgaggaatggggatgtcaagggagcattcatgaaaaggagtgagcagaatgcaga

SEQ ID NO: 27491 - DNA, 909 bp, Macaca Mulatta
tgaatacaacgtacgtgatgatggctcagatcttaagatctcacctgataaaggctacagtgattcctaatcaagtgaaaatgcttccatatattggtatcattagaaatagaatgatgtcaacccataaatccaaaaagaagatcagagaatattataggctgctgaacgtggaagaaggctgctctgcagatgaagtcagggaatcttttcataagcttgccaagcaatatcatcctgacggtggctctaatacggctgattctgcaacatttataaggattgaaaaagcttatagaaaggtgctctcccatgtgatagaacaagcaaatgcgagtcagaataaaggtgaagaagaagaagatgtagaaaaattcaaatataaaacaccccaacaccggcattatttaagttttgaaggtattggttttgggactccaactcaacgagagaagcaatataggcaatttagggcagaccgtgctactgaacaagtgatggaatatcaaaagcagaaactacaaagccagtattttcctgatagtataactgttaaaaatataaaacagagcaaacagcaaaagataactcaggctatagagcgtttagtggaggacctcattcaagaatccatggcaaaaggagactttgacaatctcagtgggaaaggaaaacctctgaaaaagttttctgactgttcttacatcgatcccatgactcacaacctgaaccgaatactgatcgataacggataccaaccagaatggatccttatgcaaaaggaaatcagcgatactattgagcaactcagagaggcaattttagtgtctaggaaaaaacttgggaatccaatgacaccaactgaacagaaacagtggaaacatgtttgtgagcagtttcaagaaaaca

SEQ ID NO: 27492 - DNA, 511 bp, Macaca Mulatta
ggtatttttaatcagttagacttgtagtatcagtgaaataatgtaggtttaaagactgggctagcttaataccagatttacttgttaagtgactgttctggaatgtttcctttggactggggttgtaatgcggtttaaggcaatgactaacaagcagaattccaggagtccttgaagcagagggcactggaagacaatacagcagattaaaatagcacagctcatgtggcatagatgggtatttaagacattcgagtaaattggaaagagcatgatgtttaaattacctttagtagcatgttcgtttgctataccgtcatgactttagggggatgattattagtcacatagagcctcggagtaccactggaaacatacaggtaggagtttaggtggcttctgtttttcaaaagatgatctaatcctagtatctatactgctcacttggcacacctggctggtgggctgtgtaaggtgactagctaagtgaaaaaagcctgctaggtgtgac

SEQ ID NO: 27493 - DNA, 1977 bp, Macaca Mulatta
tggttatccaaatgccaacccagtccaggtttcaacagcaacattttttcttttcttcaacgaagagtagagaatggagatcagctctatcaatactgttcattgttaataaaaagtatacctctcaagcaacagcttcactgggatcctagcagtcacagtttgcaggggtttatggactttggtcttggaaaacttgatgctgatgaaacgccacttgcttcagaaactgttttgttaatggcagtgggtatttttggccattggagaacacctcttggttatttttttgttaacagagcatctggatatttgcaagctcagctgcttcgtctgactattggtaaactgagtgacataggaatcacagttctggctgttacatctgatgccacagcacatagtgttcagatggcaaaagctttggggatacatattgatggagacgacatgaaatgtacatttcagcatccttcatcgtctagtcaacagattgcatacttctttgactcttgccacttgctaagattaataagaaatgcatttcagaattttcaaagcattcagtttattaatggcatagcacattggcagcaccttgtggagttagtggcactggaggaacaggaattatcaaatatggaaagaataccaagtacacttgcaaatttgaaaaaccatgtactgaaagtgaattgtgccgcccaactctttagtgagagtgtagccagtgcattagaatatttgctatccttagacctgccaccttttcaaaactgtattggtaccatccattttttacgtttaattaacaatctatttgacatctttaacagtaggaactgttatggaaagggacttaaagggcctctgttgcctgaaacttacggtaaaataaaccacgtgttaattgaagccaagactatttttgttacattatctgacactagcaataatcaaataattaagggtaagcaaaaactaggattcctgggatttttgctcaatgctgagagcttaaaatggctctaccaaaattatgttttcccaaaggtcatgccttttccttatcttctgacttataaattcagtcacgatcatctggaattatttctaaatatgcttaggcaggtattagtaacaagttctagccctacctgcatggcattccagaaagcttaccataatttggagaccagatacaaatttcaagatgaagtttttctaagcaaagtaagcatctttgacatttcagttgctcgaaggaaagacttggcactttggacagttcaacgtcagtatggtgtcagcgttacaaagactctctttcacgaagagggtatttgtcaagactggtctaattgttcactaagtgaggcattattagacctgtcagatcataggcgaaatctcatctgttatgctggttatgttgcaaacaagttatcagctcttttaacttgtgaggactgcatcactgcactgtatgcatcggatctcaaagcctctaaaattgggtcactattatttgttaaaaagaagaatggtttgcattttccttcagaaggtctgtgtcgggtcataaatatttgtgagcgagttgtaagaacccattcaagaatggcaatttttgaactagttcctaaacaaagggaattgtatcttcaacagaaaatattatgtgagctttctgggcatatttatctttttgtagatttgaataagcatctctttgatggagaagtgtgtgccatcaatcactttgtcaagttgctaaaggatataataatctgtttcttaaatatcagagctaaaaatgttgcacagaaccctttaaaacagtcagagagaactgatatgaaaactttatcaaggaaacactggtcatctctacaggattataaatgttcaagttttgctaataccagtagtaaattcaggcatttgctgagtaatgatggatatccattcaaatga

SEQ ID NO: 27494 - DNA, 415 bp, Macaca Mulatta
  misc_feature (1)...(415): n = A,T,C or G
ccagaacttctacccaggctgcctcagcaccatgtaccgagcactctggctcctcgcgcgctcgcgtcgccttgtgcggcctccagcctcagcctcagcttcggctcccggcttgagtggcgctgccgtgccctcgttttggcccccgaacgcggctcgaatggnnnnnnnnnnnnnnnnnnnnnnnnnnnnnnnnnnnnnnnnnnnnnnnnnnnnnnnnnnnnnnnnnnnnnnnnnnnnnnnnnnnnnnnnnnnnnnnnnnnnnnnnnnnnnnnnnnnnnnnnnnnnnnnnnnnnnnaccccagttattaaagcttttggcatcttgaagcgaaagactgctgaagtaaaccaggattatggtcttgatccaaagattgctaatgcaatcatgaaggcagcagacgaggtagga

SEQ ID NO: 27495 - DNA, 216 bp, Macaca Mulatta
aggctgaaaagagccctggtcccattgtctctcgaactcggagctgggactcttccagtcctgttgaccgtcctgagccagaggctgctagccccaccaccagaactcgcccagtgacccgaagcatgggaacaggagacacccctggcctggaggtaccatctagccctctgcggaaagccaaacgagctcgcctctgctcctccagcagttcgg

SEQ ID NO: 27496 - DNA, 574 bp, Macaca Mulatta
gatgctaagacaggagcaaattcctgtgaacatgatcactatgaaaaacatctcagccacaaacaagctctcacccaccatcagaaaattcatcctgaggagaagctttatgtgtgtactagaatgtgtaaccaggcttcactcagaagtcacatctgtttgagcatcagagaattcatgctggagaaaagtcccgtgaatgtgacaagagcaacaaagtcttcccccagaaaccccaggttgatgcacatctgagtgtttatacagcagaaaaaccctatctgtgtactcaatgtggaaaagtctttaccttcaaatcaagcctcgttacacatcaaaaaattcataccggccagaaaccctacaaatgcagtgaatgtggaaaagcctttatccagagatcagacctctttagacatctgagaattcatacaggagaaaaaccttatgaatgcagtgaatgtggaaaaggcttctcccagaactcagacctcagtatacatcagaaaactcataccggagagaaacactatgaatgccatgaatgtgggaaggctttcacaagaaaatcagc

SEQ ID NO: 27497 - DNA, 772 bp, Macaca Mulatta
  misc_feature (1)...(772): n = A,T,C or G
aaggaaaatggcagctcccgagcagccgcttgcgatatcaaggggatgcacgagctcctcctcgctttccccgcctcggggcgaccgaacccttctggtcaggcacctgccggctgagcttaccgctgaggagaaagaggacttgctgaagtacttcggggcgcagtccgtgcgcgtcctgtcagataaggggcgactnnnnnnnnnnnnnnnnnnnnnnnnnnnnnnnnnnnnnnnnnnnnnnnnnnnnnnnnnnnnnnnnnnnnnnnnnnnnnnnnnnnnnnnnnnnnnnnnnnnnnnnnnnnnnnnnnnnnnnnnnnnnnnnnnnnnnnnnnnnnnnnnnnnnnnnnnnnnnnnnnnnnnnnnnnnnnnnnnnnnnnnnnnnnnnnnnnnnnnnnnnnnnnnnnnnnnnnnnnnnnnnnnnnnnnnnnnnnnnnnnnnnnnnnnnnnnnnnnnnnnnnnnnnnnnnnnnnnnnnnnnnnnnnnnnnnnnnnnnnnnnnnnnnnnnnnnnnnnnnnnnnnnnnnnnnnnnnnnnnnnnnnnnnnnnnnnnnnnnnnnnnnnnnnnnnnnnnnnnnnnnnnnnnnnnnnnnnnnnnnnnnnnnnnnnnnnnnnnnnnnnnnnnnnnnngtatgaagactatatgccgttgcatgcacctcttccacccacgtctcctcagccacctgaggaacctcctttgccagacgaagatgaggaattatctagtgaagaatcagaatatgaaagcactgatgatgaggaccgacaga

SEQ ID NO: 27498 - DNA, 598 bp, Macaca Mulatta
gagctgctgaggcgcgagctgggctgcggctccgtcagggccacgggccacacggggggcgggtgcatcagccagggccggagctacgacacggaccgaggacgagtgttcgtgaaagtgaaccccaaggcggaggccagaagaatgtttgaaggtgagatggcaagtttaactgccatcctgaaaacaaacacagtgagagtgcccaagcccatcaaggttctggatgccccaggcggtgggagcgtgctggtgatggagcatgtggacatgaggcatctgagcagtcatgctgcaaagcttggagcccagctggccgatttacaccttgagaacaagaagcgtggagagacgctcctgaaagaggcgggcacagtggggagaggaggtgggcaggaggaacggccctttgtggaccagtttgggtttgacgtggtgacgtgctgtggatacctcccccaggtgaatgactggcaggaggactgggttgtgttctatgcccggcagcgcattcagccccagatggacatggtggagaaggagtctggggacagggaggccctccagctttggtctgctctgcagttaaagatccctg

SEQ ID NO: 27499 - DNA, 381 bp, Macaca Mulatta
  misc_feature (1)...(381): n = A,T,C or G
gaatacaatgacagattccacaatacttttggaagacgtacaaaaaatgaaagataaaggtgaaatagcacaagcatacattggtttgaaagaaacaaannnnnnnnnnnnnnnnnnnnnnnnnnnnnnnnnnnnnnnnnnnnnnnnnnnnnnnnnnnnnnnnnnnnnnnnnnnnnnnncaggctcctggaatcccagctccagtcacagaagaggagccatgagaatgaggccgaggccctccgtggggagatccagagcctgaaggaggagaacaaccgacagcagcagctgctggcccagaacctgcagctgcccccagaggcccgcatcgaggccagcctgcagcacgagatcacccggctgaccaacgaaaacttg

SEQ ID NO: 27500 - DNA, 341 bp, Macaca Mulatta
  misc_feature (1)...(341): n = A,T,C or G
cagaggaggacaaggatgagcatgtagacagccagccagatgcctcctccagccatattttgaccccggtggctgaaccccctagcacagagcccacccagtctgacgggcccaccaccctgggccccttggatctgctgcccagcgaggagctgttgacagannnnnnnnnnnnnnnnnnnnnnnnnnnnnnnnnagcggacctggctgccctgcttcccgacctctccggccgcctcctcatcaactccgtcttccatgtgggcgctgagcggctccagcagatgctcttctcggactcgcccttcctccagggcttcctacagcagtgcaagttcaca

SEQ ID NO: 27501 - DNA, 790 bp, Macaca Mulatta
gggcctttctaactccgctgcggccatggctccagtgaaaaaacttgtggcgaaggggggcaaaaaaaagaagcaggttctgaagttcactcttgattgcacccaccctgtagaagatggaatcatggatgctgccaattttgagcagttaatgtgtacagaaatgaatgtgtaagtaatgtttctacaagtctttgccacaaactgtcacttccgtctccagcagagggagctggaggaatagtgcttccagatgtggtctcccatgtggggcccagcgatggcagcccctgatggcaagagctctggaggctctggtgaaggggggacaccaaggaaaagtgactgggaagcctctcgtgccaaggatatgggaggtgccctggaaatagctgcctcatgccacttaggccatgactggatttaatgtcagaagttattctacaaacgggtatgctgcagtgcagaggctagacaactgtgaacggggctcccaaagctggcaaaagaagatgcaattgttgccgtgagtgactttgaaagcccctggtgccttgcggtgcccttctgaaattcgaacagtaatgcagaagtgtctgctttagaatttacggtgttctaaaattcatgttttttaaaaagaacttgccctacaagatgggttttcacaaccccgaaaattggtgccccctggtggagatttgcaataaaccttgggaaggtttccaaatgacctccaagttcccctaaccctttggggcctcccccaattttaaaaccaattttttgg

SEQ ID NO: 27502 - DNA, 139 bp, Macaca Mulatta
ggcccacctaccaatggttccgagatgggacccccctttctgatggtcagagcaacaacacagtcagcagcaaggagcggaacctgacgctccggccagctggtcctgagcatagtgggctctattcctgctgcgccca

SEQ ID NO: 27503 - DNA, 707 bp, Macaca Mulatta
ccgtgatgaacggcgtgctaaagttgcatatccctttttctgtagatgaaattgtcggcatgcctgttgattctttcaatagcatgtgaagtaggtactatctgacagacctacaagtctcacttatccgtgatatcagacgaagagggaaaaacaaagttgctgcacagaactgtcgtaaacgcaaattggacataattttgaatctagaaaatgatgtatgtaacttgcaagcaaagaaggaaactcttaagagagagcgaacacaatgtaacaaagctattaacataatgaaccagaaactgcatgacctttatcatgatgtttttagtagattaagagatgacgaaggtaggccagtcaatccaaaccactatgcacttcagtgtactcatgatggaagtgtcttgttagtacccaaagaactgggggcctcaggccacaaaaaggaaacccaaaagggaaagagaaagtgagaagaaactgaagatggactcattatgtgaagtagtaatgttcggaaactgatttggatcagaaaccatcgaaactgcttcaagaattatctttaagtactgctacctgaataactcagttaaggctctgttttgaagcttattatggacaaatgtttaggacttcaagatcacacttgtgggaaatctgggggagccaaacttttcatgaatgccttgttccaaattcag

SEQ ID NO: 27504 - DNA, 1026 bp, Macaca Mulatta
  misc_feature (1)...(1026): n = A,T,C or G
ggcatgcctgggggcccgggacccgtactgtggctgggacgggaagcagcaacgttgcagcacgctcgaggacagctccaacatgagcctctggacccagaacatcaccgcctgtcctgtgnnnnnnnnnnnnnnnnnnnnnnnnnnnnnnnnnnnnnnnnnnnnnnnnnnnnnnnnnnnnnnnnnnnnnnnnnnnnnnnnnnnnnnnnnnnnnnnnnnnnnnnnnnnnnnnnnnnnnnnnnnnnnnnnnnnnnnnnnnnnnnnnnnnnnnnnnnnnnnnnnnnnnnnnnnnnnnnnnnnnnnnnnnnnnnnnnnnnnnnnnnnnnnnnnnnnnnnnnnnnnnnnnnnnnnnnnnnnnnnnnnnnnnnnnnnnnnnnnnnnnnnnnnnnnnnnnnnnnnnnnnnnnnnnnnnnnnnnnnnnnnnnnnnnnnnnnnnnnnnnnnnnnnnnnnnnnnnnnnnnnnnnnnnnnnnnnnnnnnnnnnnnnnnnnnnnnnnnnnnnnnnnnnnnnnnnnnnnnnnnnnnnnnnnnnnnnnnnnnnnnnnnnnnnnnnnnnnnnnnnnnnnnnnnnnnnnnnnnnnnnnnnnnnnnnnnnnnnnnnnnnnnnnnnnnnnnnnnnnnnnnnnnnnnnnnnnnnnnnnnnnnnnnnnnnnnnnnnnnnnnnnnnnnnnnnnnnnnnnnnnnnnnnnnnnnnnnnnnnnnnnnnnnnnnnnnnnnnnnnnnnnnnnnnnnnnnnnnnnnnnnnnnnnnnnnnnnnnnnnnnnnnnnnnnnnnnnnnnnnnnnnnnnnnnnnnnnnnnnnnnnnnnnnnnnnnnnnngccctggtggaggacctcctgcgcagcgggagcacctccccgcacacggtgagcgggggctgggccgcctggggcccgtggtcgtcctgctcccgggactgcgagctaggcttccgcgtccgcaagagaacttgcactaacccggagccccgcaacgggggcctgccctgcgtgggcgatgctggcgagtaccaggactgcaaccccca

SEQ ID NO: 27505 - DNA, 287 bp, Macaca Mulatta
atgtagggctggtattctttgtttaggttcacttagaagaggtatcagtgttgtaagtcaaataatttaagtccagtgattcaaaatcaggcatagagtccagaaacatggactacacataaggttctctatttaagttaaatacaaatgcaactttttagtgagcttgtaggactactcttcaaaaaaagtttattgctcagaatgatgacctgtaaaagtaagagtggcagccctctgtctgtgaaagtcagaacacagggctcaagcctctgaaactgaccctt

SEQ ID NO: 27506 - DNA, 307 bp, Macaca Mulatta
  misc_feature (1)...(307): n = A,T,C or G
gtacatcactcaggaaggccacaagctagaaacaggggccccgcggcccccagccaccgtcaccaacgcggtgtcctggcggtccgaaggcatcaagtatcggaagaacgaggtgttcctggacgtcatcgagtctgtcaacctcttggnnnnnnnnnnnnnnnnnnnnnnnnnnnnnnnnnnnnnnnnnnnnnnnnnnnnnnnnnnnnnnnnnnnnnnnnnnnnnnnnnnnnnnnnnnnnnnnnnnnnnnnnnnnnnnnnnnnnnnnnnnnnngcggcaaaagcaaatccgtggagctggcggatg

SEQ ID NO: 27507 - DNA, 211 bp, Macaca Mulatta
ggattaatcttgggtgcatttgtaatatgttggcttcctttttttgtaaaagaattagttgttaatgtttgtgaaaaatgtaaaatttctgaagaaatgtccaattttttgacatggcttggatatctcaattcgcttataaatccactgatttacaccatctttaatgaagacttcaagaaagcattccaaaaacttgtgcgatgtcgat

SEQ ID NO: 27508 - DNA, 804 bp, Macaca Mulatta
ccctcatgggctttccctcaagcacagaaatgtagctcctctacttcggtctcttctcagtagcctatactctcaccctgataggaaatgcagccattgtctgtgctgtgtggtaggaccagcaccttcacactcccatgtacaccctcttgggaaatttctctctcctggaaatatgttatgttactacaactaaactgctggccaacttcctctccacaagcaagtccatctcattcatgagttgttttgcacagttctacttcttcttctctttggggtatgatgagggcttcttcctttgcatcatggcctttgacaggtatcttgccatctgcctccctctacgttatctatgcatcatgactaaacaagtatgcactggccttatcatctttgcgtggtcatgtgtctttgtaatcttcctaactctggtgattctcatttcacagctatcctactgtgaccccaaatattatcaaccattttatttgtgatcccgtcccattgaagatgctgtcctgttctgaagacatcatcatcacccagctcatttactccacattcaatttctatcttcatgattggcacctttctctttggcctttgttcctatgctctggtgattctggctgtaatacgaatgccttcagaggctggcaaatgaaaagctttctccacttgtgcctctcatttggcagctgtcaccttatttagggctctatcatggtatgtatgtaagtcctggatcagcacacccagtaaaaatgagaaaaatcattaccttgttctattctgtgagta

SEQ ID NO: 27509 - DNA, 4052 bp, Macaca Mulatta
  misc_feature (1)...(4052): n = A,T,C or G
ggacatttgcatgaccggtacggacagctggtgaatgtctacaccaagctgctgctgaccaagatctccttccacctcaagnnnnnnnnnnnnnnnnnnnnnnnnnnnnnnnnnnnnnnnnnnnnnnnnnnnnnnnnnnnnnnnnnnnnnnnnnnnnnnnnnnnnnnnnnnnnnnnnnnnnnnnnnnnnnnnnnnnnnnnnnnnnnnnnnnnnnnnnnnnnnnnnnnnnnnnnnnnnnnnnnnnnnnnnnnnnnnnnnnnnnnnnnnnnnnnnnnnnnnnnnnnnnnnnnnnnnnnnnnnnnnnnnnnnnnnnnnnnnnnnnnnnnnnnnnnnnnnnnnnnnnnnnnnnnnnnnnnnnnnnnnnnnnnnnnnnnnnnnnnnnnnnnnnnnnnnnnnnnnnnnnnnnnnnnnnnnnnnnnnnnnnnnnnnnnnnnnnnnnnnnnnnnnnnnnnnnnnnnnnnnnnnnnnnnnnnnnnnnnnnnnnnnnnnnnnnnnnnnnnnnnnnnnnnnnnnnnnnnnnnnnnnnnnnnnnnnnnnnnnnnnnnnnnnnnnnnnnnnnnnnnnnnnnnnnnnnnnnnnnnnnnnnnnnnnnnnnnnnnnnnnnnnnnnnnnnnnnnnnnnnnnnnnnnnnnnnnnnnnnnnnnnnnnnnnnnnnnnnnnnnnnnnnnnnnnnnnnnnnnnnnnnnnnnnnnnnnnnnnnnnnnnnnnnnnnnnnnnnnnnnnnnnnnnnnnnnnnnnnnnnnnnnnnnnnnnnnnnnnnnnnnnnnnnnnnnnnnnnnnnnnnnnnnnnnnnnnnnnnnnnnnnnnnnnnnnnnnnnnnnnnnnnnnnnnnnnnnnnnnnnnnnnnnnnnnnnnnnnnnnnnnnnnnnnnnnnnnnnnnnnnnnnnnnnnnnnnnnnnnnnnnnnnnnnnnnnnnnnnnnnnnnnnnnnnnnnnnnnnnnnnnnnnnnnnnnnnnnnnnnnnnnnnnnnnnnnnnnnnnnnnnnnnnnnnnnnnnnnnnnnnnnnnnnnnnnnnnnnnnnnnnnnnnnnnnnnnnnnnnnnnnnnnnnnnnnnnnnnnnnnnnnnnnnnnnnnnnnnnnnnnnnnnnnnnnnnnnnnnnnnnnnnnnnnnnnnnnnnnnnnnnnnnnnnnnnnnnnnnnnnnnnnnnnnnnnnnnnnnnnnnnnnnnnnnnnnnnnnnnnnnnnnnnnnnnnnnnnnnnnnnnnnnnnnnnnnnnnnnnnnnnnnnnnnnnnnnnnnnnnnnnnnnnnnnnnnnnnnnnnnagagcaagtcggagctgagctcacggctggacacgctgagtgcggagaaggatgcgctgagtggagctgtgcggcagcgggaggcagacctgctggcagcgcagaccctggtgcgcgagacagaggcggcgctnnnnnnnnnnnnnnnnnnnnnnnnnnnnnnnnnnnnnnnnnnnnnnnnnnnnnnnnnnnnnnnnnnnnnnnnnnnnnnnnnnnnnnnnnnnnnnnnnnnnnnnnnnnnnnnnnnnnnnnnnnnnnnnnnnnnnnnnnnnnnnnnnnnnnnnnnnnnnnnnnnnnnnnnnnnnnnnnnnnnnnnnnnnnnnnnnnnnnnnnnnnnnnnnnnnnnnnnnnnnnnnnnnnnnnnnnnnnnnnnnnnnnnnnnnnnnnnnnnnnnnnnnnnnnnnnnnnnnnnnnnnnnnnnnnnnnnnnnnnnnnnnnnnnnnnnnnnnnnnnnnnnnnnnnnnnnnnnnnnnnnnnnnnnnnnnnnnnnnnnnnnnnnnnnnnnnnnnnnnnnnnnnnnnnnnnnnnnnnnnnnnnnnnnnnnnnnnnnnnnnnnnnnnnnnnnnnnnnnnnnnnnnnnnnnnnnnnnnnnnnnnnnnnnnnnnnnnnnnnnnnnnnnnnnnnnnnnnnnnnnnnnnnnnnnnnnnnnnnnnnnnnnnnnnnnnnnnnnnnnnnnnnnnnnnnnnnnnnnnnnnnnnnnnnnnnnnnnnnnnnnnnnnnnnnnnnnnnnnnnnnnnnnnnnnnnnnnnnnnnnnnnnnnnnnnnnnnnnnnnnnnnnnnnnnnnnnnnnnnnnnnnnnnnnnnnnnnnnnnnnnnnnnnnnnnnnnnnnnnnnnnnnnnnnnnnnnnnnnnnnnnnnnnnnnnnnnnnnnnnnnnnnnnnnnnnnnnnnnnnnnnnnnnnnnnnnnnnnnnnnnnnnnnnnnnnnnnnnnnnnnnnnnnnnnnnnnnnnnnnnnnnnnnnnnnnnnnnnnnnnnnnnnnnnnnnnnnnnnnnnnnnnnnnnnnnnnnnnnnnnnnnnnnnnnnnnnnnnnnnnnnnnnnnnnnnnnnnnnnnnnnnnnnnnnnnnnnnnnnnnnnnnnnnnnnnnnnnnnnnnnnnnnnnnnnnnnnnnnnnnnnnnnnnnnnnnnnnnnnnnnnnnnnnnnnnnnnnnnnnnnnnnnnnnnnnnnnnnnnnnnnnnnnnnnnnnnnnnnnnnnnnnnnnnnnnnnnnnnnnnnnnnnnnnnnnnnnnnnnnnnnnnnnnnnnnnnnnnnnnnnnnnnnnnnnnnnnnnnnnnnnnnnnnnnnnnnnnnnnnnnnnnnnnnnnnnnnnnnnnnnnnnnnnnnnnnnnnnnnnnnnnnnnnnnnnnnnnnnnnnnnnnnnnnnnnnnnnnnnnnnnnnnnnnnnnnnnnnnnnnnnnnnnnnnnnnnnnnnnnnnnnnnnnnnnnnnnnnnnnnnnnnnnnnnnnnnnnnnnnnnnnnnnnnnnnnnnnnnnnnnnnnnnnnnnnnnnnnnnnnnnnnnnnnnnnnnnnnnnnnnnnnnnnnnnnnnnnnnnnnnnnnnnnnnnnnnnnnnnnnnnnnnnnnnnnnnnnnnnnnnnnnnnnnnnnnnnnnnnnnnnnnnnnnnnnnnnnnnnnnnnnnnnnnnnnnnnnnnnnnnnnnnnnnnnnnnnnnnnnnnnnnnnnnnnnnnnnnnnnnnnnnnnnnnnnnnnnnnnnnnnnnnnnnnnnnnnnnnnnnnnnnnnnnnnnnnnnnnnnnnnnnnnnnnnnnnnnnnnnnnnnnnnnnnnnnnnnnnnnnnnnnnnnnnnnnnnnnnnnnnnnnnnnnnnnnnnnnnnnnnnnnnnnnnnnnnnnnnnnnnnnnnnnnnnnnnnnnnnnnnnnnnnnnnnnnnnnnnnnnnnnnnnnnnnnnnnnnnnnnnnnnnnnnnnnnnnnnnnnnnnnnnnnnnnnnnnnnnnnnnnnnnnnnnnnnnnnnnnnnnnnnnnnnnnnnnnnnnnnnnnnnnnnnnnnnnnnnnnnnnnnnnnnnnnnnnnnnnnnnnnnnnnnnnnnnnnnnnnnnnnnnnnnnnnnnnnnnnnnnnnnnnnnnnnnnnnnnnnnnnnnnnnnnnnnnnnnnnnnnnnnnnnnnnnnnnnnnnnnnnnnnnnnnnnnnnnnnnnnnnnnnnnnnnnnnnnnnnnnnnnnnnnnnnnnnnnnnnnnnnnnnnnnnnnnnnnnnnnnnnnnnnnnnnnnnnnnnnnnnnnnnnnnnnnnnnnnnnnnnnnnnnnnnnnnnnnnnnnnnnnnnnnnnnnnnnnnnnnnnnnnnnnnnnnnnnnnnnnnnnnnnnnnnnnnnnnnnnnnnnnnnnnnnnnnnnnnnnnnnnnnnnnnnnnnnnnnnnnnnnnnnnnnnnnnnnnnnnnnnnnnnnnnnnnnnnnnnnnnnnnnnnnnnnnnnnnnnnnnnnnnnnnnnnnnnnnnnnnnnnnnnnnnnnnnnnnnnnnnnnnnnnnnnnnnnnnnnnnnnnnnnnnnnnnnnnnnnnnnnnnnnnnnnnnnnnnnnnnnnnnnnnnnnnnnnnnnnnnnnnnnnnnnnnnnnnnnnnnnnnnnnnnnnnnnnnnnnnnnnnnnnnnnnnnnnnnnnnnnnnnnnnnnnnnnnnnnnnnnnnnnnnnnnnnnnnnnnnnnnnnnnnnnnnnnnnnnnnnnnnnnnnnnnnnnnnnnnnnnnnnnnnnnnggccaaggtcaggagcagtaagaatgagccagaaccagccccttggctttgtgtgagcatttcctcctgttgaagtgttgtgctggcaataaaatgcactttgactgt

SEQ ID NO: 27510 - DNA, 797 bp, Macaca Mulatta
gggttgacaccttctgagaaaggatctgtggtcatttctccaatttgggaaccttcagtatgtggcttctctactcctttgtcaggttttacgatctatgtatgattactgcaggtagcgctggtatatggtcaaatgaatgaaccacctggtgctcgtgcccgggtagctcttactggactgactgtggctgaatacttcagagaccaagaaggtcaagatgtactgctatttattgataatatctttcgcttcacccaggctggttcagaggtgtctgcattattgggcagaatcccttctgccgtgggctatcagcctaccctcgccactgacatgggtactatgcaggaaagaattaccactaccaagaagggatctatcacctctgtacaggctatctatgtgcctgctgatgaacttgactgaccctgctcctgctactacgtttgcccatttggatgctaccactgtactgtcacgtgccatttgcttagctgggcatctatccagctgtggatcctctagactcaacttctcgcatcatggttcccaacattgttgggcagtgagcattacgatgttgccccgtgggggtggcaaaaaatcctggagggactacaaatccctccaggaatacctttgccctccctggggtaaggatgaaacttttcgaaaagaaaaaaaattgaccgttgttccccagcccggaaaaaaaacccctttttttggccctaacaattccaaggttgcttgaagcctttcccaaggttctattggggaaaacctggttaccc

SEQ ID NO: 27511 - DNA, 1727 bp, Macaca Mulatta
  misc_feature (1)...(1727): n = A,T,C or G
tgcaaatccaagagacacatctctggaagataagcgagcttcttcctcaagaccaaaaaaggnaggagatggcatgatacccatgtagggaattccccaaagcaaggcttgccatacctggaccctgaggagcctgcttgctggagaggctttcgtgtctgatgtgcaggaggcagaatgccaaactgactcttcaaggggcgactgcaggggctcgagaccagccagcagtatctcatccttcgatacaggggatatactgtacagtcctttttctagaagtgagaagtacaacattactctacaagaggaagattctaggggctcaaaaacaaaaaggtttgcaccttgagagccctttggaatgttgacaactcaggatctaaaacaaagttctatgttaatgagttacagaatacacgtggaagtcaatgtcactttataatcaataataatactgagtgagaacactatgcaggaagaaaccttccatagaaagacaggcagggaaaagcttaggctgatcttaaacttacctaatagagcaagcctgagatagactgccaaaatggccaaataagagactctatgnnnnnnnnnnnnnnnnnnnnnnnnnnnnnnnnnnnnnnnnnnnnnnnnnnnnnnnnnnnnnnnnnnnnnnnnnnnnnnnnnnnnnnnnnnnnnnnnnnnnnnnnnnnnnnnnnnnnnnnnnnnnnnnnnnnnnnnnnnnnnnnnnnnnnnnnnnnnnnnnnnnnnnnnnnnnnnnnnnnnnnnnnnnnnnnnnnnnnnnnnnnnnnnnnnnnnnnnnnnnnnnnnnnnnnnnnnnnnnnnnnnnnnnnnnnnnnnnnnnnnnnnnnnnnnnnnnnnnnnnnnnnnnnnnnnnnnnnnnnnnnnnnnnnnnnnnnnnnnnnnnnnnnnnnnnnnnnnnnnnnnnnnnnnnnnnnnnnnnnnnnnnnnnnnnnnnnnnnnnnnnnnnnnnnnnnnnnnnnnnnnnnnnnnnnnnnnnnnnnnnnnnnnnnnnnnnnnnnnnnnnnnnnnnnnnnnnnnnnnnnnnnnnnnnnnnnnnnnnnnnnnnnnnnnnnnnnnnnnnnnnnnnnnnnnnnnnnnnnnnnnnnnnnnnnnnnnnnnnnnnnnnnnnnnnnnnnnnnnnnnnnnnacacaggagagaaaccctataagtgttatgagtgtgggaaggccttcagtcagagttcgagcctctgcatccaccagagagtccacactggagagaaaccctatagatgttgtggatgtgggaaggccttcagtcagagttcgagcctgtgcatccaccagagagttcacacaggagagaaaccttttaaatgtgatgagtgtggaaaggccttcagtcagagtacgagcctctgcatccaccagagagtccacacaaaggagagaaaccatctcaaaatatcagttatataaaatgttttgctaagagtttaaaatcttaaaacccgtaagtgccactaggaaggaaaccctgtatatacctacattgacccaagaaatatttacagcaatccctagcagaacattgtttctgaggaggcgcatgtgagattgatttgttggttcatgccaagtatgttccacagcttgactttgaatgtggatctctgagcgtccgcccagcaggatggctctcgggtcccagtcacagatgtcgcttcctgggattccagcacgatgcctccatagtt

SEQ ID NO: 27512 - DNA, 901 bp, Macaca Mulatta
gggggagaggtgcggcgggggagtcctccagaatacacatatagcccctgaggtggcatggtgatgtctccatgagggaaccccctcccactcatcctgtcacgtatatcatagtgttcttgactgggccattcatctaagatggaatttaccctgtgaaacagggagaagacttatggaccccaagcatcatttcgagttgtagttgagtttttaaaagacatacatgcaaagttcgtttgctttggaccctctgcattattaaagctgctgtatttgctaacccagaactgctccagtgtcttgactgatcatcatggcttcagtttggaagagactgcagcgtgtgggaaaacatgcatccaagttcaagtttgtggcctcctacaaggatctgatgtttgagtttacgaagaaatggcaaccagataaactggtggtagtttggaccagaagaagccgaaggaagttttttaaggcacatttcttgggacctggaataaaaaatccatatcgtggtgtttttgtgtggcctgttcctgaaaacatttaaatcactgtaacactttttagggatcctcgtgcggaagaatttgaagacaaagagtggacattcgtcatagaaaatgaatccccttctggtcgaaggaaagctcctgctactagcagcatcaatatgaaacagtatgcaagcccctatgccaactcagactgatgtcaagttaaaattcaagccctttatctaaaaaagttgtatctgccacttcctcagtttttcattatcttgcctcttcctgaagggaagaaaaggccccggacgaagacatgcaaagtttggcctagtttgagaagtatgaagccagggccgaccttgggcaatttagattgcatttgaaaaaaa

SEQ ID NO: 27513 - DNA, 815 bp, Macaca Mulatta
ttcttggttatccagtcatagtcaagaacgagctaaagtgtagctaactgagacttcagagtatataggagtaaataatatataaaatagctctggtggctcacgcctgtaatcccaggactttgggaggccaaggtgggcagatcacctgaggtcaggagttcgagaccagcctggccaaccaacatggagaaatcccatctctactaaaaatacaaaaattagctgggcagtggcacacgcctgtaatcccagctactcaggaggctgagacatgagaatcacttgaacccaggaggtggaggttgcagtgagccgagatttcaccactgctctccagcctaggcgaaaaagtagttccaaaaaagacacttgtacacgcatgtttacagcagcacaatttacaactgaaaacataaggaaccagcctaaatgcccatcaagccatgagtggataaagacaatgtggtgtacatatacaccatggaatagtattcagccataaaaaggaacaaaataatggcattcacagcaacttggatggagttgaagatcattattttaagtgaagtaactcaggaataaaaaaccaaatattgtatgtcctcacttataagtgggagctgagctatgagggagaaaaggcacaagaatgatacaacgaattctggggacttaggggaaaggatggggggaatgagggaaaaaagactatatgctgggtacagtgtacactgcttcagtgacaggtgcaccaaaatctcagaaatcactgctaaagaacttatccttgtaaccaaaagccacctgctccc

SEQ ID NO: 27514 - DNA, 2251 bp, Macaca Mulatta
  misc_feature (1)...(2251): n = A,T,C or G
gggaggcggggcggagacggcggcgaggaggaggccgcggcgcgggacagatcgagctgcggctcgcgcggcgcctccctgcggcgggcccggcccggctccggcccccgccggggcgatgctccccggagccgcgggatgagccaggtgagcgcggggacccccagcactccctgcctgnnnnnnnnnnnnnnnnnnnnnnnnnnnnnnnnnnnnnnnnnnnnnnnnnnnnnnnnnnnnnnnnnnnnnnnnnnnnnnnnnnnnnnnnnnnnnnnnnnnnnnnnnnnnnnnnnnnnnnnnnnnnnnnnnnnnnnnnnnnnnnnnnnnnnnnnnnnnnnnnnnnnnnnnnnnnttcctgacggggctggccacgggcacgaccctgtgccaacatgccaacgccgtgaccgaggctgcccgtgcattggcagctgcccgaccggcccgaggtgtggccttccaggcacacagtgtagtgcctggctccttcatggcccgcgacaacgtggccaccttcatcggctggtgccgcacggagctgggtgtgccggaggtgctcatgtttgagactgaggacctggtgcttcgcaagaacgagaagagcgtggtgctatgcctgctggaggtggcacggcgtggggcccgcctgggcctgctcgccccacgcctcgtgcagttcgagcaggagattgagcgggaactgcgtgctgcnnnnnnnnnnnnnnnnnnnnnnnngctggggaggacaccactgaaaccacccatgcaccagggactcctgcccgtgccccccgcatgacacccagcgacctgcgcaacctcgacgagctggtgannnnnggtgagggagatcctgggccgctgcacctgccccgaccagttccccatgatcaaggtctcggaggggaagtaccgtgtgggggactcgagcctgctcatctttgtgcgggnnnnnnnnnnnnnnnnnnnnnnnnnnnnnnnnnnnnnnnnnnnnnnnnnnnnnnnnnnnnnnnnnnnnnnnnnnnnnnnnnnnnnnnnnnnnnnnnnnnnnnnnnnnnnnnnnnnnnnnnnnnnnnnnnnnnnnnnnnnnnnnnnnnnnnnnnnnnnnnnnnnnnnnnnnnnnnnnnnnnnnnnnnnnnnnnnnnnnnnnnnnnnnnnnnnnnnnnnnnnnnnnnnnnnnnnnnnnnnnnnnnnnnnnnnnnnnnnnnnnnnnnnnnnnnnnnnnnnnnnnnnnnnnnnnnnnnnnnnnnnnnnnnnnnnnnnnnnnnnnnnnnnnnnnnnnnnnnnnnnnnnnnnnnnnnnnnnnnnnnnnnnnnnnnnnnnnnnnnnnnnnnnnnnnnnnnnnnnnnnnnnnnnnnnnnnnnnnnnnnnnnnnnnnnnnnnnnnnnnnnnnnnnnnnnnnnnnnnnnnnnnnnnnnnnnnnnnnnnnnnnnnnnnggcccgccccggggggcccccggaggcaggggagcccagttttcagcccccaagccttccccgcgggcccggaaccagaccggggggaacaagctgttttgctttgccccaggatcgagacggacagcactcctgggtcccaaggggcagggggcacgggggctccgggcaggagcacnccccaagaactccccgtgcccgcagccctgcagcaccccggctttcacggtctccngccccagtccagagttgggcaccacaccggccagcatcttccgcacacccntgcagctcgacccgcagcaggagcagcagctgtttcggcgcctggaagaggagttactgggcaatgcccgggctcttgaggttgtggctagacgtgacccccactggaccagccctggacccagatggggctcatgacctcccagatcctgactctgcctaatgttccttccagttcttcatattagtccctcagcgtcctgggtggcaaatgtggccaacctggggactctggccggacggccaatggcctgcctgggccgcgaagccaagccctttccagctcttccgatgaaggcagcccctgccctggcatgggggggccactagatgcacctgggagctccctggctggccccgaacccttgaggacctgggcacggggtcggatggacacacagccagaccgtaaaccctcacgcatccccacgcctcggggcccccgccgcccctccggacccgcagagcttgggacctggcatgccctgcactcagtcaccccaagggctgagccagattcttggatgtg

SEQ ID NO: 27515 - DNA, 510 bp, Macaca Mulatta
cttcccttcgtatcttcaagtgggtgccagtggtggacccccaggaggaggagcgaaggcgggcagtgtggcggggcagagagatcccgtggccgggaacgtcggggcagtgggcgccagtccccgagggggtggccctctcatcctgctggatctcaatgatgagaacagcaaccagagtttccattcggaaggttccctgcaaaagggcacagagcccagtcctgggggcaccccccagcccagccgccctgtgtcacctgccggacccccagaaggggtccctgaggaggctcagcccccacggctgggccaagagagagatcccgggggcataactgctggcagcaccgacgaacccccaatgctgaccaaggaggaacctgttccagaactgctggaagctgaggcccccgaagcttaccccgtctttgagccagtgccacctgtccctgaggcagcccacggtgacacagaggactcggagggcgcccccccactcaagcgcat

SEQ ID NO: 27516 - DNA, 1224 bp, Macaca Mulatta
  misc_feature (1)...(1224): n = A,T,C or G
gggcgtccccatctcctacaaagactactccatcgcctcggcataaaaaaagtgattcttcaggtcaggagtacagcttgtgaaaactcaccaaaatgaatagttgttttgttacatttagatgaaagttaaactttcctgaatttcaatacattagtttttacactaaaactttacaagataaaattggacttcatttagtatctttttaacagaattacttgggataatgagatacaataatcatatctcttttgacattttggaaatgtttttaattttacaagtacatttaacagatcatttataaagcaggagtccattttaacacttacctacttttattggtttggaaacatagtaccacatcttaataggatggtgcccatataggtgagcatccctttagagcatgggaagcagcagactgcattcctaatcttcatcatgcctgagacttgtcttgcattgttacctttaagtgaatcacataattgtctttggaacttggtctcccaacccttattgtgattgcaaagtgtttaccagatatttgatgaggtgctatgttttgtgaaaaacatcatgttattcaaaaacactaattgatattgaatacccggatacccactatggtagtaaagtcctttttagggatgaattttaaattttagttcggtgcggtccaatttttctgaaattcctcatcattgggagttcttaaatcttagcaagcattagcaatattcaatgccaaaattccattgaaactttcaagttggagcaattgtctgtgtttgaaaagatgaaataagaataataatcaagggcaaagtttgagtgcccagaagggaaagccataccagttcctaacctgtcttgttttaggaaccaccatattttttttttcagtgttaacaatcatgataatcaaattaaaacactattttattcacttgtggaactgcagtcctgaattttgggttaaagggttttggctgctgtaaaaatgtgaatttgaatgtattttgaattggnnnnnnnnnnnnnnnnnnnnggacaaattttttttcatttaattggaatgatcttccaggtttttacaataaggggaattggtaaatttacagcctttaccatttatcgggggaaaaaggggaaatcccccccatcccaaaaaaggttaagctgaatggacaattttaaaacaaaaccctctcaagg

SEQ ID NO: 27517 - DNA, 732 bp, Macaca Mulatta
tcggcacgaggctgtattcagaattttgaccttgtgagcccactgccctgaccatttgcccaacaccaaaacaagtagagagtcccccgatcctggcctagtgcctgatcattccctggagacaccagtggccccggatttagctaatgaaagtggggagcctcaggctgaagcaacatctctgcttctccctgctcaccctggagttgatggcctccccctccacaacaaccaatcagaaccataaagctacaggcacgcactgaagcactttactgatattcattcaattattccatatgacagttgtttgagtttggtaccacctattgtccctttatacaaataaggaaactggggtgcagaaaggtgaattaactttacaaagtagacatgactagtgaacaatagagctgggatttaaacagcaatagctaatattaacagacaatttaaactgttctgagtgctgtgttgtacgctttggtggatgtcactcctttgaacgtcacaacaccccatggggtggtctcattttgcaagtatgaaagctgaggcagggcaacgttaagtaacttacataactcctacggtaatttgtgtagttaggagatgttcagcctcagtccctggctaattgccattctttccagcctgattttttccctgggaagagccccatgtaccctgaggtttcttcccaaacagaccaggtagagatattgtagtggt

SEQ ID NO: 27518 - DNA, 367 bp, Macaca Mulatta
agagacataagtccacccgttgagtctgtgttacgggataattggaattcatacagcacttgagaagctattcttggtatttcaaggagaaattcttcaagttgattaaattagagtctaaaccacagtcttttcgaagcctatgataggttattcatgaagcagccactagagacaagagattctcagatgctcctgcagaagtcagagtgcacctgcccctggtggtatgtgctgagtacctgtgtgatgatcctcagacctgtctgggaagaccagggcgggggtgttgatgctctcagctgcctgcggcacgtctccaggtgattctccagtccacacataactccacatgctttagttcagg

SEQ ID NO: 27519 - DNA, 112 bp, Macaca Mulatta
gaggaacataagagattcctctgactccctccttgtggagtagacccaggatggctgtgcctctcaaccaaagaacccagattacctccaggtggcactctgtatacttttt

SEQ ID NO: 27520 - DNA, 5011 bp, Macaca Mulatta
  misc_feature (1)...(5011): n = A,T,C or G
atggacctccgtgggaatttcacgcgcccgcccctgcgtcgggtccgtgtctcggctgatgccatgctccgggccctgctgggttccaagcacaaggtgtccatggatctgcgggccaacctcaagtctgtgaagaaggaagacacagagaaggnnaggagcggcctgtggaggtgggtgactggaggaagaatgtggaggccatgtctggcatggaaggccggaagaagatgtttgatgctgccaagtctccgacctcacaatagagnnaggccagcttgctgtgctgcgctctgagctcctgcttcatgcttcttctccaacccagctcataaagttctctgcccgtgtctggagcatcccttcccacctnnnnnnnnnnnnnnnnnnnnnnnnnnnnnnnnnnnnnnnnnnnnnnnnnnnnnnnnnnnnnnnnnnnnnnnnnnnnnnnnnnnnnnnnnnnnnnnnnnnnnnnnnnnnnnnnnnnnnnnnnnnnnnnnnnnnnnnnnnnnnnnnnnnnnnnnnnnnnnnnnnnnnnnnnnnnnnnnnnnnnnnnnnnnnnnnnnnnnnnnnnnnnnnnnnnnnnnnnnnnnnnnnnnnnnnnnnnnnnnnnnnnnnnnnnnnnnnnnnnnnnnnnnnnnnnnnnnnnnnnnnnnnnnnnnnnnnnnnnnnnnnnnnnnnnnnnnnnnnnnnnnnnnnnnnnnnnnnnnnnnnnnnnnnnnnnnnnnnnnnnnnnnnnnnnnnnnnnnnnnnnnnnnnnnnnnnnnnnnnnnnnnnnnnnnnnnnnnnnnnnnnnnnnnnnnnnnnnnnnnnnnnnnnnnnnnnnnnnnnnnnnnnnnnnnnnnnnnnnnnnnnnnnnnnnnnnnnnnnnnnnnnnnnnnnnnnnnnnnnnnnnnnnnnnnnnnnnnnnnnnnnnnnnnnnnnnnnnnnnnnnnnnnnnnnnnnnnnnnnnnnnnnnnnnnnnnnnnnnnnnnnnnnnnnnnnnnnnnnnnnnnnnnnnnnnnnnnnnnnnnnnnnnnnnnnnnnnnnnnnnnnnnnnnnnnnnnnnnnnnnnnnnnnnnnnnnnnnnnnnnnnnnnnnnnnnnnnnnnnnnnnnnnnnnnnnnnnnnnnnnnnnnnnnnnnnnnnnnnnnnnnnnnnnnnnnnnnnnnnnnnnnnnnnnnnnnnnnnnnnnnnnnnnnnnnnnnnnnnnnnnnnnnnnnnnnnnnnnnnnnnnnnnnnnnnnnnnnnnnnnnnnnnnnnnnnnnnnnnnnnnnnnnnnnnnnnnnnnnnnnnnnnnnnnnnnnnnnnnnnnnnnnnnnnnnnnnnnnnnnnnnnnnnnnnnnnnnnnnnnnnnnnnnnnnnnnnnnnnnnnnnnnnnnnnnnnnnnnnnnnnnnnnnnnnnnnnnnnnnnnnnnnnnnnnnnnnnnnnnnnnnnnnnnnnnnnnnnnnnnnnnnnnnnnnnnnnnnnnnnnnnnnnnnnnnnnnnnnnnnnnnnnnnnnnnnnnnnnnnnnnnnnnnnnnnnnnnnnnnnnnnnnnnnnnnnnnnnnnnnnnnnnnnnnnnnnnnnnnnnnnnnnnnnnnnnnnnnnnnnnnnnnnnnnnnnnnnnnnnnnnnnnnnnnnnnnnnnnnnnnnnnnnnnnnnnnnnnnnnnnnnnnnnnnnnnnnnnnnnnnnnnnnnnnnnnnnnnnnnnnnnnnnnnnnnnnnnnnnnnnnnnnnnnnnnnnnnnnnnnnnnnnnnnnnnnnnnnnnnnnnnnnnnnnnnnnnnnnnnnnnnnnnnnnnnnnnnnnnnnnnnnnnnnnnnnnnnnnnnnnnnnnnnnnnnnnnnnnnnnnnnnnnnnnnnnnnnnnnnnnnnnnnnnnnnnnnnnnnnnnnnnnnnnnnnnnnnnnnnnnnnnnnnnnnnnnnnnnnnnnnnnnnnnnnnnnnnnnnnnnnnnnnnnnnnnnnnnnnnnnnnnnnnnnnnnnnnnnnnnnnnnnnnnnnnnnnnnnnnnnnnnnnnnnnnnnnnnnnnnnnnnnnnnnnnnnnnnnnnnnnnnnnnnnnnnnnnnnnnnnnnnnnnnnnnnnnnnnnnnnnnnnnnnnnnnnnnnnnnnnnnnnnnnnnnnnnnnnnnnnnnnnnnnnnnnnnnnnnnnnnnnnnnnnnnnnnnnnnnnnnnnnnnnnnnnnnnnnnnnnnnnnnnnnnnnnnnnnnnnnnnnnnnnnnnnnnnnnnnnnnnnnnnnnnnnnnnnnnnnnnnnnnnnnnnnnnnnnnnnnnnnnnnnnnnnnnnnnnnnnnnnnnnnnnnnnnnnnnnnnnnnnnnnnnnnnnnnnnnnnnnnnnnnnnnnnnnnnnnnnnnnnnnnnnnnnnnnnnnnnnnnnnnnnnnnnnnnnnnnnnnnnnnnnnnnnnnnnnnnnnnnnnnnnnnnnnnnnnnnnnnnnnnnnnnnnnnnnnnnnnnnnnnnnnnnnnnnnnnnnnnnnnnnnnnnnnnnnnnnnnnnnnnnnnnnnnnnnnnnnnnnnnnnnnnnnnnnnnnnnnnnnnnnnnnnnnnnnnnnnnnnnnnnnnnnnnnnnnnnnnnnnnnnnnnnnnnnnnnnnnnnnnnnnnnnnnnnnnnnnnnnnnnnnnnnnnnnnnnnnnnnnnnnnnnnnnnnnnnnnnnnnnnnnnnnnnnnnnnnnnnnnnnnnnnnnnnnnnnnnnnnnnnnnnnnnnnnnnnnnnnnnnnnnnnnnnnnnnnnnnnnnnnnnnnnnnnnnnnnnnnnnnnnnnnnnnnnnnnnnnnnnnnnnnnnnnnnnnnnnnnnnnnnnnnnnnnnnnnnnnnnnnnnnnnnnnnnnnnnnnnnnnnnnnnnnnnnnnnnnnnnnnnnnnnnnnnnnnnnnnnnnnnnnnnnnnnnnnnnnnnnnnnnnnnnnnnnnnnnnnnnnnnnnnnnnnnnnnnnnnnnnnnnnnnnnnnnnnnnnnnnnnnnnnnnnnnnnnnnnnnnnnnnnnnnnnnnnnnnnnnnnnnnnnnnnnnnnnnnnnnnnnnnnnnnnnnnnnnnnnnnnnnnnnnnnnnnnnnnnnnnnnnnnnnnnnnnnnnnnnnnnnnnnnnnnnnnnnnnnnnnnnnnnnnnnnnnnnnnnnnnnnnnnnnnnnnnnnnnnnnnnnnnnnnnnnnnnnnnnnnnnnnnnnnnnnnnnnnnnnnnnnnnnnnnnnnnnnnnnnnnnnnnnnnnnnnnnnnnnnnnnnnnnnnnnnnnnnnnnnnnnnnnnnnnnnnnnnnnnnnnnnnnnnnnnnnnnnnnnnnnnnnnnnnnnnnnnnnnnnnnnnnnnnnnnnnnnnnnnnnnnnnnnnnnnnnnnnnnnnnnnnnnnnnnnnnnnnnnnnnnnnnnnnnnnnnnnnnnnnnnnnnnnnnnnnnnnnnnnnnnnnnnnnnnnnnnnnnnnnnnnnnnnnnnnnnnnnnnnnnnnnnnnnnnnnnnnnnnnnnctttcttggaaggacacagctgggggttaagggtcctgcatatgcacccggagagtccccacatccctagtgaaggggaaacattcaaaggaggtgcaagtgacatccaaatgggctaaggtgaggccttcttgtaacatggggcccaggctgagggtagagggatgggtgctacttgggggatatctgttattaatcagcacacaatagctgggtgggcatcccctctctctgcagctggtggagatgggcctggcgctcctctctgcttggtaggaatgaccagggcaggatgccacctgctacacccttgcctgtcccagagcccttgggggaccagctgttgcccccacctttctccacaaggtggccagtccccacagggcaaggaggccaagctcagctgtgtgtctgagcccactcagcagcaggcatgatcagggcagggcccagcgctcagggctgctggggctaaagtgccttgctgaaggaggggcagagttaaacattagccacaatggccccccacgaagtgagtcatactccccacaaggctctgggctgggcagccgggggccggcggggagcttcgttccaggtgggtgaccaagctgcggaagcccgggacagttcgctgggaccagtgctaatggcagcctcttctcctgacccccatcnnnnnnnnnnnnnnnnnnnnnnnnnnnnnnnnnnnnnnnnnnnnnnnnnnnnnnnnnnnnnnnnnnnnnnnnnnnnnnnnnnnnnnnnnnnnnnnnnnnnnnnnnnnnnnnnnnnnnnnnnnnnnnnnnnnnnnnnnnnnnnnnnnnnnnnnnnnnnnnnnnnnnnnnnnnnnnnnnnnnnnnnnnnnnnnnnnnnnnnnnnnnnnnnnnnnnnnnnnnnnnnnnnnnnnnnnnnnnnnnnnnnnnnnnnnnnnnnnnnnnnnnnnnnnnnnnnnnnnnnnnnnnnnnnnnnnnnnnnnnnnnnnnnnnnnnnnnnnnnnnnnnnnnnnnnnnnnnnnnnnnnnnnnnnnnnnnnnnnnnnnnnnnnnnnnnnnnnnnnnnnnnnnnnnnnnnnnnnnnnnnnnnnnnnnnnnnnnnnnnnnnnnnnnnnnnnnnnnnnnnnnnnnnnnnnnnnnnnnnnnnnnnnnnnnnnnnnnnnnnnnnnnnnnnnnnnnnnnnnnnnnnnnnnnnnnnnnnnnnnnnnnnnnnnnnnnnnnnnnnnnnnnnnnnnnnnnnnnnnnnnnnnnnnnnnnnnnnnnnnnnnnnnnnnnnnnnnnnnnnnnnnnnnnntgcctgccgtgagtgtcacagacacctgggtgtcccctgtattagtgcctcccagatgctcttctgactggctctttgtgacccaaatttcaactgcttcacctcacaatgatgaaaccagagccacaaatgtagtgagattttcataaagctaaatgtattcagtggaaattcctctgatctaaaagcatgcatgcctttatttcattactggagtattaaattagcccttacttatggaataggaggacagtaggtggcaattgttttctacctctcttagttcacaaaataaaatggtggcagcaca

SEQ ID NO: 27521 - DNA, 569 bp, Macaca Mulatta
caaatattttcacctagcttgatcataggcccacagtcttaccgcttatctatataaacccagtcatagcttagggagggctctaatgttctctagcacccattcacttatgacccagcagtttggcttctctaaggagcctgctatcgtcaagctctttggagaagacactttgcactacccctaccacagatgccctgggtgaggcttcccctttcttgacactctaacaggtacaacatgcaccacttcaatgttgacatatggtcactctggacacaacccatatggttcctgcagaaatgccaacaaaattcctgttgtggtccgggttgattttatctttggggcctcagagcaatactctcttgccttttccctgcattccttttctctgtaggaagtcagaccttgcccttggaaagaccatcctagcttttatttctgtagttcctcaccttccttctcttcacgcaagagttccatccatccctcaaaacaaaactctcaaacatcaatgcatattcataaatagcagtggtagtagggtcagtagaaggggaggattc

SEQ ID NO: 27522 - DNA, 1113 bp, Macaca Mulatta
  misc_feature (1)...(1113): n = A,T,C or G
gggtcaaggtatatctgtactacagagtccctgatagggggtttcggggagcgcttggaccctggcttctgggacgcgtcagnaggagaagggagcgttggctttgctttcatcaggccaaagatgcctttctttgggaatacgttcagtccgaagaagacacctcctcggaagtcggcatctctctccaacctgcattctttggatcggtcagcccaggaggnnnnnnnnnnnnnnnnnnnnnnnnnnnnnnnnnnnnnnnnnnnnnnnnnnnnnnnnnnnnnnnnnnnnnnnnnnnnnnnnnnnnnnnnnnnnnnnnnnnnnnnnnnnnnnnnnnnnnnnnnnnnnnnnnnnnnnnnnnnnnnnnnnnnnnnnnnnnnnnnnnnnnngtctcttgcggctgaaagtggacatcctgttagacatnnnnnnnnnnnnnnnnnnnnnnnnnnnnnnnnnnnnnnnnnnnnnnnnnnnnnnnnnnnnnnnnnnnnnnnnnnnnnnnnnnnnnnnnnnnnnnnnnnnnnnnnnnnnnnnnnnnnnnnnnnnnnnntttgaccagactagtggattcggtcctgggagagagtatcatataatgggacccacaggcactggcacccttgggttggcaatagaaggtgacatggaatggagaaaaccaagattccagatggggacagtaaccagaaggtgcttcagatgcactgcctgcggatgccagtctgaaaaccagaccgcatggaggcctgaggctgctgatgagcctttgggtgctctccacacacaagattgcaaacatacatgtcccagaatagctctgttgggccctgttgggagaagtggctggagttcattctctcacccccttacattggggtttggggtttggcagcagttctgcagagctccgtgttgggggtcatggatgagtggctctctcggctcttaaaggcaggcctctctccttgcctttaaagaatcctccttcctcacacctggcctcctctggcttcagcttctcagcagcaagcaccagccttccacagcaacactatatttttatgctactttcctgtttgcactactatttttattaaatgatgttaaata

SEQ ID NO: 27523 - DNA, 112 bp, Macaca Mulatta
  misc_feature (1)...(112): n = A,T,C or G
nccagggcccctcccagtgggtgacactggagtttccccagctcatccgtgtctcccagctgcagatccagtttcagggtggcttctccagtcgccggggctgcctggaagg

SEQ ID NO: 27524 - DNA, 909 bp, Macaca Mulatta
  misc_feature (1)...(909): n = A,T,C or G
gcagcagctatcgacccttggtatgactgggaatcttcattctaaccaaagttgccttttggtggacagagggtccttattcatatatcagtgttctggacttccaaagttacaaggttgcatggggaggtaaaaattctcatgtgaaaatattcactgtgaattgatcacttataaaattagttcttactcagactccttccccatttaataataatgtaagtcctcatcatccttgttgaccagtctctcactggctgtcccatgtctaagataatttgaaaacacagtgcaaattgattgcacagttaactgcatattttgcaaaataggatttcatgaccaatttacaattgagaagagaaatttaattacggcaggtgcaaatcactgatacaaatgatttggatgttctggaaaggtccttgggaaaaatgatgatgctgtttagtatttgtgccctccttgaggtccttttagttttcatgtctgatacgaagtgcaaagatatactgttgatagaattttattggaaaaataatacttcagtgtctgttnnnnnnnnnnnnnnnnnnnnnnnnnnnnnnnnnnnnnnnnnnnnnnnnnnnnnnnnnnnnnnnnnttctcagcttcccaagtagctggaattacaggctcaagccaacagggctnnnnnnnnnnnnnnnnnnnnnnnnnnnnnnnnnttacatttctttctaccgattagtgcagagttaatcctgaatattaattgtaagaaacttgtttttattatttttagtttcatcacagtcatttccctgtcaaacctttttaaatttttcacttttaccatgaaatcttcatcagcacttcaagtggattcaccttaagtaaactttcctggtactgattatctatggataatga

SEQ ID NO: 27525 - DNA, 1409 bp, Macaca Mulatta
  misc_feature (1)...(1409): n = A,T,C or G
aaaagctaaagacgaggaacacaatatcgcgaatgtttcgcgggtaactggggttgagggcccttatatttgaaatgcagaactcggccctatttaaggcggattttacagagcgcaccccaagcttacaagttagtaggattccttatttggagtgacccgacccagccgcggagcgtgcagttccgcgcagcctctcagtgccctccagccccgcgaccatgtggccacaatccacgcttctccggatcgcggcgcgccggaactactgaggatgatgccagttacttgctttaccttttcagggctggctcctgatccactttgggggaggggaacatgagtagataatttcagggtgcaccccaatctgccagacttnnnnnnnncatcttgtgtctttggaggtgctgcttaatatcaaacacgcggtgccatgaagggaccctttgagggttgaataggagttaacccctgcgctctctttgcaactgtctgcctttctcagagtggtgggggaaaggctgtacgacacgggtggggacaggagnnnnnnnnnnnnnnnnnnnnnnnnnnnnnnnnnnnnnnnnnnnnnnnnnnnnnnnnnnnnnnnnnnnnnnnnnnnnnnnnnnnnnnnnnnnnnnnnnnnnnnnnnnnnnnnnnnnnnnnnnnnnnnnnnnnnnnnnnnnnnnnnnnnnnnnnnnnnnnnnnnnnnnnnnnnnnnnnnnnnnnnnnnnnntttgcaagtgctggagtctcctgaggacacgtgcgccgccgccaccgcgggtgtgggaaagcgcggacgtgctgggcgtctgcttccctaggcgaccaccgcccctggccgcgctccgggctttcacggaaactcccgagacggagccccgggttcctcctctcccacttggctctgctgtcctactcaagcgggtggctctgggatcctgggggcctgggttgggggctagggagacgccatgtgatgggcactccagggacacacagcctagcacagcagcttataatgggctctctggggccatttgcaataacagctgcaattccctggatagcggagttgatttcctccctctgcccctcccccagccatgccagctggcctttgtaagtgcaggaaaccgagtagaaaatgtgaccctccaaatggagaagctgcaggctttgccattgtgaaccatggtgaagtgcttggaacatactgttcactcactctaaaggcgctgagactgtgctgttgttctcgtttttatagtcaatggcttgttcatcatccagatgtggctactgacatatctacacttcgcaccggagtgtctggaattgtggctatcctgattataggattttaacttaactgaaatgcctgctttgaataaatgtgttgg

SEQ ID NO: 27526 - DNA, 408 bp, Macaca Mulatta
gcgcgccgctcggcctcagtccgctccttttggcctactccgcggcggcggcgcacagtcggggttcgttcttcatggctccctactccactgccggcctggtgcccacgctcggcttccgcccgccgatggactacgccttcagcgatctcatgcgtgaccgctcggccgccgctgctgcggcggtgcacaaggagccaacctatggcggcggcctgtacgggcctatggtcaatggcgctccggagaagcagtagggcaaggggcctggcagccggccgctccccaaacaggaatcccagccctgtctccgcgggccgccgacccctcttcgcccagcgcgctctctgcgccctggctggggtcttctcactccaagatggtttttggggtttgtttaggagggtg

SEQ ID NO: 27527 - DNA, 566 bp, Macaca Mulatta
  misc_feature (1)...(566): n = A,T,C or G
nagttatggggggatgctcagcgcctacctgaggatgaagtacccccacctggtggcgggggcactggcagccagcgcacccgttctagctgtggcaggcctcggcgactccaaccagttcttccgggacgtcacggcgnnnnnnnnnnnnnnnnnnnnnnnnnnnnnnnnnnnnnnnnnnnnnnnnnnnnnnnnnnnnnnnnnnnnnnnnnnnnnnnnnnntacgacagggtccgctgggagtttggcacctgccagccgctgtcagacgagaaggacgtgacccagctcttcatgttcgcccggaatgccttcgccgtgctggccatgatggacnnnnnnnnnnnnnnnnnnnnnnnnnnnnnnnnnnnnnnnnnnnnnnnnnnnnnnnnnnnnnnnnnnnnnnnnnnnnnnnnnnnnnnnnnnnnnnnnnnnnnnnnnnnncagggctggtctacaacgcctcgggctccgagcactgctacgacatctaccggctctaccgcagctgtgctgaccccaccggctgcggcaccggccccgatgccagggcctgggactaccag

SEQ ID NO: 27528 - DNA, 392 bp, Macaca Mulatta
gtgtttccatttcagcgtgtgatcgaagggaccgtaccttacgtcacaacggattacaattttaaaattcctggagcatcagagaaaattggagcaagagaacctgaggaggcacataaagagaaaccataccgaagacctaagttctgtcgaaaaatgaagtgatgctcgcatttttaacaagggaagaaactttcctacctgaaagctttgtctcaagcctgaccacgagagacatgatggagtttcatggccgtgaatggtgcccttatcagcaacactgttttctgtgtaattcgtgaatgtcgtatagtagtcttaagtttctcttttaaagctgcatgagctagaatttgctctagtcttctgtgtggtactcatacttgctgtct

SEQ ID NO: 27529 - DNA, 170 bp, Macaca Mulatta
agatgagagtggccgggaggagaatctgaattccgaagcacctgggagttccaatcagagtcacgaaatccaccaagaagccagcgaagcctcccctgcttaccttgaggagttccaaagctatgctcaaaaaaatgtaattctgcttgggagttctccactagaacagg

SEQ ID NO: 27530 - DNA, 700 bp, Macaca Mulatta
ggctaaacagactttttaatagtgattgagcagtccatgtttacaagtaagatgagcctttaaaaaatatatacatatacatataaatatatacacacacacagatatttttatacagtcagtatttgctagaactgtgtcatacttgtctacatctaaataagctgggtgactgttctgtggccatgagcgaggtcagatagaaaaattccacagtgcccagcctctccctgctcactctgcatgggcacagacctgttcataatgcacctgcctcccagcctctttctgagaagagtaaggccattctgttttgattttggtagataatcttgtgccgtggaaatcagaagggcaaaacgaagcagtcatgatgagaagcacacctcagaaatcaggacatccccctatcaggtggttttggagaaaacaaggaaggtggaagaatggagtgcaattgtgtgagcagaaaggggggcaggaatcccgggtgctgcactgcttaaaccacaggacctggttaactcctcaccaagcttcccacgaccctggttgccagtgggcgtgggagacattgtatacacattatgctatttaaaatatgttcaaaccatagtgtaaatgctaattaaccatattggtatataaccagaattttatattaaaaggggccctcctttttaaatatatgcctgtgtat

SEQ ID NO: 27531 - DNA, 221 bp, Macaca Mulatta
gaatacacaatggatgtgttcttcagacagacatggattgacaaaagactaaaatatgatggccccattgaaattttgagattgaacaatatgatggtaacaaaagtatggacccctgatactttcttcaggaatggaaagaaatctgtctcacataatatgacagctccaaataagctttttagaattatgagaaatggtactattttatacacaatgag

SEQ ID NO: 27532 - DNA, 691 bp, Macaca Mulatta
  misc_feature (1)...(691): n = A,T,C or G
ttaaaggaagagcctacgctggatgtcttgatcaataatgcagggatcttccagtgcccttacatgaatactgaagatgggtttgagatgcagttcggagtgaaccatctggggcactttctactcaccaatcttctccttggactcctcaaaagttcagctcccagcaggattgtggtagtttcttccaaactttataaatatggagacatcaactttgatgacttgaacagtgaacaaagctataataaaagcttttgttatagccggagcaaactggctaacattctttttaccagggaactagcccgccgcttagaaggcacaaatgtcaccgtcaatgtgttgcatcctggtattgtacggacaaatctggggaggcacatacacattccactgttggtcagaccactgttcaatttggtgtcatgggcttttttcaaaactccagtagaaggtgcccagacttccatttatttggcctcttcacctgaagtagaaggagtgtcaggaagatactttggggattgtaaagaggaagaattattgcccaaagctttggatgaatctgttgcaaganaactctgggatatcagtgaagtgatggttggcctgctaaaataggaacaaggagtaaaagagctgtttataaaactgcatatcagttatatctgtgatcaggaatggtgtg

SEQ ID NO: 27533 - DNA, 643 bp, Macaca Mulatta
ggggacttccgttccagtctcagcggcagctggatcgctcgacagagtgcctctggtagttggccaggatgccgaatatcaaaatcttcagcggcagctcccaccaggacttatcccagaaaatagccgaccgcctgggcctggagctaggcaaggtggtgactaagaaattcagcaaccaggagacctgcgtggaaattgatgagagtgtgcgtggagaggatgtctacatcgttcagagtggttgtggcgaaatcaacgacagtctaatggagcttttgatcatgattaatgcctgcaagattgcttcagctagccgagttactgcagtcatcccatgcttcccttatgcccgacaggataagaaggataagagccgggccccaatctctgccaagcttgttgcaaatatgctgtctatagcaggtgcggatcatatcatcaccatggacctacatgcttctcaaattcagggcttttttgatatcccagtagacaacctgtatgcagagccaactgtcctgaagtggataagggagaatatctctgagtggaagaactgcactattgtctcgccagatgctggtggagctaagagagtgacctccattgcagaccagttgaagtggactttgctttgatt

SEQ ID NO: 27534 - DNA, 180 bp, Macaca Mulatta
tggcttcctccccggcggtggacgtgtcctgcaggcggcgggagaagcggcggcagctggacgcgcgccgcagcaagtgccgcatccgcctgggcggccacatggagcagtggtgcctcctcaaggagcggctgggcttctccctgcactcgcagctcgccaagttcctgttggaccggt

SEQ ID NO: 27535 - DNA, 139 bp, Macaca Mulatta
  misc_feature (1)...(139): n = A,T,C or G
gaggtgactcctcggccctccgaggaacagttccagttccagtcccagcagcaagtccaacaggaagtcatcccagccccaaccccagnnnccagaaccaggaaatgcggaggcggagcccacagagcctgggcctctt

SEQ ID NO: 27536 - DNA, 1483 bp, Macaca Mulatta
  misc_feature (1)...(1483): n = A,T,C or G
ggagacacatgctactcttcaacgcatactccccggtaggacacgccatacacatctgcagcatggtgtcatttgtcattggggatgaacacgtcgtgctgcccaacttcgaaccannnnnnnnnnnnnnnnnnnnnnnnnnnnnnnnnnnnnnnnnnnnnnnnnnnnnnnnnnnnnnnnnnnnnnnnnnnnnnnnnnnnnnnnnnnnnnnnnnnnnnnnnnnnnnnnnnnnnnnnnnnnnnnnnnnnnnnnnnnnnnnnnnnnnnnnnnnnnnnnnnnnnnnnnnnnnnnnnnnnnnnnnnnnnnnnnnnnnnnnnnnnnnnnnnnnnnnnnnnnnnnnnnnnnnnnnnnnnnnnnnnnnnnnnnnnnnnnnnnnnnnnnnnnnnnnnnnnnnnnnnnnnnnnnnnnnnnnnnnnngtggaatggctggacgttaaatattctatgcctacaagtgataaagagtattctcctgaggaagtagcagcagcaattaaaattcaagccatgtggagaggaacttatgttagattnnnnnnnnnnnnnnnnnnnnnnnnnnnnnnnnnnnnnnnnnnnnnnnnnnnnnnnnnnnnnnnnnnnnnnnnnnnnnnnnnnnnnnnnnnnnnnnnnnnnnnnnnnnnnnnnnnnagactgatgtttaaaagcaagtgcaagtctttggaatcttatccgtgctatcaagatgaagaaactaagattgctttggcggattatactgtgacttatcaagagcagccaccaaattcttggtttatagtattcannnnnnnnnnnnnnnnnnnnnnnnnnnnnnnnnnnnnnnnnnnnnnnnnnnnnnnnnnnnnnnnnnnnnnnnnnnnnnnnnnnnnnnnnnnnnnnnnnnnnnnnnnnnnnnnnnnnnnnnnnnnnnnnnnnnnnnnnnnnnnnnnnnnnnnnnnnnnnnnnnnnnnnnnnnnnnnnnnnnnnnnnnnnnnnnnnnnnnnnnnnnnnnnnnnnnnnnnnnnnnnnnnnnnnnnnnnnnnnnnnnnnnnnnnnnnnnnnnnnnnnnnnnnnnnnnnnnnnnnnnnnnnnnnnnnnnnnnnnnnnnnnnnnnnnnnnnnnnnnnnnnnnnnnnnnnnnnnnnnnnnnnnnnnnnnnnnnnnnnnnnnnnnnnnnnnnnnnnnnnnnnnnnnnnnnnnnnnnnnnnnnnnnnnnnnnnnnnnnnnnnnnnnnnnnnnnnnnnnnnnnnnnnnnnnnnnnnnnnnnnnnnnnnnnnnnnnnnnnnnnnnnnnnnnnnnnnnnnnnnnnnnnnnnnnnnnnnnnnnnnnnnnnttatggtgaaagacatgaggagttaattaccttaggaagcccagactcccacactattagtgagggacaaaaatcttcagtaacttccaaaataacaaggaaaggcaaagaaaagtcttctgagaaagaaaagacagccaaagaaaaacaagcacctcgctttgagcctcag

SEQ ID NO: 27537 - DNA, 5394 bp, Macaca Mulatta
  misc_feature (1)...(5394): n = A,T,C or G
gcatgaagagccccaggccccgcctcctgctaccannnnnnnnnnnnnnnnnnnnnnnnnnnnnnnnnnnnnnnnnnnnnnnnnnnnnnnnnnnnnnnnnnnnnnnnnnnnnnnnnnnnnnnnnnnnnnnnnnnnnnnnnnnnnnnnnnnnnnnnnnnnnnnnnnnnnnnnnnnnnnnnnnnnnnnnnnnnnnnnnnnnnnnnnnnnnnnnnnnnnnnnnnnnnnnnnnnnnnnnnnnnnnnnnnnnnnnnnnnnnnnnnnnnnnnnnnnnnnnnnnnnnnnnnnnnnnnnnnnnnnnnnnnnnnnnnnnnnnnnnnnnnnnnnnnnnnnnnnnnnnnnnnnnnnnnnnnnnnnnnnnnnnnnnnnnnnnnnnnnnnnnnnnnnnnnnnnnnnnnnnnnnnnnnnnnnnnnnnnnnnnnnnnnnnnnnnnnnnnnnnnnnnnnnnnnnnnnnnnnnnnnnnnnnnnnnnnnnnnnnnnnnnnnnnnnnnnnnnnnnnnnnnnnnnnnnnnnnnnnnnnnnnnnnnnnnnnnnnnnnnnnnnnnnnnnnnnnnnnnnnnnnnnnnnnnnnnnnnnnnnnnnnnnnnnnnnnnnnnnnnnnnnnnnnnnnnnnnnnnnnnnnnnnnnnnnnnnagctggaggcctatgttggtggttcaccaccccggagggcccagaccctgctggacttgacactgctggacatcaatgaccatgctccagctttcaatcagagccgctatcatgctgtggtgtctgagagcctggcccctggcagtcctgtcttgcaggtgttcgcatctgatgccgatgctggtgccaatggggctgtgacttatgagatcaatcggaggcagagcgagggtgacggacccttctccatcgacgcgcacacggggctgcttcagttagagcggccactggactttgagcaacggcgggtccatgaactggtggtgcaagcacgagatggtggggctcaccctgagttgggctcagcctttgtgactgtgcatgtgcgagatgccaatgacaatcagccctccatgactgtcatctttctcagtgcagatggctccccccaagtgtctgaggccgccccacctggacagcttgttgctcgcatctctgtgtcagacccagatgatggtgactttgcccatgtcaatgtgtccctggaaggtggagagggccactttgccctaagcacccaagacagcgtcatctatctggtatgtgtggctcggcggctggatcgggaagagagggatgcctataacttgagggttacagccacagactcaggctcacctccactgcgggctgaggctgcctttgtgctgcacgtcactgatgtcaatgacaacgcacctgcctttgaccgccagttctaccaacctgagcccctgcctgaggttgcgctgcctggcagctttgtagtgcgggtgactgctcgggatcctgaccaaggcaccaatggtcaggtcacttannnnnnnnnnnnnnnnnnnnnnnnnnnnnnnnnnnnnnnnnnnnnnnnnnnnnnnnnnnnnnnnnnnnnnnnnnnnnnnnnnnnnnnnnnnnnnnnnnnnnnnnnnnnnnnnnnnnnnnnnnnnnnnnnnnnnnnnnnnnnnnnnnnnnnnnnnnnnnnnnnnnnnnnnnnnnnnnnnnnnnnnnnnnnnnnnnnnnnnnnnnnnnnnnnnnnnnnnnnnnnnnnnnnnnnnnnngagggcacccagcctggaacttgcttccttcaggtnnnnnnnnnnnnnnnnnnnnnnnnnnnnnnnnnnnnnnnnnnnnnnnnnnnnnnnnnnnnnnnnnnnnnnnnnnnnnnnnnnnnnnnnnnnnnnnnnnnnnnnnnnnnnnnnnnnnnnnnnnnnnnnnnnnnnnnnnnnnnnnnnnnnnnnnnnnnnnnnnnnnnnnnnnnnnnnnnnnnnnnnnnnnnnnnnnnnnnnnnnnnnnnnnnnnnnnnnnnnnnnnnnnnnnnnnnnnnnnnnnnnnnnnnnnnnnnnnnnnnnnnnnnnnnnnnnnnnnnnnnnnnnnnnnnnnnnnnnnnnnnnnnnnnnnnnnnnnnnnnnnnnnnnnnnnnnnnnnnnnnnnnnnnnnnnnnnnnnnnnnnnnnnnnnnnnnnnnnnnnnnnnnnnnnnnnnnnnnnnnnnnnnnnnnnnnnnnnnnnnnnnnnnnnnnnnnnnnnnnnnnnnnnnnnnnnnnnnnnnnnnnnnnnnnnnnnnnnnnnnnnnnnnnnnnnnnnnnnnnnnnnnnnnnnnnnnnnnnnnnnnnnnnnnnnnnnnnnnnnnnnnnnnnnnnnnnnnnnnnnnnnnnnnnnnnnnnnnnnnnnnnnnnnnnnnnnnnnnnnnnnnnnnnnnnnnnnnnnnnnnnnnnnnnnnnnnnnnnnnnnnnnnnnnnnnnnnnnnnnnnnnnnnnnnnnnnnnnnnnnnnnnnnnnnnnnnnnnnnnnnnnnnnnnnnnnnnnnnnnnnnnnnnnnnnnnnnnnnnnnnnnnnnnnnnnnnnnnnnnnnnnnnnnnnnnnnnnnnnnnnnnnnnnnnnnnnnnnnnnnnnnnnnnnnnnnnnnnnnnnnnnnnnnnnnnnnnnnnnnnnnnnnnnnnnnnnnnnnnnnnnnnnnnnnnnnnnnnnnnnnnnnnnnnnnnnnnnnnnnnnnnnnnnnnnnnnnnnnnnnnnnnnnnnnnnnnnnnnnnnnnnnnnnnnnnnnnnnnnnnnnnnnnnnnnnnnnnnnnnnnnnnnnnnnnnnnnnnnnnnnnnnnnnnnnnnnnnnnnnnnnnnnnnnnnnnnnnnnnnnnnnnnnnnnnnnnnnnnnnnnnnnnnnnnnnnnnnnnnnnnnnnnnnnnnnnnnnnnnnnnnnnnnnnnnnnnnnnnnnnnnnnnnnnnnnnnnnnnnnnnnnnnnnnnnnnnnnnnnnnnnnnnnnnnnnnnnnnnnnnnnnnnnnnnnnnnnnnnnnnnnnnnnnnnnnnnnnnnnnnnnnnnnnnnnnnnnnnnnnnnnnnnnnnnnnnnnnnnnnnnnnnnnnnnnnnnnnnnnnnnnnnnnnnnnnnnnnnnnnnnnnnnnnnnnnnnnnnnnnnnnnnnnnnnnnnnnnnnnnnnnnnnnnnnnnnnnnnnnnnnnnnnnnnnnnnnnnnnnnnnnnnnnnnnnnnnnnnnnnnnnnnnnnnnnnnnnnnnnnnnnnnnnnnnnnnnnnnnnnnnnnnnnnnnnnnnnnnnnnnnnnnnnnnnnnnnnnnnnnnnnnnnnnnnnnnnnnnnnnnnnnnnnnnnnnnnnnnnnnnnnnnnnnnnnnnnnnnnnnnnnnnnnnnnnnnnnnnnnnnnnnnnnnnnnnnnnnnnnnnnnnnnnnnnnnnnnnnnnnnnnnnnnnnnnnnnnnnnnnnnnnnnnnnnnnnnnnnnnnnnnnnnnnnnnnnnnnnnnnnnnnnnnnnnnnnnnnnnnnnnnnnnnnnnnnnnnnnnnnnnnnnnnnnnnnnnnnnnnnnnnnnnnnnnnnnnnnnnnnnnnnnnnnnnnnnnnnnnnnnnnnnnnnnnnnnnnnnnnnnnnnnnnnnnnatgttgcagtgcttgacctcccatcaacagccccaccttcctgcaggcttcaggagctgctccttgaggcctccctatacaggtancaggtaccagaccgcgtgcctccaggaacactggtgacaactctgcaagcgaaggatccagatgagggggagaatgtgaccatcttgtacacgctaactggtnggtcctggctcagaacttttctctctgaaccctcactcaggggagnnnnnnnnnnnnnnnnnnnnnnnnnnnnnnnnnnnnnnnnnnnnnnnnnnnnnnnnnnnnnnnnnnnnnnnnnnnnnnnnnnnnnnnnnnnnnnnnnnnnnnnnnnnnnnnnnnnnnnnnnnnnnnnnnnnnnnnnnnnnnnnnnnnnnnnnnnnnnnnnnnnnnnnnnnnnnnnnnnnnnnnnnnnnnnnnnnnnnnnnnnnnnnnnnnnnnnnnnnnnnnnnnnnnnnnnnnnnnnnnnnnnnnnnnnnnnnnnnnnnnnnnnnnnnnnnnnnnnnnnnnnnnnnnnnnnnnnnnnnnnnnnnnnnnnnnnnnnnnnnnnnnnnnnnnnnnnnnnnnnnnnnnnnnnnnnnnnnnnnnnnnnnnnnnnnnnnnnnnnnnnnnnnnnnnnnnnnnnnnnnnnnnnnnnnnnnnnnnnnnnnnnnnnnnnnnnnnnnnnnnnnnnnnnnnnnnnnnnnnnnnnnnnnnnnnnnnnnnnnnnnnnnnnnnnnnnnnnnnnnnnnnnnnnnnnnnnnnnnnnnnnnnnnnnnnnnnnnnnnnnnnnnnnnnnnnnnnnnnnnnnnnnnnnnnnnnnnnnnnnnnnnnnnnnnnnnnnnnnnnnnnnnnnnnnntgctgcgccaggagccgcccgtgccggcgcttcgcctggacgcgcgcaccggggcgctcagcgctccgcgcggcctggaccgagagaccactcctgcgctgctgctgctggtggaagccaccgaccggccagccaacgccagccgccgccgtgcaacgcgcgtttctgcgcgcgtcttcgtcacggatgagaatgacaacgcgcctgtcttcgcctcgccctcacgcgtgcgcctcccagaggaccagccgcctgggcccgcggcgctgcacgtggtagcccgggacccggacctgggcgaggccgcacgcgtgtcctatcggatggcatctggcggggacggacacttccggctgcactcaagcactgnnnnnnnnnnnnnnnnnnnnnnnnnnnnnnnnnnnnnnnnnnnnnnnnnnnnnnnnnnnnnnnnnnnnnnnnnnnnnnnnnnnnnnnnnnnnnnnnnnnnnnnnnnnnnnnnnnnnnnnnnnnnnnnnnnnnnnnnnnnnnnnnnnnnnnnnnnnnnnnnnnnnnnnnnnnnnnnnnnnnnnnnnnnnnnnnnnnnnnnnnnnnnnnnnnnnnnnnnnnnnnnnnnnnnnnnnnnnnngggccaacgggcaagtgacttatggaggcgtctctagcggaagcttttctctggatcctgacactggtgttctcacgactcttcgggcccttgatcgagaggagcaggaggagatcaacctgacagnnnnnnnnnnnnnnnnnnnnnnnnnnnnnnnnnnnnnnnnnnnnnnnnnnnnnnnnnnnnnnnnnnnnnnnnnnnnnnnnnnnnnnnnnnnnnnnnnnnnnnnnnnnnnnnnnnnnnnnnnnnnnnnnnnnnnnnnnnnnnnnnnnnnnnnnnnnnnnnnnnnnnnnnnnnnnnnnnnnnnnnnnnnnnnnnnnnnnnnnnnnnnnnnagatggggacccatcaggagcctttgtcctagaccttgcgtcaggagagtttggcac

SEQ ID NO: 27538 - DNA, 815 bp, Macaca Mulatta
  misc_feature (1)...(815): n = A,T,C or G
gggctttctttgctgcgtctactgcaagaatgaagaccattctcagcaatcagactgtcgacattccagaaaatgtcgacattaccctgaagggacgcacagttatcgtgaagggccccagaggaactctgcggagggacttcaatcacatcaatgtagaactcagtcttcttnnnnnnnnnnnnnnnnnnnttcgggttgacaaatggtggggtaacagaaaggaactggctaccgttcggactatttgtagtcatgtacagaacatgatcaagggtgttacactggggcttccgttacaagatgaggtctgtgtatgctcacttccccatcaacgttgttatcccaggagaatggggtctcttgttggaaatccgaaaatttccttgggtgaaaaatacatcccgcaggggttcgagatgagaccaaggtgttgccttgttcagtatcctcaggcccagaaaagaatgaatttatccctttgaagggaaagtgactttgaaactttgttttaaaattcccaggggctttttgatttttagcaaggcccacaaaaagttttaaaaaacccgggggaatttcgggggaaaattttttgtgggagtgggtatcactagtgttccttctgaaaaaaaggaacgtgtttccccaacagggctgaatgaaataagaattcctaaggggtttatccccgcctaaccaaaaaaagaaaaaatgccccccgaatggcacttccccataagaaaaccctaacacttgtgggagaatatttttttaaaaagggaataggcccaccaaaaaaaacagaactccta

SEQ ID NO: 27539 - DNA, 456 bp, Macaca Mulatta
ccaacccgtccttcactgtgtcttttgttcccagtccctctccctgactcaggccctgggctccccacccccatcgggcggccctaggctgtggctcgccctggagcccgaggcccctggagagccacctcagccaggagagccaccccagcctctgggctctgttcgtctcctacctgcccacagaccttcccctgcaggggcctggcgcagtgctctctgccctccacagggggcagcaagcagtcgcagggcgcagcccccttccccagtggagctgtgctgagactgggcgtctgtgtctgcagcagtggtgggcccgggactgcctcccaccaggcagagctggccctgccgaagaccctggggcttcccaccagggcagccagcacagctgggccagcgaggccttggagtgctgcagccggggtcccagcctcctggccatatagagcc

SEQ ID NO: 27540 - DNA, 394 bp, Macaca Mulatta
cccagatacagtttatgtaacttgatggaagaaaatggaattactccaaaaagacaagtgctcaagcagcaaaatccttacttccagcaaaatccaaactgctgtctcttaaatctctgaaactctcttcttccactagaatgctacaagtaactcagtgaaggcccatgaaggaaattgggactagtttataggagaacgtatcaatacagtttataaagccaagaattgctatgatttaagactaagatctgtctttttggtgactaacccttcagttctttcaactcctgttaatacccataatcagtaacctatcaagaaaagcccttatttggaaagtgtgaaatttgtatttggaaaagctgcctggagagaagaactgtgtccttta

SEQ ID NO: 27541 - DNA, 1040 bp, Macaca Mulatta
  misc_feature (1)...(1040): n = A,T,C or G
aggtctgtgacctgcagcaaggtaagacctatgtcttcagggtccgggcagtcaatgcaaacggcgtggggaagccctcggacatgtcagagcccgtgctggtagaggcgagaccaggnnnnnnnnnnnnnnnnnnnnnnnnnnnnnnnnnnnnnnnnnnnnnnnnnnnnnnnnnnnnnnnnnnnnnnnnnnnnnnnnnnnnnnnnnnnnnnnnnnnnnnnnnnnnnnnnnnnnnnnnnnnnnnnnnnnnnnnnnnnnnnnnnnnnnnnnnnnnnnnnnnnnnnnnnnnnnnnnnnnnnnnnnnnnnnnnnnnnnnnnnnnnnnnnnnnnnnnnnnnnnnnnnnnnnnnnnnnnnnnnnnnnnnnnnnnnnnnnnnnnnnnnnnnnnnnnnnnnnnnnnnnnnnnnnnnnnnnnnnnnnnnnnnnnnnnnnnnnnnnnnnnnnnnnnnnnnnnnnnnnnnnnnnnnnnnnnnnnnnnnnnnnnnnnnnnnnnnnnnnnnnnnnnnnnnnnnnnnnnnnnnnnnnnnnnnnnnnnnnnnnnnnnnnnnnnnnnnnnnnnnnnnnnnnnnnnnnnnnnnnnnnnnnnnnnnnnnnnnnnnnnnnnnnnnnnnnnnnnnnnnnnnnnnnnnnnnnnnnnnnnnnnnnnnnnnnnnnnnnnnnnnnnnnnnnnnnnnnnnnnnnnnnnnnnnnnnnnnnnnnnnnnnnnnnnnnnnnnnnnnnnnnnnnnnnnnnnnnnnnnnnnnnnnnnnnnnnnnnnnnnnnnnnnnnnnnnnnnnnnnnnnnnnnnnnnnnnnnnnnnnnnnnnnnnnnnnnnnnnnnnnnnnnnnnnnnnnnnggttgcaaacaccaagaaagaaaccgttttcaaatggctcaaggatgacgttctgtatgaaacggagacatcgcctgacctggagaggggaacctgtcagctgctcatcccaaagnagttgtcaaagaaggaccatggtgaatacaaggcaaccttgaaagatgacagaggccaagatgcgtccatccttgaaatagctggcaaag

SEQ ID NO: 27542 - DNA, 94 bp, Macaca Mulatta
gggtaagatggtcctgcagctatccaaagagccttctgcccgtctgctgaagcatgtagtgagatgttaccttcggctttcagataaccccagg

SEQ ID NO: 27543 - DNA, 668 bp, Macaca Mulatta
  misc_feature (1)...(668): n = A,T,C or G
gaagcccagctgctgagaggagtgccggagagtgacctttgcatctgcctgtccagccagcatggaaccaaagcggatcagagagggctacctgntgaagagggggagcgtgttcaatacgtggaaacccatgtgggttgtactgttagaagatggaattgaattctataagaagaaaagtgacaacagccccaaaggaatgatcccactgaaagggagcactctgactagcccttgtcaggactttggcaaaaggatgtttgtgtttaagatcactacgaccaaacagcaggaccacttcttccaggcagccttcctggaggagagagacgcctgggttcgggatatcaagaaggccattaaatgcattgaaggaggccagaagtttgccaggaaatctaccaggaggtccattcgactgccagaaaccattgacttaggtgccttatatttgtccatgaaagacactgaaaaaggaataaaagaactgaatctagagaaggacaagaagatttttaatcactgcttcacaggtaactgcgtcattgattggctagtatccaaccagtctgttaggaatcgccaggaaggcctcatgatcgcttcatcactgctcaatgaggggtatctgcagcctgctggagacatgtccaagagtgcagtggatg

SEQ ID NO: 27544 - DNA, 259 bp, Macaca Mulatta
taggagtcatcagcctggatgatctatgtcagatgagaggtttggagggcactactgctgggctgaccttgctgagcgagcaaaaggtgggtgcagactggcctccccccagggctggagtgtgtgggggcatcaccctgaatcttgaccctcagagggacaaaccaaggccaggatttcttgggctcagagtcagggacacaggaactgctgggggctgggctggaaacctaaacagaagaaagcctaacctggtggg

SEQ ID NO: 27545 - DNA, 140 bp, Macaca Mulatta
  misc_feature (1)...(140): n = A,T,C or G
nggctggccctcactgccatgaataaatttgaagaagcagttacaagttatcaaaaggcattagatcttgaccctgaaaatgattcctataagtcaaatctgaaaatagcagaacagaagttaagagaggtatccagtcc

SEQ ID NO: 27546 - DNA, 1158 bp, Macaca Mulatta
  misc_feature (1)...(1158): n = A,T,C or G
gggggtcctgctggtcctaggggccctgccggtccttctggccctgctggaaaagatggtcgcactggacatcctggtacagttggacctgctggcattcgaggccctcagggtcaccaaggtcctgctggcccccctggtccccctggcccacctggacctccaggtgtaagtggtggtggttatgactttggttacgatggagacttctacagggctgaccagcctcgctcagcaccttctctcagacccaaggattatgaagttgatgctactctgaagtctctcaacaaccagattgagacccttcttactcctgaaggctctagaaagaacccagctcgcacatgccgtgacttgagactcagccacccagagtggagcagcggttgctactggattgaccctaaccaaggatgcactatggatgctatcaaagtatactgtgatttctctactggcgaaacctgtatccgggcccaacctgaaaacatcccagccaagaactggtataggagctctaaggacaagaaacacgtctggctaggagaaactatcaatgctggcagccagtttgaatacaatgtagaaggagtgacttccaaggaaatggctacccaacttgccttcatgcgcttgctggccaactatgcctctcagaacatcacctaccactgcaagaacagcattgcatacatggatgaggagactggcaacctgaaaaaggctgtcattctacagggctctaatgatgttgaacttgttgctggagggcaacagcaggtttacttaggctgttctcgtagatggctgctctanaaagacaaatgaatggggaaagacaatcattgaatacaaaacaaataagccatctcgcctgcccttccttgatattgcacctttgggacatccggtgggtgcccacccaaggaattcttttgtgggaccattggccccaattcttgttttcaaaataaaatgaaccttccaacccnnnnnnnnnnnnnnnnnnnnnnnnnnnnnnnnnnnnnnnnnnnnnnnctccttttgggcccattttccctttccttcccttnnnnnnnnnnnnnnnnnnncctggaaaaaagccttgggaaatttcccctttttccccaatttttccctcttctccgggcgcat

SEQ ID NO: 27547 - DNA, 691 bp, Macaca Mulatta
  misc_feature (1)...(691): n = A,T,C or G
taaggaatacaaaaaatattcacttactaaaaacgtttgtaaggttcttctgcctggttttccttctttaatgtacaagcaaatggcagtcaaatcatctaaatggtgattgaccctaatcacattttggaagacaactgaagtcaccctctgatatgtcacaggaagccactttctaatgcctgtggctaactagaccatccttacagagtcctgtttcaatatttatcatatgggcaactaagaatatttcttctgactcttgagttaatagctgtagctttaaggactgggtttatggtgggtgaggaggggaacagaaggaaacttagaaggaaactcatgacactacaatcagcactcttccagggtgcctgaccctgacctacccaaactgcattttgggtagtatcttcaggtgactcccagcaagtagtccagttatcccattaggtatattattttcaatcttctcttgagtctgtcatttactaataaagcctagtatattgatacacagtatacagtataagataataatcactatgccattaatttagattttaaagtttttcactgcaaatgatttcactggatttttagtatgaatctgtggatagctgtgttttactagatccagattttccttanacctgatgatatgtccttcaccttaaaagtagggggcagg

SEQ ID NO: 27548 - DNA, 159 bp, Macaca Mulatta
cagatgaacccgaatggcccagcctggtgctggtggatgttagcggttcttcccttggaaagccgagctcagctccccttcctagcaatgaggtccttaaaggacagactgaatggtattcgacgagtcctggccttcatatcccgaaaccaaaactag

SEQ ID NO: 27549 - DNA, 383 bp, Macaca Mulatta
taggtgggcagccccactcctgcccctactcactgcccggctctgtcccagacttcgtggtgctcgatgactcccttcacgtccaggccacctacatctcgggtgagcttgtgtggcaggcggaggcagccaggcagtgacaaggacttcggctgagaggacgcccagccgcagctggatgccatcagggctgagtggttggggagctggtctccagggagtgagtcgggagccctgctggaatgacgcccagggcctttgctgccgccctggaggcggtggctgggataaatgtgcacccagcaggactcactttggctccgggttttgcttgtgcttgcacgtggcaccatccttggttgccctcttggggaaggcattcg

SEQ ID NO: 27550 - DNA, 663 bp, Macaca Mulatta
ccataaacaagcatagttccggtactttgtcttggataacagtgtcatcctggcaatgctggaacaacctcttggaaatgagcagaatgattttttcccctctgtcactgtgctggtccgggggatgtctggaagacttgcttgggcacaacagctttgtcttttacccagaggagcaaaagcaaatcagaagctttttgtgcctgaacctcgcccagttcctaaaaatgatgttggatgtaaatattctgtgaaacatcggccatttcctgaagaggtggacaagattccttttgtgaaagcagatctcagcattccagatttgcatgaaatagtcactgaagaattagaagagagacatgaaaaattaaggagtggcatggcccagcagattgcttatgaaatacaccttgagcaacagagtgaggaggaattgcaaaagagaagctttcctgacccagttacggattgcaagcccccgcctcctgcccaggaattccaaacagcccgccttttcctctcacactttggatttttgtccttagaagcattgaaggaacctgcaaatagtcgtctacctcctcaccttattgcacttgattccacgatacctggattttttgatgacatagggtatctggatctcttgccatgtcgtccttt

SEQ ID NO: 27551 - DNA, 263 bp, Macaca Mulatta
aagagtttgcagcagtgagagctgtccagcaccggcttagctgaagtccactggggaggagggtgctattgagaaatggccacggggaaaggagcacattcgggtacctagcctccaggctgaggagcccctgcccatcgctcagtcccctcctaagggtgcagggctggaggaggtaaccagggcagtaggtaacctgcgccctcaggcagcgctgctgagcagtgagaagccattggccttcacacagctcttacgtggcc

SEQ ID NO: 27552 - DNA, 796 bp, Macaca Mulatta
  misc_feature (1)...(796): n = A,T,C or G
gggcaagtcccaggctcttggagcctcaggtgagggacactcagcagggatatcaggaagagggatgactccacgtgactggctcagggcttggcccacaggaactcctaacaaatctgaaccgaatcaagaaggtgtttcacccagatgctgttgcaggtggttgtccttgcaccatgtcgcatccctcgtcacagtgagggctcaacctcatgctcaccgaagtttctcccagccagagagcgctgctcagagccaacagggaggtgccgagtgacaaaatcactctgcattctgtccataaagacagccccgacttaccagggtccaacttaagatttctcaacccggagggatatgaattcaatagaaaccaaccacacttcagtacagtgttgaataaataacaggagatcttcaacactttatcatcaataggctctgtgttagatgattttgcccaaatggaggctaacataagtgttctgagcacgtttcagggaggctgggcgaggctatgatgtttggtagttaggtgtattanatgcttttttgacttacaatattttcgatttacagtgggtttctcaggacaaaccccactgcaagtcaggaagcatctctatttttcgcgggactgaaagatcaaatgcagggcccgttgtaagggctccttgcttctgtctgagtataaaaaaggcatctggggngggtgcaacggcctcacacctggtaatcccagcacttttaggctgaaggcggggcaacttcgagggtcagggacctcgaagacccc

SEQ ID NO: 27553 - DNA, 116 bp, Macaca Mulatta
aggatgttttgagcagtgacattataattctgacaataacacgatgcatagcaatcctgtatatttacttccagttccagaatttacgtcaacttggatcaaaatacattttgggt

SEQ ID NO: 27554 - DNA, 554 bp, Macaca Mulatta
tgctgcgcctgatgctgggacagccctgctcccagatgtaaataatgtgacctctacaaacctggatttttttatgtacaaccctgatcgtttgctgcattcctttttctatgaaataatatgaatgataataaaacagctttgacgtgattctgcctctggtttcctttatatgccttaaaaataatggactgggttgagcgatggaactgagagggctctacctgggctgtggatggaaatgtgagccgctaagaaagagtgcattctagcaagccaggctaccgcactgaacttcatcttctgtaaaactgaatggcgttgagccagatcgtatgggggcaggagggacacatacgtgatcactttcagtttcatgtcaaatatggcacagaaacttctccattcctcattttcactttctgatttccctgcccaacttcagttcttcgtgggattttagacttgaaagtgactgcagagggtgaaatccagctccccagtggctagaatctgacatccggtttcccaaactccctgtggtgaatgaccag

SEQ ID NO: 27555 - DNA, 4140 bp, Macaca Mulatta
  misc_feature (1)...(4140): n = A,T,C or G
tcaatgctgcgcccaaaaggagaatctgagaccatcatctccccaccgctccacacaatggaacaatcccaggcattcgtctccacatcgtaccaacaaagacatcccctgggcctcctttcccctccggccaactcagagtgatggtccccgaacctcttccccatctcgctgggagcaaaatgaggttccctgggcatccatcgccctccggccaacccnnnnnnnnnnnnnnnnnnnnnnnnnnnnnnnnnnnnnnnnnnnnnnnnnnnnnnnnnnnnnnnnnnnnnnnnnnnnnnnnnnnnnnnnnnnnnnnnnnnnnnnnnnnnnnnnnnnnnnnnnnnnnnnnnnnnnnnnnnnnnnnnnnnnnnnnnnnnnnnnnnnnnnnnnnnnnnnnnnnnnnnnnnnnnnnnnnnnnnnnnnnnnnnnnnnnnnnnnnnnnnnnnnnnnnnnnnnnnnnnnnnnnnnnnnnnnnnnnnnnnnnnnnnnnnnnnnnnnnnnnnnnnnnnnnnnnnnnnnnnnnnnnnnnnnnnnnnnnnnnnnnnnnnnnnnnnnnnnnnnnnnnnnnnnnnnnnnnnnnnnnnnnnnnnnnnnnnnnnnnnnnnnnnnnnnnnnnnnnnnnnnnnnnnnnnnnnnnnnnnnnnnnnnnnnnnnnnnnnnnnnnnnnnnnnnnnnnnnnnnnnnnnnnnnnnnnnnnnnnnnnnnnnnnnnnnnnnnnnnnnnnnnnnnnnnnnnnnnnnnnnnnnnnnnnnnnnnnnnnnnnnnnnnnnnnnnnnnnnnnnnnnnnnnnnnnnnnnnnnnnnnnnnnnnnnnnnnnnnnnnnnnnnnnnnnnnnnnnnnnnnnnnnnnnnnnnnnnnnnnnnnnnnnnnnnnnnnnnnnnnnnnnnnnnnnnnnnnnnnnnnnnnnnnnnnnnnnnnnnnnnnnnnnnnnnnnnnnnnnnnnnnnnnnnnnnnnnnnnnnnnnnnnnnnnnnnnnnnnnnnnnnnnnnnnnnnnnnnnnnnnnnnnnnnnnnnnnnnnnnnnnnnnnnnnnnnnnnnnnnnnnnnnnnnnnnnnnnnnnnnnnnnnnnnnnnnnnnnnnnnnnnnnnnnnnnnnnnnnnnnnnnnnnnnnnnnnnnnnnnnnnnnnnnnnnnnnnnnnnnnnnnnnnnnnnnnnnnnnnnnnnnnnnnnnnnnnnnnnnnnnnnnnnnnnnnnnnnnnnnnnnnnnnnnnnnnnnnnnnnnnnnnnnnnnnnnnnnnnnnnnnnnnnnnnnnnnnnnnnnnnnnnnnnnnnnnnnnnnnnnnnnnnnnnnnnnnnnnnnnnnnnnnnnnnnnnnnnnnnnnnnnnnnnnnnnnnnnnaggaagtccgaggcagcgggggccttccaggcccaggacgagggacggtcacagcggcccagccaaggccagagccaacttctccgaagacagtccagccctgcccccagcaggcaggtgnnnnnncaggtgaccaagcgccctgccaaacaggcagaactgatctggcggagccaagcagagccccctcattctcggagtcctgagaagagacctgagggagatcggcggctccaggggtccccgccacctcccaggacatcagccaggacccctgagagggagctgcagacacagagacctctggagagtggccaagcaggcccaagacagcctctgggggcgtggcagagtcaggaggaaccgccagggtccaagggccctcacagacacctggagaggagctggagcagccaggagggaggcctggnnnnnnnnnnnnnnnnnnnnnnnnnnnnnnnngcctgggggcagccaaagccttggagggagcatgggggggccctcctggggagtacagggagagctggggacagccagaggcctgggaggaggcggccacccatgagccccccagagaactagggaagagaagcccactcacaagcccccctgagaactggggaggccccacagagtcctcacaatacaggcgccctggaacacccactactgtgggctggggggcagagggagcgtgtccatactcgcatggnnnnnnnnnnnnnnnnnnnnnnnnnnnnnnnnnnnnnnnnnnnnnnnnnnnnnnnnnnnnnnnnnnnnnnnnnnnnnnnnnnnnnnnnnnnnnnnnnnnnnnnnnnnnnnnnnnnnnnnnnnnnnnnnnnnnnnnnnnnnnnnnnnnnnnnnnnnnnnnnnnnnnnnnnnnnnnnnnnnnnnnnnnnnnnnnnnnnnnnnnnnnnnnnnnnnnnnnnnnnnnnnnnnnnnnnnnnnnnnnnnnnnnnnnnnnnnnnnnnnnnnnnnnnnnnnnnnnnnnnnnnnnnnnnnnnnnnnnnnnnnnnnnnnnnnnnnnnnnnnnnnnnnnnnnnnnnnnnnnnnnnnnnnnnnnnnnnnnnnnnnnnnnnnnnnnnnnnnnnnnnnnnnnnnnnnnnnnnnnnnnnnnnnnnnnnnnnnnnnnnnnnnnnnnnnnnnnnnnnnnnnnnnnnnnnnnagttccaaccagaggagcccgaggagtcagaaccaagcagaggccaagaccccttgactgaccagaagcaggcagactcggnggcagacaagaggccagcagagggcaaggctgggagcccgctcaagggccgactggtgacctcatggcggatgcccggggaccggcccacgctgttcaatccgttcctgctgtctctgggggtcctcaggtggcaaaggnnnnnnnnnnnnnnnnnnnnnnnnnnnnnnnnnnnnnnnnnnnnnnnnnnnnnnnnnnnnnnnnnnnnnnnnnnnnnnnnnnnnnnnnnnnnnnnnnnnnnnnnnnnnnnnnnnnnnnnnnnnnnnnnnnnnnnnnnnnnnnnnnnnnnnnnnnnnnnnnnnnnnnnnnnnnnnnnnnnnnnnnnnnnnnnnnnnnnnnnnnnnnnnnnnnnnnnnnnnnnnnnnnnnnnnnnnnnnnnnnnnnnnnnnnnnnnnnnnnnnnnnnnnnnnnnnnnnnnnnnnnnnnnnnnnnnnnnnnnnnnnnnnnnnnnnnnnnnnnnnnnnnnnnnnnnnnnnnnnnnnnnnnnnnnnnnnnnnnnnnnnnnnnnnnnnnnnnnnnnnnnnnnnnnnnnnnnnnnnnnnnnnnnnnnnnnnnnnnnnnnnnnnnnnnnnnnnnnnnnnnnnnnnnnnnnnnnnnnnnnnnnnnnnnnnnnnnnnnnnnnnnnnnnnnnnnnnnnnnnnnnnnnnnnnnnnnnnnnnnnnnnnnnnnnnnnnnnnnnnnnnnnnnnnnnnnnnnnnnnnnnnnnnnnnnnnnnnnnnnnnnnnnnnnnnnnnnnnnnnnnnnnnnnnnnnnnnnnnnnnnnnnnnnnnnnnnnnnnnnnnnnnnnnnnnnnnnnnnnnnnnnnnnnnnnnnnnnnnnnnnnnnnnnnnnnnnnnnnnnnnnnnnnnnnnnnnnnnnnnnnnnnnnnnnnnnnnnnnnnnnnnnnnnnnnnnnnnnnnnnnnnnnnnnnnnnnnnnnnnnnnnnnnnnnnnnnnnnnnnnnnnnnnnnnnnnnnnnnnnnnnnnnnnnnnnnnnnnnnnnnnnnnnnnnnnnnnnnnnnnnnnnnnnnnnnnnnnnnnnnnnnnnnnnnnnnnnnnnnnnnnnnnnnnnnnnnnnnnnnnnnnnnnnnnnnnnnnnnnnnnnnnnnnnnnnnnnnnnnnnnnnnnnnnnnnnnnnnnnnnnnnnnnnnnnnnnnnnnnnnnnnnnnnnnnnnnnnnnnnnnnnnnnnnnnnnnnnnnnnnnnnnnnnnnnnnnnnnnnnnnnnnnnnnnnnnnnnnnnnnnnnnnnnnnnnnnnnnnnnnnnnnnnnnnnnnnnnnnnnnnnnnnnnnnnnnnnnnnnnnnnnnnnnnnnnnnnnnnnnnnnnnnnnnnnnnnnnnnnnnnnnnnnnnnnnnnnnnnnnnnnnnnnnnnnnnnnnnnnnnnnnnnnnnnnnnnnnnnnnnnnnnnnnnnnnngtcagatgtggaggcactgaagcgggagctgcaggtgctatcggagcagtactcgcagaagtgcctggagataggggcgctcacgcggcaggccgaggagcgtgagcacacactgcgccgctgccagcaggagggccaggagctgctgcgccacaaccag

SEQ ID NO: 27556 - DNA, 535 bp, Macaca Mulatta
  misc_feature (1)...(535): n = A,T,C or G
gggattaaatttggcatttaaatagtggtggaaatattttatataattttcattttttggttgtgcagttccttggctactgtttttcttttccttcagtttttttaaactctcaaatgaaaaagtcttcgataaaatattgttaagctctattataaatattgttacacagggttatgcaattcctggcctggagcatttttgaaattcaaattgtttgtcctgtggagcaggcagtgattttgtttcaaaacttttatacacatttggagaaaagtactttatattttcagtgttttgttcgatgttaatgtccattcttagccaagctgctagcaggtgtcaattggatccctttccttcactgaaatggaagagtttataagcttacgttagtattgtaatatgtaaagtaagcccaannnnnnnnnnnnnnnnnnngatgatccccaatatatctaccattgtatgttaaagtgaaataaatcaccattnnnnnnnnnnnnnnnnnnnnnnnnnnnnnnnnnnnnnnnnn

SEQ ID NO: 27557 - DNA, 530 bp, Macaca Mulatta
  misc_feature (1)...(530): n = A,T,C or G
ctctccacggccaagagccgcacccggctgtttgggaagggcgactcggaggaggctttcctggtagattgtcctcacgaggaaggtgagctggcctcctgcccgaccatcacagtgagccctgttatcaccatccagaggccgggagacggccccaccggtgccaggnnnnnnnnnnnnnnnnnnnnnnnnnnnnnnnnnnnnnnnnnnnnnnnnnnnnnnnnnnnnnnnnnnnnnnnnnnnnnnnnnnnnnnnnnnnnnnnnnnnnnnnnnnnnnnnnnnnnnnnnnnnnnnnnnnnnnnnnnnnnnnnnnnnnnnnnnnnnnnnnnnnnnnnnnnnnnnnnnnnnnnnnnnnnnnnnnnnnnnnnnnnnnnnnnnnnnnnnnnnnnnnnnnnnnnnnnnnnnnnnnnnnnnnnnnnnnnnnnnnnnnnnnnnnnnnnnnnnnnnnnnnnnnnnnnnnnnnnnnnnnnnnnnnnnnnnnnnnnnggccagacagcactgcacatcggcaatgagaggcgcaacatggc

SEQ ID NO: 27558 - DNA, 659 bp, Macaca Mulatta
  misc_feature (1)...(659): n = A,T,C or G
agttcgtgtctgggccgttcggccatttgcccccaaagagaggtgtgtaaagatatctctaggaaatgtgcacaactttgaaaagnnnnnnnnnnnnnnnnnnnnnnnnnnnnnnnnnnnnnnnnnnnnnnnnnnnnnnnnnnnnnnnnnnnnnnnnnnnnnnnnnnnnnnnnnnnnnnnnnnnnnnnnnnnnnnnnnnnnnnnnnnnnnnnnnnnnnnnnnnnnnnnnnnnnnnnnnnnnnnnnnntatctcagcatcgagtgacaagagactgtatatgggagagattcagtgaagatacggaatggaagactccaagaccgcttgtctttgagacctcggactgcataactgacatcaaatgttggatgcccaggctagcaccctcccttcagatgaccattgctagcaagaaacaggaggcggtggccatattccaaaaaccacttctgtccgatttcaccaggatgactaaggcaagctccccaagctccccgtggcctctaaaaaccacctgccagatttcagggactnnnnnnnnnnnnnnnnnnnnnnnnnctgttttctaatgcaggcccaatgtgacagatttgttggttgggannnnnnnnnnnnnnnnnnnctggcttgcatgatattttctttctgtatttctcta

SEQ ID NO: 27559 - DNA, 1330 bp, Macaca Mulatta
  misc_feature (1)...(1330): n = A,T,C or G
ggtgggatcaagtgtaaaaggaggacgaagaggcaacatgtcccagnnnnccaggctcaacagggaactgctggatgagaaagagcctgaagccttgcaggactcactggatagattttattcaaccccttgcgggtatcttgaactgcctgacttatgccagccctacagaaatgccttctgctcgttggaagaagagcactttggcttggctcttgacatggacannnnnnnnnnnnnnnaagaagaggaagaagaccaaggcccaccatgccccagnnnnnnnnnnnnnnnnnnnnnnnnnnnnnnnnnnnnnnnnnnnnnnnnnnnnnnnnnnnnnnnnnnnnnnnnnnnnnnnnnnnnnnnnnnnnnnnnnnnnnnnnnnnnnnnnnnnnnnnnnnnnnnnnnnnnnnnnnnnnnnnnnnnnnnnnnnnnnnnnnnnnnnnnnnnnnnnnnnnnnnnnnnnnnnnnnnnnnnnnnnnnnnnnnnnnnnnnnnnnccaggctcaatggggtgctgatggaagcaggagagcctgaagtcttgcaggactcaccgaatggatgttattggactccttcaagttactttcaactacctgactcattccagcactacacaagtggcttttactcacttgaggaacagcacgtcagcttggcccttgacgtggacaatgggttttttactttgacgatgataaggttccacctgggcttccagatgggagtcctattcccacactaagcagcccttcctaagctgagagatgtcattgcctcaggcaggacttagaggcacatgtaggtttgaatgaaactgtagttccatttggaatcccagatataggataggaaagtgggaagaactctattccattctcagaccatgccagtggcaacctgtgctcagtctgaagacattggacccaagttgggtgtgacacgtttacataactatgcagcacatgccgggagtgatctgagagatattctgatttgaaccaggtatctctgggtagctacaaagttcctcagggatttcattttacgcgcatgtctctgagcttctatgcctgctgaaggtcagtgtcatctttgtgtttaagtcatccaaaggtgttaccctggtttcaatgaacctccccccattctttgtatcttcagtgttggtttgttttagctgatccatgtgtaacacaggagggatccttggctgaggattgtatttcagaaccactgaccgctcttgacaattgttaacccacctaggctcctttggttagagaagccacagtccttcagcctccagttgatagagatacttagga

SEQ ID NO: 27560 - DNA, 3534 bp, Macaca Mulatta
  misc_feature (1)...(3534): n = A,T,C or G
ggtcaatgatgccgtaggaagggactggccctggatctattttgttacactaatcatcatagggtcattttttgtacttaacttggttctcggtgtgcttagcggnnnnnnnnnnnnnnnnnnnnnnnnnnnnnnnnnnnnnnnnnnnnnnnnnnnnnnnnnnnnnnnnnnnnnnnnnnnnnnnnnnnnnnnnnnnnnnnnnnnnnnnnnnnnnnnnnnnnnnnnnnnnnnnnnnnnnnnnnnnnnnnnnnnnnnnnnnnnnnnnnnnnnnnnnnnnnnnnnnnnnnnnnnnnnnnnnnnnnnnnnnnnnnnnnnnnnnnnnnnnnnnnnnnnnnnnnnnnnnnnnnnnnnnnnnnnnnnnnnnnnnnnnnnnnnnnnnnnnnnnnnnnnnnnnnnnnnnnnnnnnnnnnnnnnnnnnnnnnnnnnnnnnnnnnnnnnnnnnnnnnnnnnnnnnnnnnnnnnnnnnnnnnnnnnnnnnnnnnnnnnnnnnnnnnnnnnnnnnnnnnnnnnnnnnnnnnnnnnnnnnnnnnnnnnnnnnnnnnnnnnnnnnnnnnnnnnnnnnnnnnnnnnnnnnnnnnnnnnnnnnnnnnnnnnnnnnnnnnnnnnnnnnnnnnnnnnnnnnnnnnnnnnnnnnnnnnnnnnnnnnnnnnnnnnnnnnnnnnnnnnnnnnnnnnnnnnnnnnnnnnnnnnnnnnnnnnnnnnnnnnnnnnnnnnnnnnnnnnnnnnnnnnnnnnnnnnnnnnnnnnnnnnnnnnnnnnnnnnnnnnnnnnnnnnnnnnnnnnnnnnnnnnnnnnnnnnnnnnnnnnnnnnnnnnnnnnnnnnnnnnnnnnnnnnnnnnnnnnnnnnnnnnnnnnnnnnnnnnnnnnnnnnnnnnnnnnnnnnnnnnnnnnnnnnnnnnnnnnnnnnnnnnnnnnnnnnnnnnnnnnnnnnnnnnnnnnnnnnnnnnnnnnnnnnnnnnnnnnnnnnnnnnnnnnnnnnnnnnnnnnnnnnnnnnnnnnnnnnnnnnnnnnnnnnnnnnnnnnnnnnnnnnnnnnnnnnnnnnnnnnnnnnnnnnnnnnnnnnnnnnnnnnnnnnnnnnnnnnnnnnnnnnnnnnnnnnnnnnnnnnnnnnnnnnnnnnnnnnnnnnnnnnnnnnnnnnnnnnnnnnnnnnnnnnnnnnnnnnnnnnnnnnnnnnnnnnnnnnnnnnnnnnnnnnnnnnnnnnnnnnnnnnnnnnnnnnnnnnnnnnnnnnnnnnnnnnnnnnnnnnnnnnnnnnnnnnnnnnnnnnnnnnnnnnnnnnnnnnnnnnnnnnnnnnnnnnnnnnnnnnnnnnnnnnnnnnnnnnnnnnnnnnnnnnnnnnnnnnnnnnnnnnnnnnnnnnnnnnnnnnnnnnnnnnnnnnnnnnnnnnnnnnnnnnnnnnnnnnnnnnnnnnnnnnnnnnnnnnnnnnnnnnnnnnnnnnnnnnnnnnnnnnnnnnnnnnnnnnnnnnnnnnnnnnnnnnnnnnnnnnnnnnnnnnnnnnnnnnnnnnnnnnnnnnnnnnnnnnnnnnnnnnnnnnnnnnnnnnnnnnnnnnnnnnnnnnnnnnnnnnnnnnnnnnnnnnnnnnnnnnnnnnnnnnnnnnnnnnnnnnnnnnnnnnnnnnnnnnnnnnnnnnnnnnnnnnnnnnnnnnnnnnnnnnnnnnnnnnnnnnnnnnnnnnnnnnnnnnnnnnnnnnnnnnnnnnnnnnnnnnnnnnnnnnnnnnnnnnnnnnnnnnnnnnnnnnnnnnnnnnnnnnnnnnnnnnnnnnnnnnnnnnnnnnnnnnnnnnnnnnnnnnnnnnnnnnnnnnnnnnnnnnnnnnnnnnnnnnnnnnnnnnnnnnnnnnnnnnnnnnnnnnnnnnnnnnnnnnnnnnnnnnnnnnnnnnnnnnnnnnnnnnnnnnnnnnnnnnnnnnnnnnnnnnnnnnnnnnnnnnnnnnnnnnnnnnnnnnnnnnnnnnnnnnnnnnnnnnnnnnnnnnnnnngggcaactacatcacgtacaaagacggggaggttgaccaccccatcatccaaccccgtagctgggagaacagcaagtttgactttgacaatgttctggccgccatgatggccctcttcaccgtctccaccttcgaagggtggccagagnnnnnnnnnnnnnnnnnnnnnnnnnnnnnnnnnnnnnnnnnnnnnnnnnnnnnnnnnnnnnnnnnnnnnnnnnnnnnnnnnnnnnnnnnnnnnnnnnnnnnnnnnnnnnnnnnnnnnnnnnnnnnnnnnnnnnnnnnnnnnnnnnnnnnnnnnnnnnnnnnnnnnnnnnnnnnnnnnnnnnnnnnnnnnnnnnnnnnnnnnnnnnnnnnnnnnnnnnnnnnnnnnnnnnnnnnnnnnnnnnnnnnnnnnnnnnnnnnnnnnnnnnnnnnnnnnnnnnnnnnnnnnnnnnnnnnnnnnnnnnnnnnnnnnnnnnnnnnnnnnnnnnnnnnnnnnnnnnnnnnnnnnnnnnnnnnnnnnnnnnnnnnnnnnnnnnnnnnnnnnnnnnnnnnnnnnnnnnnnnnnnnnnnnnnnnnnnnnnnnnnnnnnnnnnnnnnnnnnnnnnnnnnnnnnnnnnnnnnnnnnnnnnnnnnnnnnnnnnnnnnnnnnnnnnnnnnnnnnnnnnnnnnnnnnnnnnnnnnnnnnnnnnnnnnnnnnnnnnnnnnnnnnnnnnnnnnnnnnnnnnnnnnnnnnnnnnnnnnnnnnnnnnnnnnnnnnnnnnnnnnnnnnnnnnnnnnnnnnnnnnnnnnnnnnnnnnnnnnnnnnnnnnnnnnnnnnnnnnnnnnnnnnnnnnnnnnnnnnnnnnnnnnnnnnnnnnnnnnnnnnnnnnnnnnnnnnnnnnnnnnnnnnnnnnnnnnnnnnnnnnnnnnnnnnnnnnnnnnnnnnnnnnnnnnnnnnnnnnnnnnnnnnnnnnnnnnnnnnnnnnnnnnnnnnnnnnnnnnnnnnnnnnnnnnnnnnnnnnnnnnnnnnnnnnnnnnnnnnnnnnnnnnnnnnnnnnnnnnnnnnnnnnnnnnnnnnnnnnnnnnnnnnnnnnnnnnnnnnnnnnnnnnnnnnnnnnnnnnnnnnnnnnnnnnnnnnnnnnnnnnnnnnnnnnnnnnnnnnnnnnnnnnnnnnnnnnnnnnnnnnnnnnnnnnnnnnnnnnnnnnnnnnnnnnnnnnnnnnnnnnnnnnnnnnnnnnnnnnnnnnnnnnnnnnnnnnnnnnnnnnnnnnnnnnnnnnnnnnnnnnnnnnnnnnnnnnnnnnnnnnnnnnnnnnnnnnnnnnnnnnnnnnnnnnnnnnnnnnnnnnnnnnnnnnnnnnnnnnnnnnnnnnnnnnnnnnnnnnnnnnnnnnnnnnnnnnnnnnnnnnnnnnnnnnnnnnnnnnnnnnnnnnnnnnnnnnnnnnnnnnnnnnnnnnnnnnnnnnnnnnnnnnnnnnnnnnnnnnnnnnnnnnnnnnagggaacctcgaacaggccaatgaggagctgcgggccatcatcaagaagatctggaagcggaccagcatgaagctgctggaccaggtggtgcctcctgcagg

SEQ ID NO: 27561 - DNA, 575 bp, Macaca Mulatta
  misc_feature (1)...(575): n = A,T,C or G
agatgcagatattctatacagntcttagtctttactaggactgttaacttttatgataaaattcaaataagattttatttcttggtaatggtggctttcacaatttatctttaaatccttgagcaatctgtatgcaattaagagatttctgacatttattcttacactaagtggatcaactctaggatttaggcacgttaactttatttctgttgtgttttgaatctctccggagttgcatgtagatagcattgatttctgtgtacttaaacccatttagaaaataactacaaagtaaaaatggagaggaaatcgaaatgtattttttcatgaacattttgatacaaagttcatcatttaatgattcatcaatttcttgcattaatttgaattaagcatttaattcaaagagaggggagcattcattattgatatatgtgggcttttaaaaactccatcctttataaatagtcaaggtttgggccacacaaagtatatttttatcatggaaaaatttcagctcctcaagccatcatgttgaaccgaattggagtattttctttagaatttctgga

SEQ ID NO: 27562 - DNA, 655 bp, Macaca Mulatta
attgtcagggaatgttcttaaagatcagattagtggcatctgctgagagattgctgcacaacatggtttctgaaccagtagtttccctgcagttgagcagggagcagcagcagcacttgcatgaatacatatgcactcttaacactttttacctactggcttcctctagcttttgtggcagcttcaggtatattgagcactaacgaacatctcaagaaggtatagacctttgtttgtaagtcctgtgtatcctagcgtcctataatcctggactcctccagtactctctggctggattggtatctgaggctagtaggaagggcatattcctgctgggtagctctaaacaaggtatacatggataggaacagcagcctattctgccagccttatttctaaccattttagacatttgttagtacatggtattttaaaagtataacttaatgtcttcttttttctttctccactgtctttttcatagatcgagacatgtaagcagcatcatggaggtttgaagatgccgcatttggattggatgaattccaaattctgcttccttgctttttaatattgatatgcttatacagtttatgcaaaaaatgcagagttataataatgtgtacacaggcctgatcttctttataattctact

SEQ ID NO: 27563 - DNA, 532 bp, Macaca Mulatta
  misc_feature (1)...(532): n = A,T,C or G
agtttggaatctgtgagtgcaacatgtaaacagctgagtcaagaactaatggaaaaatacgaagaattaaagaggatggaagcacataacaatgaatacagagcagagattaagaannnnnnnnnnnnnnnnnnnnnnnnnnnnnnnnnnnnnnnnnnnnnnnnnnnnnnnnnnnnnnnnnnnnnnnnnnnnnnnnnnnnnnnnnnnnnnnnnnnnnnnnnnnnnnnnnnnnnnnnnnnnnnnnnnnnnnnnnnnnnnnnnnnnnnnnnnnnnnnnnnnnnnnnnnnnnnnnnnnnnnnnnnnnnnnnnnnnnnnnnnnnnnnnnnnnnnnnnnnnnnnnnnnnnnnnnnnnnnnnnnnnnnnnnnnnnnnnnnnnnnnnnnnnnnnnnnnnnnnnnnnagtgttccttgcctgtttctccccttggttcaatagctactagatttttggaagaggaggaactgaggtctcatcacattctagagcgcttggatgcccatattgaagaactaaaaagagagagtgaaaagac

SEQ ID NO: 27564 - DNA, 196 bp, Macaca Mulatta
ggtcttcgccttgatcgtgttctcctgcatctatggcgagggctacagcaacacccacaagtctaagcagatgtactgcgtattcaaccacaatgaggatgcctgccgctatggcagtgccatcggggtgctggccttcctggcctcggccttcttcttggtgatcgacgcatatttcccccagatcagcaacgcc

SEQ ID NO: 27565 - DNA, 234 bp, Macaca Mulatta
cacttagtcaaggattatcctctgaattaattcattctccaccctgacctttcttcacattacagaatgttctcctgggcggcttcgtgatctttgccaccttcgtgactttatgcaatgcatcgtgctctttcatacctaatgagagatttccaggagattctaccaggggtaaatcttggcttttcaatgtttattatgttattgcagcctggcagatggacctgtctgcag

SEQ ID NO: 27566 - DNA, 423 bp, Macaca Mulatta
caccaggggctcggccttgaggtcacagccgggggaggccgtgcttgtgctttggggctccatgtgatgtggttggtgaaagacgcctcctttgtccgaatccgcgctcagattcccagaatagctgccagaccgaccccggcatttagctggggtaaggagggtaggagagagcagggccggcaggatcctcccactgggtgtgttgcctctgacaggaaggtgccttccctcgatttcccatgctctgccactggcaccagcacccttgagtcaccctgagaatcattcacctttgattcagatgaggaaaccaaaccttagagatggtgaagagactaggaagccgtaaagaccatatagccatggggaccaataacatgagctggaacccagttgggtctcccacctccgtgtatccat

SEQ ID NO: 27567 - DNA, 267 bp, Macaca Mulatta
cagcccgattcaccgctgccgtctgtgtcacctgcactgtcaccagtccggagccccacaccgccagctgcggggtttcagccgctgctcaatggaagcttggttccggtgccgcccactactcctgcgccgggcgtgcagctggacgtggaggcgctcatccccacgcacgatgagcagggccggcccatccccgagtggaagcgccaggtgatggtgcgcaagctgcagctgaagatgcaggaggaggaggagcagaggcggaag

SEQ ID NO: 27568 - DNA, 106 bp, Macaca Mulatta
ggctaaggtggcccccactgaatactcctgctaagcaatccactgaagacccaccgaaccatcgacgggacgtccttggcgtgcagcccagggagctcagttcaca

SEQ ID NO: 27569 - DNA, 5240 bp, Macaca Mulatta
  misc_feature (1)...(5240): n = A,T,C or G
ctgtggagtcggccgaagctctcggcggcggctgagccagctgaggggaaaaatggctcggactgtggcggcttcggcggctcaggttgtagtagaggcggaggctcaggcagcttgagnnnnnnnnnnnnnnnnnnnnnnnnnnnnnnnnnnnnnnnnnnnnnnnnnnnnnnnnnnnnnnnnnnnnnnnnnnnnnnnnnnnnnnnnnnnnnnnnnnnnnnnnnnnnnnnnnnnnnnnnnnnnnnnnnnnnnnnnnnnnnnnnnnnnnnnnnnnnnnnnnnnnnnnnnnnnnnnnnnnnnnnnnnnnnnnnnnnnnnnnnnnnnnnnnnnnnnnnnnnnnnnnnnnnnnnnnnnnnnnnnnnnnnnnnnnnnnnnnnnnnnnnnnnnnnnnnnnnnnnnnnnnnnnnnnnnnnnnnnnnnnnnnnnnnnnnnnnnnnnnnnnnnnnnnnnnnnnnnnnnnnnnnnnnnnnnnnnnnnnnnnnnnnnnnnnnnnnnnnnnnnnnnnnnnnnnnnnnnnnnnnnnnnnnnnnnnnnnnnnnnnnnnnnnnnnnnnnnnnnnnnnnnnnnnnnnnnnnnnnnnnnnnnnnnnnnnnnnnnnnnnnnnnnnnnnnnnnnnnnnnnnnnnnnnnnnnnnnnnnnnnnnnnnnnnnnnnnnnnnnnnnnnnnnnnnnnnnnnnnnnnnnnnnnnnnnnnnnnnnnnnnnnnnnnnnnnnnnnnnnnnnnnnnnnnnnnnnnnnnnnnnnnnnnnnnnnnnnnnnnnnnnnnnnnnnnnnnnnnnnnnnnnnnnnnnnnnnnnnnnnnnnnnnnnnnnnnnnnnnnnnnnnnnnnnnnnnnnnnnnnnnnnnnnnnnnnnnnnnnnnnnnnnnnnnnnnnnnnnnnnnnnnnnnnnnnnnnnnnnnnnnnnnnnnnnnnnnnnnnnnnnnnnnnnnnnnnnnnnnnnnnnnnnnnnnnnnnnnnnnnnnnnnnnnnnnnnnnnnnnnnnnnnnnnnnnnnnnnnnnnnnnnnnnnnnnnnnnnnnnnnnnnnnnnnnnnnnnnnnnnnnnnnnnnnnnnnnnnnnnnnnnnnnnnnnnnnnnnnnnnnnnnnnnnnnnnnnnnnnnnnnnnnnnnnnnnnnnnnnnnnnnnnnnnnnnnnnnnnnnnnnnnnnnnnnnnnnnnnnnnnnnnnnnnnnnnnnnnnnnnnnnnnnnnnnnnnnnnnnnnnnnnnnnnnnnnnnnnnnnnnnnnnnnnnnnnnnnnnnnnnnnnnnnnnnnnnccaaatgggaccagtaatttgccaactggaagttctcttcttcaagaagttgaagtacagaatgaggctatggcagctttttgtcgatccattacaaannnnnnnnnnnnnnnnnnnnnnnnnnnnnnnnnnnnnnnnnnnnnnnnnnnnnnnnnnnnnnnnnnnnnnnnnnnnnnnnnnnnnnnnnnnnnnnnnnnnnnnnnnnnnnnnnnnnnnnnnnnnnnnnnnnnnnnnnnnnnnnnnnnnnnnnnnnnnnnnnnnnnnctgtagaaatcattataatgcaatccctttgctgggtacatgatgacttgaatcaagtagatgttggcagctatgttctgaaagtttgcggtcaagaggaagtgctgcagaannnnnnnnnnnnnnnnnnnnnnnnnnnnnnnnnnnnnnnnnnnnnnnnnnnnnnnnnnnnnnnnnnnnnnnnnnnnnnnnnnnnnnnnnnnnnnnnnnnnnnnnnnnnnnnnnnnnnnnnnnnnnnnnnnnnnnnnnnnnnnnnnnnnnnnnnnnnnnnnnnnnnnnnnnnnnnnnnnnnnnnnnnnnnnnnnnnnnnnnnnnnnnnnnnnnnnnnnnnnnnnnnnnnnnnnnnnnnnnnnnnnnnnnnnnnnnnnnnnnnnnnnnnnnnnnnnnnnnnnnnnnnnnnnnnnnnnnnnnnnnnnnnnnnnnnnnnnnnnnnnnnnnnnnnnnnnnnnnnnnnnnnnnnnnnnnnnnnnnnnnnnnnnnnnnnnnnnnnnnnnnnnnnnnnnnnnnnnnnnnnnnnnnnnnnnnnnnnnnnnnnnnnnnnnnnnnnnnnnnnnnnnnnnnnnnnnnnnnnnnnnnnnnnnnnnnnnnnnnnnnnnnnnnnnnnnnnnnnnnnnnnnnnnnnnnnnnnnnnnnnnnnnnnnnnnnnnnnnnnnnnnnnnnnnnnnnnnnnnnnnnnnnnnnnnnnnnnnnnnnnnnnnnnnnnnnnnnnnnnnnnnnnnnnnnnnnnnnnnnnnnnnnnnnnnnnnnnnnnnnnnnnnnnnnnnnnnnnnnnnnnnnnnnnnnnnnnnnnnnnnnnnnnnnnnnnnnnnnnnnnnnnnnnnnnnnnnnnnnnnnnnnnnnnnnnnnnnnnnnnnnnnnnnnnnnnnnnnnnnnnnnnnnnnnnnnnnnnnnnnnnnnnnnnnnnnnnnnnnnnnnnnnnnnnnnnnnnnnnnnnnnnnnnnnnnnnnnnnnnnnnnnnnnnnnnnnnnnnnnnnnnnnnnnnnnnnnnnnnnnnnnnnnnnnnnnnnnnnnnnnnnnnnnnnnnnnnnnnnnnnnnnnnnnnnnnnnnnnnnnnnnnnnnnnnnnnnnnnnnnnnnnnnnnnnnnnnnnnnnnnnnnnnnnnnnnnnnnnnnnnnnnnnnnnnnnnnnnnnnnnnnnnnnnnnnnnnnnnnnnnnnnnnnnnnnnnnnnnnnnnnnnnnnnnnnnnnnnnnnnnnnnnnnnnnnnnnnnnnnnnnnnnnnnnnnnnnnnnnnnnnnnnnnnnnnnnnnnnnnnnnnnnnnnnnnnnnnnnnnnnnnnnnnnnnnnnnnnnnnnnnnnnnnnnnnnnnnnnnnnnnnnnnnnnnnnnnnnnnnnnnnnnnnnnnnnnnnnnnnnnnnnnnnnnnnnnnnnnnnnnnnnnnnnnnnnnnnnnnnnnnnnnnnnnnnnnnnnnnnnnnnnnnnnnnnnnnnnnnnnnnnnnnnnnnnnnnnnnnnnnnnnnnnnnnnnnnnnnnnnnnnnnnnnnnnnnnnnnnnnnnnnnnnnnnnnnnnnnnnnnnnnnnnnnnnnnnnnnnnnnnnnnnnnnnnnnnnnnnnnnnnnnnnnnnnnnnnnnnnnnnnnnnnnnnnnnnnnnnnnnnnnnnnnnnnnnnnnnnnnnnnnnnnnnnnnnnnnnnnnnnnnnnnnnnnnnnnnnnnnnnnnnnnnnnnnnnnnnnnnnnnnnnnnnnnnnnnnnnnnnnnnnnnnnnnnnnnnnnnnnnnnnnnnnnnnnnnnnnnnnnnnnnnnnnnnnnnnnnnnnnnnnnnnnnnnnnnnnnnnnnnnnnnnnnnnnnnnnnnnnnnnnnnnnnnnnnnnnnnnnnnnnnnnnnnnnnnnnnnnnnnnnnnnnnnnnnnnnnnnnnnnnnnnnnnnnnnnnnnnnnnnnnnnnnnnnnnnnnnnnnnnnnnnnnnnnnnnnnnnnnnnnnnnnnnnnnnnnnnnnnnnnnnnnnnnnnnnnnnnnnnnnnnnnnnnnnnnnnnnnnnnnnnnnngtcgtgttccttcttcagttccaatgctgtccccctaaaagtcacaatggtgaatgctgaccctatgggagaagaaattaatgtcatgtttaaggtnnnnnnnnnnnnnnnnnnnnnnnnnnnnnnnnnnnnnnnnnnnnnnnnnnnnnnnnnnnnnnnnnnnnnnnnnnnnnnnnnnnnnnnnnnnnnnnnnnnnnnnnnnnnnnnnnnnnnnnnnnnnnnnnnnnnnnnnnnnnnnnnnnnnnnnnnnnnnnnnnnnnnnnnnnnnnnnnnnnnnnnnnnnnnnnnnnnnnnnnnnnnnnnnnnnnnnnnnnnnnnnnnnnnnnnnnnnnnnnnnnnnnnnnnnnnnnnnnnnnnnnaggcttcagagaactttatctattcctgtgctggatgcggtatagccacctatgttttaggcatctgtgatcgacacaatgacaatataatgcttcgaagcacgggacacatgtttcacattgactttggaaagtttttgggacatgcacagatgtttggcagcttcaaaaggnnnnnnnnnnnnnnnnnnnnnnnnnnnnnnnnnnnnnnnnnnnnnnnnnnnnnnnnnnnnnnnnnnnnnnnnnnnnnnnnnnnnnnnnnnnnnnnnnnnnnnnnnnnnnnnnnnnnnnnnnnnnnnnnnnnnnnnnnnnnnnnnnnnnnnnnnnnnnnnnnnnnnnnnnnnnnnnnnnnnnnnnnnnnnnnnnnnnnnnnnnnnnnnnnnnnnnnnnnnnnnnnnnnnnnnnnnnnnnnnnnnnnnnnnnnnnnnnnnnnnnnnnnnnnnnnnnnnnnnnnnnnnnnnnnnnnnnnnnnnnnnnnnnnnnnnnnnnnnnnnnnnnnnnnnnnnnnnnnnnnnnnnnnnnnnnnnnnnnnnnnnnnnnnnnnnnnnnnnnnnnnnnnnnnnnnnnnnnnnnnnnnnnnnnnnnnnnnnnnnnnnnnnnnnnnnnnnnnnnnnnnnnnnnnnnnnnnnnnnnnnnnnnnnnnnnnnnnnnnnnnnnnnnnnnnnnnnnnnnnnnnnnnnnnnnnnnnnnnnnnnnnnnnnnnnnnnnnnnnnnnnnnnnnnnnnnnnnnnnnnnnnnnnnnnnnnnnnnnnnnnnnnnnnnnnnnnnnnnnnnnnnnnnnnnnnnnnnnnnnnnnnnnnnnnnnnnnnnnnnnnnnnnnnnnnnnnnnnnnnnnnnnnnnnnnnnnnnnnnnnnnnnnnnnnnnnnnnnnnnnnnnnnnnnnnnnnnnnnnnnnnnnnnnnnnnnnnnnnnnnnnnnnnnnnnnnnnnnnnnnnnnnnnnnnnnnnnnnnnnnnnnnnnnnnnnnnnnnnnnnnnnnnnnnnnnnnnnnnnnnnnnnnnnnnnnnnnnnnnnnnnnnnnnnnnnnnnnnnnnnnnnnnnnnnnnnnnnnnnnnnnnnnnnnnnnnnnnnnnnnnnnnnnnnnnnnnnnnnnnnnnnnnnnnnnnnnnnnnnnnnnnnnnnnnnnnnnnnnnnnnnnnnnnnnnnnnnnnnnnnnnnnnnnnnnnnnnnnnnnnnnnnnnnnnnnnnnnnnnnnnnnngcttgtatacagtggatatagcaaagaaaccctaagacagcgagaacttcaactaagtgtactcagtgcagaatctctgcgggaaaattttttcttgggtggagtaaccctgcctttgaaagatttcaacttgagcaaagagacggttaaatggtatcagctgactgcagcaacatacttgta

SEQ ID NO: 27570 - DNA, 1818 bp, Macaca Mulatta
  misc_feature (1)...(1818): n = A,T,C or G
ggaagtggtggaatacatggtccagcatttcaagcctcagatctttggtgatcgcaagcctgtgtatgatggaaagaagaacatttacactgtcacagcactgcccattggcaacgaacgggtnnnnnnnnnnnnnnnnnnnnnnnnnnnnnnnnnnnnnnnnnnnnnnnnnnnnnnnnnnnnnnnnnnnnnnnnnnnnnnnnnnnnnnnnnnnnnnnnnnnnnnnnnnnnnnnnnnnnnnnnnnnnnnnnnnnnnnnnnnnnnnnnnnnnnnnnnnnnnnnnnnnnnnnnnnnnnnnnnnnnnnnnnnnnnnnnnnnnnnnnnnnnnnnnnnnnnnnnnnnnnnnnnnnnnnnnnnnnnnnnnnnnnnnnnnnnnnnnnnnnnnnnnnnnnnnnnnnnnnnnnnnnnnnnnnnnnnnnnnnnnnnnnnnnnnnnnnnnnnnnnnnnnnnnnnnnnnnnnnnnnnnnnnnnnnnnnnnnnnnnnnnnnnnnnnnnnnnnnnnnnnnnnnnnnnnnnnnnnnnnnnnnnnnnnnnnnnnnnnnnnnnnnnnnnnnnnnnnnnnnnnnnnnnnnnnnnnnnnnnnnnnnnnnnnnnnnnnnnnnnnnnnnnnnnnnnnnnnnnnnnnnnnnnnnnnnnnnnnnnnnnnnnnnnnnnnnnnnnnnnnnnnnnnnnnnnnnnnnnnnnnnnnnnnnnnnnnnnnnnnnnnnnnnnnnnnnnnnnnnnnnnnnnnnnnnnnnnnnnnnnnnnnnnnnnnnnnnnnnnnnnnnnnnnnnnnnnnnnnnnnnnnnnnnnnnnnnnnnnnnnnnnnnnnnnnnnnnnnnnnnnnnnnnnnnnnnnnnnnnnnnnnnnnnnnnnnnnnnnnnnnnnnnnnnnnnnnnnnnnnnnnnnnnnnnnnnnnnnnnnnnnnnnnnnnnnnnnnnnnnnnnnnnnnnnnnnnnnnnnnnnnnnnnnnnnnnnnnnnnnnnnnnnnnnnnnnnnnnnnnnnnnnnnnnnnnnnnnnnnnnnnnnnnnnnnnnnnnnnnnnnnnnnnnnnnnnnnnnnnnnnnnnnnnnnnnnnnnnnnnnnnnnnnnnnnnnnnnnnnnnnnnnnnnnnnnnnnnnnnnnnnnnnnnnnnnnnnnnnnnnnnnnnnnnnnnnnnnnnnnnnnnnnnnnnnnnnnnnnnnnnnnnnnnnnnnnnnnnnnnnnnnnnnnnnnnnnnnnnnnnnnnnnnnnnnnnnnnnnnnnnnnnnnnnnnnnnnnnnnnnnnnnnnnnnnnnnnnnnnnnnnnnnnnnnnnnnnnnnnnnnnnnnnnnnnnnnnnnnnnnnnnnnnnnnnnnnnnnnnnnnnnnnnnnnnnnnnnnnnnnnnnnnnnnnnnnnnnnnnnnnnnnnnnnnnnnnnnnnnnnnnnnnnnnnnnnnnnnnnnnnnnnnnnnnnnnnnnnnnnnnnnnnnnnnnnnnnnnnnnnnnnnnnnnnnnnnnnnnnnnnnnnnnnnnnnnnnnnnnnnnnnnnnnnnnnnnnnnnnnnnnnnnnnnnnnnnnnnnnnnnnnnnnnnnnnnnnnnnnnnnnnnnnnnnnnnnnnnnnnnnnnnnnnnnnnnnnnnnnnnnnnnnnnnnnnnnnnnnnnnnnnnnnnnnnnnnnnnnnnntggtaggcagtatggatgcccaccccagccgatactgtgctactgtgcgggtacagcgaccacgccaagagatcattgaagacttgtcctacatggtgcgtgagctcctcatccagttctacaagtccacccgcttcaagcctacccgcatcatcttctaccgagatggggtccctgaaggccagctaccccag

SEQ ID NO: 27571 - DNA, 563 bp, Macaca Mulatta
  misc_feature (1)...(563): n = A,T,C or G
agctaagggagaacattgagcaattcttcaccaaatttgtagatgaggggaaggccactgttcggttaaaggagcctcctgtggatatctgtctaagtaagnnaggccaattccagcagtttaaaaggtttcctttcagctgtgagactggctcatagaggctgtaaggttgatataccagtttcaacactcacaccagtgaagacttcagaatttgaaaactttaaaactaaaatggttatcacatccaaaaaagactatcctctaagtaagaactttccatattccttggaacatcttcagacttcttactgtgggcttgtccgagttgatatgcgtatgctttgcttaaaaaaccttaggaaattagacttgagtcacaaccatataaaaaagcttccagctacaattggagacctcatacaccttcaagaacttaacctgaatgacaatcacttggagtcatttagtgtagctttgtgtcagtctacactccagaagtcacttcggactttggacctcaacaagaacaaaatcaaggcactccctgtgcagttttgcca

SEQ ID NO: 27572 - DNA, 810 bp, Macaca Mulatta
  misc_feature (1)...(810): n = A,T,C or G
ggatgtttttgtttaacattctttccatgcatctgttattttattaattggcctgaatgatgagaccagaccagtgtttacagattttcattgtcagaaaaatctataagtctgccctttttacaatgatgnnnnnnnnnnnnnnnnnnnntaaatattagcctgcaagagcagtcctaaacaatcacaattaaactgtactacccaagaaaactgtttattgtgaagcatttaccttcaaaaaaatcattacatttctgtttcttggtggagtagcacattgtggagtgtgattcttaattcttcattaagtttatcaataggacattcatgctggataggttgtcttttgtttttatgtctcagaccattttgtgaggttgtttgcccatctcataatacagatttatgcagaaaggttgaaattatgtaaatggtttttatggaagttaatcagttacaatattttaagggggtagaatggcatctttgtttataggagaacatttgtaaataaagttgaatttctaagtcaatannnnnnannnnnnnnnnnnnnnnnnnnnnnnnnnnnncnnnnnnnnnnnnntcgnagaagcttttctagacccattcgtttgggcgcgcggggccccgntagggtaagtgaaacatgggtcaataggctgttttcccntaggagatccnntggtcaatgacctagtgccttgggaattcctccgccgaataaaaaaaaagnccccgggcggncaaaacggaaagcgtttnctggaaacaaaattcccggaatgggaaagttttctgaaggtt

SEQ ID NO: 27573 - DNA, 351 bp, Macaca Mulatta
tcttacagaaacgggattctactctgtatgtgtgggaatgattttaacttacagaatattgtcaaaccttagaaacccgggcttgagcactggaactaatgaagactctagcagcatcattcctcctctggcctgctgcagaacgttgaggcccttttgtctgccaccagtgccaggttcttgtgaatctgctatttaatttcatgaggaaggtatgaaaggagcaaatgagtaatatgcatattcagacaaggaggtcgaaagctttgtggaacacaactttcaagatggagatacattcacgaagctttattgcagctgtttcccttacccagttgaagtggccagtca

SEQ ID NO: 27574 - DNA, 138 bp, Macaca Mulatta
tgagagcggtgcggcaggtgttgtatccgctatggtgaagttctcttcgtagcagccgcggctagagagttggcctgctccccgcctttgtgacccggaggagcttttggggtgcgtcaagccctggcctgaggcagc

SEQ ID NO: 27575 - DNA, 580 bp, Macaca Mulatta
aattagagatagatacttgactggatttttgtataactgtttcctgcctccttccaaactgactgcaagagagaaatttagctgtttgatctactaaaaccaaatggattacaatggataattcatctttagggtatatttttactgttattcaaagtcgaatgattttcatttaattataataataactgacaaaaatcagtatgttgtagctaatatgttttatgcatgacaattattcttaaagtttgttcttcctgtttattacacagatcaggaatagatttgttcagttcagtatttattgaataccctctattggtcaggcattgtgttaagcataggtgaacagaaatgaacacgacttttttcctttgagtctaatacaatgaaggagataaacacttctgcaacttaattttaatagcagtagaagagaacataaggaatagaggttaattttacccagaaggcagaatagagaaaatattacaagagaaaatcacatatcacatgggctcaaaagatgtagaggttctcgacaaatgaagaacagccataacaggtagagggaacacca

SEQ ID NO: 27576 - DNA, 638 bp, Macaca Mulatta
tctctgaagggtgaaggcgggctgtcctgggatgtaccctgtactctcccgtggaggagaggggatggctgaggacactggcccttaccccagagccaggcagcatccatccctgctgtttgcatctgagagcagcacagggtctgggaggccggcctgagtgcccagctcagtctgctctgccccaggaaggccttgccctcggccttcccacctgctcagatcctgcaaggctggggtctgccccttctttctcgcctctggagctgtgctacttcagcccagacagccctgagagaggagcctcccacccacagcccaggaagccaggccccagggcccctctcctttggcctccggcagtgcagaccaaaggagaccttttaaggaaagaagctgtgtttcgctgaagacctggccacgtgggaccactgggacttcaacccagcccgttggtgggaaggtcctcttcggggacctttgacagccatatccctcccagcacaccaggtgccaggtgagctggttcagacccctccaaaggtactccggagacctcacacgtggagccaggcctggccagggtaggggcctgaaacccactcctccatctcacggggctcacggcctacagcagc

SEQ ID NO: 27577 - DNA, 261 bp, Macaca Mulatta
ttaggcctgtcattggggacttaggtcatggggcatccttctgtcctctgtccttcccagttgcccataattaccctctccatgggatgtcacagcatgaaacaggctaaagacaggatgggcaagggaggtgtgggactgtatttgtgagggtgggtgaagaattgtaacaattccagcatcgcagtggcttcattagtaggcattgacttattgctcacatagtggctggatgtgagtgtccggcagaatcctgtccca

SEQ ID NO: 27578 - DNA, 704 bp, Macaca Mulatta
  misc_feature (1)...(704): n = A,T,C or G
gggagaccagctgaagagcgaggagccagtggcagtcgctgatctcaccgccgctcagggtttttagaacttcagccataaaaatgggcagaattttccttgatcatatcggtggtacccgtctattttcttgtgcaaactgtgatacgatcctgaccaaccgctcagaactcatctccactcgtttcacaggcgccactggcagagcgtttctttttaacaaggtagttaacctgcagtacagtgaagttcaagatcgggtcatgctcactaggccgccacatgggttccgagattgtgagctgccaaaaaactgccaattagcaaaacttggggaatgggaatcttatgaagttttttgccccccctgaaaaaaaaccgggccccagcccggattttttaaagggggaaaggggccccgccccggtgaaattccccttggagaaaacccggtggcccccccctaagnnnnnnnnnnnnnnnnnnnnnnnnnnaagggggcccccttttttgagaggggaaaccccatttgtgtaacccccattccctggaaaataaaaccactccccttgggagaaggaatttccccgggagaaaagagaaaaaattccccccatcccttttttttcccccccaagggggtccctccccccctttcccccgtgtnnnnnnnnnnnnnnnnnnnnnnnnnnnnntcattcttc

SEQ ID NO: 27579 - DNA, 440 bp, Macaca Mulatta
agttctctctattatatatctgtgtgcactgtctggttaagagcagtgtccatgtgcgttctctttggcagcagtgcacgtggggtgggtggggggtgcgtacggtggggcttgtaggttaagatgtgtccgcggtggtgttgtggggctggaggccgagccaggcacggcagccggccctctccgggcgcatggaggaattctccctttgccgttccaaggatgccgccgcctcctgctggggctcccggggggccagccaacactacaaagggcagtgagtcctcagggcgccggggagcccccactccgctctcgggctctactcagactagcgccaacagtctccggggacagactcgcatcggccgccccggggctcggcctcctcccataggctcctcttcctctctttcattcatcaagtcttcaaactttga

SEQ ID NO: 27580 - DNA, 591 bp, Macaca Mulatta
  misc_feature (1)...(591): n = A,T,C or G
agacagatggagaagttagaagttttagaggaatggcagtctcacattgaaggctgggagnnnnnnnnnnnnnnnnnnnnnnnnnnnnnnnnnnnnnnnnnnnnnnnnnnnnnnnnnnnnnnnnnnnnnnnnnnnnnnnnnnnnnnnnnnnnnnnnnnnnnnnnnnnnnnnnnnnnnnnnnnnnnnnnnnnnnnnnnnnnnnnnnnnnnnnnnnnnnnnnnnnnnnnnnnnnnnnnnnnnnnnnnnnnnnnnnnnnnnnnnnnnnnnnnnnnnnnnnnnnnnnnnnnnnnnnnnnnnnnnnnnnnnnnnnnnnnnnnnnnnnnnnnnnnnnnnnnnnnnnnnnnnnnnnnnnnnnnnnnnnnnnnnnnnnnnnnnnnnnnnnnnnnnnnnnnnnnnnnnnnnnnnnnnnnnnnnnnnnnnnnnnnnnnnnnnnnnnnnnnnnnnnaggtttaaaattaggaatggagcaagatacctgggtaatgatctctgaacagggtgagaaactttataaaatgatgtgcagacaaggaaatctgatcaaagacagaaaaagaaaactgactacgttccctaaatgctttcttggaa

SEQ ID NO: 27581 - DNA, 167 bp, Macaca Mulatta
  misc_feature (1)...(167): n = A,T,C or G
attgcaaagcatntgagctgtggttgaggaagtggtgtaaaagtgcatcccttaggaatgatgcactttcattaggatggactcgtgtctgattagaatgtcagttgatcagctagatttgtgtccacactaccagtttcacaccccctttccatctgtttgataca

SEQ ID NO: 27582 - DNA, 114 bp, Macaca Mulatta
  misc_feature (1)...(114): n = A,T,C or G
gattatgctataaatcaacctgatgtcttatctcagattcanccagaaggggaacataatacagaggaccaggcagggccagaggaaagtgagattcccgcagaccccagtgaa

SEQ ID NO: 27583 - DNA, 720 bp, Macaca Mulatta
  misc_feature (1)...(720): n = A,T,C or G
ggggctttattgacatgtaggttgcttggtaataacctttttgtatatcacaatttgggtgaaaaacttaagtaccctttcaaactatttatatgaggaagtcactttattactctaagatatccctaannnnnnnnnnnnnnnnnnnngtgtgactaaggctttatttatgtttgtaaaactgttaaggtcctttctaaattcctccattgtgagataaggacagtgtcaaagtgataaagctgaacacttgacctaaacttctattttcttaaggaagagtatcaaatatatactgactcctagaaatctatttattaaaaaaagacacaaaaacttgctgtacataggctagctatttctaaatattttaaattannnnnnnnnnnnnnnnnnagcatcataaagtagatttaattagaaaactagattgctagtttgttgtcagatatgtgaatctcttctccctttgaagaaattgtaaatttaagctattgttacggtatgaagtcttctgtatagtttgtttttaactaatatttgtttcagtattttgtctgaaaaagaaacaccactaattgtgtacatatgtattatataaactttaaccttttaatactgttttatttttaactccatnnnnnnnnnnnnnnnnnnngttnnnnnnnnnnnnnnnnnnnnnnnnnnnnnnnnnnnnnnnnnnnnnnnnnnnnnnnnnnn

SEQ ID NO: 27584 - DNA, 609 bp, Macaca Mulatta
  misc_feature (1)...(609): n = A,T,C or G
agcttgaaagatctagccacatgagcaggacagaagtgcacaagcaccatatcttgatttctgtggaccaggtggggcccctgccagccttgctagacagacccaggtgaacagtccttctagggggtctcattaccagggaagcatgtggtacgagaagagcagtcatcaggaaggccatttggaaaagcacatcctctctgttcacgtgagatattttacatcctcattcctcatcgcaagcttcctgggacttggaatgtcagagacaagagtgttgggggaggccagtgtgtatggatttgtttatattaaaatgagaatatgaatatttnnnnnnnnnnnnnnnnnnnnnnnnnttgtttatattaaaatgagaatatgaatatttnnnnnnnnnnnnnnnnnnnnnnnnnttgtttatattaaaatgagaatatgaatatttctgtgtacttcagataaacactcttttccttanataagcctcgtcatccatgttgaaagttggtaatcaaggataggaagtgtttccaagggttgtcagtgattaaatcaagcttaccttaacatacatgtatgagagaagttagataaatgatagataga

SEQ ID NO: 27585 - DNA, 1373 bp, Macaca Mulatta
  misc_feature (1)...(1373): n = A,T,C or G
gtgacatacagcgtttccagcgggactttgtgtcccgcctgtggctcacataccgccgggacttcccaccccttcctgggggctgcctgacctcggactgtggctgggggtgcatgttacgcagtggccagatgatgctggcacagggcctgctgctacatttcctgcccagagnagactggacatgggccgagggcacgggcctgggcccccctgagctgtcagggtcagcctctcccagccggtaccatgggcctgcccgctggatgcccccacgctgggcccagggtgcccctgagctggagcaggaacgccggcaccggcagattgtgtcctggttcgccgaccacccccgggccccctttggcctacaccggctggtggagcttgggcagagctcaggcaagaaggcaggtgactggtatgggccatcgctggtggcacacatcctcaggnnnnnnnnnnnnnnnnnnnnnnnnnnnnnnnnnnnnnnnnnnnnnnnnnnnnnnnnnnnnnnnnnnnnnnnnnnnnnnnnnnnnnnnnnnnnnnnnnnnnnnnnnnnnnnnnnnnnnnnnnnnnnnnnnnnnnnnnnnnnnnnnnnnnnnnnnnnnnnnnnnnnnnnnnnnnnnnnnnnnnnnnnnnnnnnnnnnnnnnnnnnnnnnnnnnnnnnnnnnnnnnnnnnnnnnnnnnnnnnnnnnnnnnnnnnnnnnnnnnnnnnnnnnnnnnnnnnnnnnnnnnnnnnnnnnnnnnnnnnnnnnnnnnnnnnnnnnnnnnnnnnnnnnnnnnnnnnnnnnnnnnnnnnnnnnnnnnnnnnnnnnnnnnnnnnnnnnnnnnnnnnnnnnnnnnnnnnnnnnnnnnnnnnnnnnnnnnnnnnnnnnnnnnnnnnnnnnnnnnnnnnnnnnnnnnnnnnnnnnnnnnnnnnnnnnggtcctcggctcctcctcagccacggagcggtaccccatgttcaccctggccgagggccatgctcaggaccacagcctggacgacctctgctcccagctctcccagcctacactccggctccctcgcacagggcggctcctcagggccaaacgccccagctctgaggactttgtgtttttataaagggaggggatgagggaaaagatgcaacactatttatttttttatttatgtcatgtcgagtgtgggatcttgagctctggcagtgagaacttcctgttctcagcccctcaagcccagctgcaaccagtctggggccattcagccagggacagagcccatgcacctgtctcccaccagcggggccctcctggcagggtagggagggaggaccccgggcacccccctcagggcctgactcacgtactgtaggttgcactggacgc

SEQ ID NO: 27586 - DNA, 905 bp, Macaca Mulatta
ttctgcctcagcagctcacaagggcaccttcaaggagcagaacgacaagccttactgtcagaactgcttcctcaagctcttctgctaggcgccctgcccgtctctgccccccttccccagccagcatcgccaactgctactgtgacccagagacttcacccgggggtgaaggggtaaacccactgaaactggaaccctcgttctcggctggtgcaggagggacagggctgtgaggggtccccctgcttgtcttcaccccgccggagcctctgggccccctcctccctcctgcagctctccccaggctgcccactccatcctttccaggggtagaggctgggggccccaccccagcccacgtacgtccccatgaactggcctggccagcaccccacactggagccatctcttcctcatatttccacagtgcagccggagggcagggaagggcaggcagggtctgttggggtctctttttacccttatttcccccctgacctaattgccttcgttctgtgattactgggggacacccggctccctccagacaatgccagcataaatccatccatccaaaggcagagaacccaaggggccatggaaggttctctgtgctcctcctgcccttccagtgccctaggcctggtaactgcccctgcctttacccgccctccccttttatacctgctctggttctactgagaaaagcctctccagcaataatgttttctagtcacttcctccgtctccgggacggcgtgcctggacactgtactgactttgatagatttctacactgaggtttgaattcatatcgcctgagttgcttttacttctctatacaaaatgattttgaagagattttaaagacgttcccttttgtattctcttctttgtccaccgcc

SEQ ID NO: 27587 - DNA, 1246 bp, Macaca Mulatta
  misc_feature (1)...(1246): n = A,T,C or G
cagccctgcagcctctgaaacactctgacagcaaagaannnnnnnnnnnnnnnnnnnnnnnnnnnnnnnnnnnnnnnnnnnnnnnnnnnnnnnnnnnnnnnnnnnnnnnnnnnnnnnnnnnnnnnnnnnnnnnnnnnnnnnnnnnnnnnnnnnnnnnnnnnnnnnnnnnnnnnnnnnnnnnnnnnnnnnnnnnnnnnnnnnnnnnnnnnnnnnnnnnnnnnnnnnnnnnnnnnnnnnnnnnnnnnnnnnnnnnnnnnnnnnnnnnnnnnnnnnnnnnnnnnnnnnnnnnnnnnnnnnnnnnnnnnnnnnnnnnnnnnnnnnnnnnnnnnnnnnnnnnnnnnnnnnnnnnnnnnnnnnnnnnnnnnnnnnnnnnnnnnnnnnnnnnnnnnnnnnnnnnnnnnnggaccatctggctgccttttttctccaaaagatgcaatattcagactgactgaccccctgccttatttcaccaaagacacgatgcatagtcacccctggccttgtttctccaatggccaatggccctgatacactagtgatcatgttcagcccggcttccacctgcatagaatcttgtcttctcagacagggacaatgcggcctcagcatctcctggagtctagaagctgtttcctctcccctccttcctccnnnnnnnnnnnnnnnatactggccttttccctctctgccccaagtgaagacagtgggcactctgcgcccaccacttgcacagctgtgcagagacctgcagatgcacgtgctggaacacgtgtggttccccccggcccagcctcctctgcagtgcccctctcccctgcccatcctccccacggaagcatgtgctggtcacactggttctccggggatctgtgatggggcccctgggggtcagcttctgtccttctgccttcccacctctttgttcctttcctttcatgtatccattcagttaatgtttattgagcaactacagatgtcagcactgcgttaggtgctgggggccctgcttgggaagatcaagttcctccctcaaggactccccatccagctgggagacagacaactaactacactgcacgctgcggtttgcagggggcccctgcctcgctccctgctccacacctcctctgtgctcaaggcttcctggatacctcacccccaccccacccctaattcttacccagagcatggggttggggcagaaacctggagagagggatatagcccctcaccacagctagag

SEQ ID NO: 27588 - DNA, 138 bp, Macaca Mulatta
tggtgacccatgagcaccccaggtagctgcagccagacctttggggctccttgcaccctgccctgtgagctgtgtctgtccagagccaactccagggcaggggcatgagtggaatgccccctcgcatttccaattagg

SEQ ID NO: 27589 - DNA, 319 bp, Macaca Mulatta
tcttctatatgtcttatatatgtgctctgtttactctcttaatttttaaagagtttgtagtgttttatcttatctacaaatgggggagtgaagaggtcgagaaatccaagaagaagaatccagctgcctatgaaaatgacaaatgagcaatgcatctggatgacggttccctgtctctgaaagacctttttctggaagaggagtctgcattgtagtgtctcaaagacacaataaacttcctatggtctgccctgttgtgattttacatttttgtgagtagaatcctgtgtgaccactaaatattcaaggtaatgaagcg

SEQ ID NO: 27590 - DNA, 339 bp, Macaca Mulatta
ctattttccttaatatttcacttctatttaaaacaagctgggacataaaaattctgttggagacacttggggaagatgtgagcaactaatgctggattcagcttatacatgatgaaaaataaaccagacaaaaggagcacataaatatgcatacagtgtaactgttattttaatacccacaataagggatttttgttagcatgtttgggggaatgaggattggtgggattcttggggccacaggaatctgaggcaatggaagatacatagagtgatcttccccctgccgagaggaaactggcacctgtcaagcagatgctgtcagttcaaacttcagct

SEQ ID NO: 27591 - DNA, 907 bp, Macaca Mulatta
  misc_feature (1)...(907): n = A,T,C or G
ggggaatgacctcatccttttttttttctcatctgccatttgtgtgtcgtagatgggttttagttgcatgaatgtggctaatgtggttctcagaaattggtcagtatggcctgacatagcttctgctctgtcttactgactcagtacctttaggatttgtgtcagagtttggatactagtgttagtggtaatgtcaccactatttagttgggagataatgaaaccaatcatggatgctgtttttattgggcatgtcatctaagaaaggagaaatagctgagtcttgggtctaagaaaaaggactgattcagaaaactagtttatgataggtcgactagagtttcacatcaaaccgtaccattgtgatttttaatgtcatctagacctatctaaaattcagagcatatcatctggccttcctcagggtcaccacccatgcattgggcttagtcaagattgacagatacattctcagctggcctgacatacaaaacatcttgtcattgagcttaagttctgcttgttctgaggtttcacttccatgtgtttcattggtacaaaaatggatctcttagttggtcacttaattctttctttttcaganagatagtccgttccctggaaaatttggtcatcctaaaaatcttccttcccttgttttttttgggaacccggaaagggttaccctttctttttcttttggggcccggaaaagggaataaaaaacccttttgtttaaatactttttaaggggaatctgtggaccaaaaacccctgttttcctcacaaaaaattgccgaaccccccaacacccccnnnnnnnnnnnnnnnnnnnnnnnnnnnaaggtggtggaacnnnnnnnnnnnnnnnnnnnnnnnaaacaagattgtgttaagaggtgtccca

SEQ ID NO: 27592 - DNA, 1568 bp, Macaca Mulatta
  misc_feature (1)...(1568): n = A,T,C or G
cggtttaagcggaagcatcttactgccatcgactgccagcatttggctcggagtcacttggctgtgacccagcccttcggtcagagatggacaaacagagatccgaaccatggtctctatcctaaacccagaacaaaaagagggagtaggggtnggtcagggacgtcaaagatgtatccctgagttcttcctagcaggcaagcggccgtgcaccaatgacatggccaaaagcaattctgttggccaggacagctgtcaggactctgagggtgacatgatctttcctgcagagagcagctgtgcactgcctcaggaaggcagtggagaagcatggctgggctcatcagggtctgccccgccctccaggaagcggtctcggtcctctgaggaagagagtaaccaggctaccggaaccagccggtgggatggagtttctaagaaagctccgcggcaccatttgattgtgccatgcacaaggcctagggaggccaggcaagaagcagaggacagtacgtctcgactctctgaggagtctggagaaaccgaccaagatgctggggacatgggtcttgatcccattcctgactcatactatgggcttcttgggaccttgccctgccaggaagcaccaagccacattgtagcctgcctagtgaggtcctgaggcacgtnnnnnnnnnnnnnnnnnnnnnnnnnnnnnnnnnnnnnnnnnnnnnnnnnnnnnnnnnnnnnnnnnnnnnnnnnnnnnnnnnnnnnnnnnnnnnnnnnnnnnnnnnnnnnnnnnnnnnnnnnnnnnnnnnnnnnnnnnnnnnnnnnnnnnnnnnnnnnnnnnnnnnnnnnnnnnnnnnnnnnnnnnnnnnnnnnnnnnnnnnnnnnnnnnnnnnnnnnnnnnnnnnnnnnnnnnnnnnnnnnnnnnnnnnnnnnnnnnnnnnnnnnnnnnnnnnnnnnnnnnnnnnnnnnnnnnnnnnnnnnnnnnnnnnnnnnnnnnnnnnnnnnnnnnnnnnnnnnnnnnnnnnnnnnnnnnnnnnnnnnnnnnnnnnnnnnnnnnnnnnnnnnnnnnnnnnnnnnnnnnnnnnnnnnnnnnnnnnnnnnnnnnnnnnnnnnnnnnnnnnnnnnnnnnnnnnnnnnnnnnnnnnnnnnnnnnnnnnnnnnnnnnnnnnnnnnnnnnnnnnnnnnnnnnnnnnnnnnnnnnnnnnnnnnnnnnnnnnnnnnnnnnnnnnnnnnnnnnnnnnnnnnnnnnnnnnnnnnnnnnnnnnnnnnnnnnnnnnnnnnnnnnnnnnnnnnnnnnnnnnnnnnnnnnnnnnnnnnnnnnnnnnnnnnnnnnnnnnnnnnnnnnnnnnnnnnnnnnnnnnnnnnnnnnnnnnnnnnnnnnnnnnnnnnnnnnnnnnnnnnnnnnnnnnactgggaagacctcaaccctggtcaagtacgcagagaagtggtctcagagcaggtttctgtatgtgacgttcaacaagagcatcgcaaagcaggccgaacgcgtcttccccagcaacgtcatctgcaaaaccttccattccatggcctacgggcacatagggcggaag

SEQ ID NO: 27593 - DNA, 1624 bp, Macaca Mulatta
  misc_feature (1)...(1624): n = A,T,C or G
gggggattccagcggcggacagcacccgggccgagatgtctcgctcagtggccttagccgtgctggcgctactctctctttctggcctggaggctatccagcgtactccaaagattcaggtttactcacgccatccaccagagaatggaaagccaaatttcctgaattgctatgtgtctggatttcatccatctgatattgaagttgacttactgaagaatggagagaaaatgggaaaagtggagcattcagacttgtctttcagcaaagactggtctttctatctcttgtactacactgaattcacccccaatgaaaaagatgagtatgcctgccgtgtgaaccatgtgactttgtcagggcccaggacagttaagtgggatcgagacatgtaagcagcatcatggaggtttgaagatgccgcatttggattggatgaattccaaattctgcttccttgctttttaatattgatatgcttatacagtttatgcaaaaaatgcagagttataataatgttaacacaggcatgatcttctttataattctactttgagtgctatctccacgtttgaggtatctgggcagctagctttaggagggctggcaacttagaggtggggagcagagaattctcatatccaacatcaacatcttggtcagatctgagctcttcaatctcttgcactcgaagcttgataagatagttatgcgtatataagttaactttccaatttacatactgtggcttagaatttgggaggaaaaatttagaaatataatttgatgggggttaattgggaaattttgttatacatgagtaaaaacattttttgttcataataacgaattcatgattcttacctttctctattaccaatttggaataaaagtttcgtgggggtattaaatccgaggggttccaatattatttggttatccctcgcggaaatgtttaaaatttacaaccaatccagtggaacaaaacctgatcctctctatcttacaactatatccacttactcctctaacatctaagcttaagttantctacactcnataaccccttttctgtttatagtagggagccgatggagcaccactatactgggggaaacccccctcccttcccggcacgtagaaaaaaagtgtcgcgtcttgtttcacgctcaatagaaaaaccaccacattgtctttccacgaattaatttgtaaggtaangaacatcgtacaatagaatccacccccctccacatgtatatagtggtgtactacaagggtttgtgtataaaaccgatgggggtgaatgtactcactaatggcgctctctgggctatatcataccctcctgtagatgtcgaagaaaaattgccccctgcggaagtcgccctcatggatagaaatctacgcagacgaagatcataatgaggaaaaaacttgtccatatacctatataccaatgtataacgataacaaaaataaaacacccacacgataaggcgccgtgtgtatgaaccccattgggagatgtgttgtacacgtcagactatctgacacagaccacatacacactggacgagaagtgttctcatagaccaaagggtgcctcattctgtcctctggg

SEQ ID NO: 27594 - DNA, 490 bp, Macaca Mulatta
  misc_feature (1)...(490): n = A,T,C or G
ggtttgccttgtggagccaagtgcttgggggaggagctcctggcaggactcctgctgttatttgtcagaggacagctaggattggttcacccatgctctgagttggccccaaagcgagctatgctgaactcttctccatctccaagaagacaacctttgtctttacatgcaagagggatccagttatgacaggctgacccagttggtaaagtgtttggggtttatctactgagtaaggctgaccttacctgagtttctgtatgtgtatttgcaagacagttaatactaatccagcatccttcacagagatgtannnnngagatgtagtaacttatagaagtgtcatttggaaaagtcgaatttgccctacaaggcgtgttctccattcaagggtcttgtgtaaacgtttgcagacacaggtgtggcgttggagaactcacctctggctcctctgcttttgtgttgggacagctgcctgaattaggagctc

SEQ ID NO: 27595 - DNA, 1135 bp, Macaca Mulatta
  misc_feature (1)...(1135): n = A,T,C or G
ttcaagaagcctacagggaaatgctcacagctgacaatcttgatattgacaacatgagacacaaaattcgagattattccttgtcaggggcctaccgaaagatcattattcgtcctcagaatgttagctgnnnnnnnnnnnnnnnnnnnnnnnnnnnnnnnnnnnnnnnnnnnnnnnnnnnnnnnnnnnnnnnnnnnnnnnnnnnnnnnnnnnnnnnnnnnnnnnnnnnnnnnnnnnnnnnnnnnnnnnnnnnnnnnnnnnnnnnnntacttacgccaccatggccattcgagaagtgctaaaaatggataccagtatcaagaaccagacgcagctgaatacaacctggcttcgctgagcagtaccttgtccacagattagaaaatgcacacaagtgtttgcttcccggttccctgtgcatttttgtcttagttcagactcatatatggatttcaaatctttgtaataaaaaattatttgtatttttttaagtttttattagcttaaataaataatttgcaatatttgtacatgtacacaaatcctgaggttctcaattttagctcagaatataaattggtcaaaatatacttcaggtgcttaaatcatagtacagtgtcaactttacaataaaaaaaggactttggtttaaagtagcaggtttaggttttgctacactctcaatagacagcaggagtatttgacacatctgtgatggagtatacaacaattcattttcagagcaaatgcaacaaaacaaatctggactatggataaataatttgagagccaccacccacaaatataaatacagtactcatgctgatttaaatgatttattatctacaaatttataaacaaaaagtgattgtcattatcctgcttatgtactagattcaggcaagcattatagactttttagttgcagtggcttttgcatttatattatcagtgccttgcaggaacattgcattgannnnnnnnnnnnnnnnnnnnnnnnnnnnnnngagacaggatctcactctgtagcgcaggctgaattgcagtgcaatgctgcaatcctcattcatggactgcagccttgacctcccaggctcaagtgactctcacaggtcagcctcctgagtagctggga

SEQ ID NO: 27596 - DNA, 647 bp, Macaca Mulatta
  misc_feature (1)...(647): n = A,T,C or G
cctgacggcgctggagctgaggggcagtgtgggatgccccaggaaggttcctaggaagaggggacccagggtgactccctaaggaaacgccggtcccagnnnnnnnnnnnnnnnnnnnnnnnnnnnnnnnnnnnnnnnnnnnnnnnnnnnnnnnnnnnnnnnnnnnnnnnnnnnnnnnnnnnnnnnnnnnnnnnnnnnnnnnnnnnnnnnnnnnnnnnnnnnnnnnnnnnnnnnnnnnnnnnnnnnnnnnnnnnnnnnnnnnnnnnnnnnnnnnnnnnnnnnnnnnnnnnnnnnnnnnnnnnnnnnnnnnnnnnnnnnnnnnnnnnnnnnnnnnnnnnnnnnnnnnnnnnnnnnnnnnnnnnnnnnnnnnnnnncgccctgggcatgctggagtttgaccttctctatgaccgggcctcctgcactctgcattgtagcatcctcagggccaaggnagggcctcaagcccatggatttcaatggcctcgccgacccctacgtcaagctgcacctgctgcctggagcctgtaaggnaggctaataagctaaaaacgaagactcagaggaacacactgaatcccgtgtggaatgaggacctgacgtacagtgngatcacggatgatgacatcacgcacaaggtgctcagg

SEQ ID NO: 27597 - DNA, 433 bp, Macaca Mulatta
ttattagtatctggaatctagcaatctcatggagagtcctttgtaggacatggaatgctatgccagcaggcacaggaaggaaaatttaggcttaggtactagggagccatggcaggtgtttgagcagtgggtgagcagcacgactttgaagctgcatagggctggcagccagtccagtacccacccacaggggacatctctgccaaggtccttcctcgccagctccaaatccctggcagtcctcccagtgctgctggacaaagccagagcacaactcccacaggcttcaccccctgacatctccagccttgtctgcttcctgggtgccagccgggctggtgaacaccaagcagtcaacaagctgggggacttgaagcagctcacacagcctcaatccacagatacaaagaccaggaggcccagaggcccggca

SEQ ID NO: 27598 - DNA, 412 bp, Macaca Mulatta
  misc_feature (1)...(412): n = A,T,C or G
tgggcgtactaagagtcggactgtgccctggcctcacccaggagattanccaacttctcaggagccgtaggatcaagacagncagtggtggacctggtttctgcagacctggaggaggtagctcagaaatgcggcttgtcttnnnnnnnnnnnnnnnnnnnnnnnnnnnnnnnnnnnnnnnnnnnnnnnnnnnnnnnnnnnnnnnnnnnnnnnnnnnnnnnnnnnnnnnnnnnnnnnnnnnggtgactggttcttcagggactatgaaggtggtggtggtggactcggtcactgcggtggtctccccacttctgggaggtcagcagagggaaggnaggcttggccttgatgatgcagctggcccgagagctgaagaccctggcccgggaccttggcatggcagtggtggtga

SEQ ID NO: 27599 - DNA, 1275 bp, Macaca Mulatta
  misc_feature (1)...(1275): n = A,T,C or G
acgccagcccccagcaggacagcatctttttctgagtccagggccgatgaggtggcgcctgcgaagaaggccaagcctgccatgccacaaggnnnnnnnnnnnnnnnnnnnnnnnnnnnnnnnnnnnnnnnnnnnnnnnnnnnnnnnnnnnnnnnnnnnnnnnnnnnnnnnnnnnnnnnnnnnnnnnnnnnnnnnnnnnnnnnnnnnnnnnnnnnnnnnnnnnnnnnnnnnnnnnnnnnnnnnnnnnnnnnnnnnnnnnnnnnnnnnnnnnnnnnnnnnnnnnnnnnnnnnnnnnnnnnnnnnnnnnnnnnnnnnnnnnnnnnnnnnnnnnnnnnnnnnnnnnnnnnnnnnnnnnnnnnnnnnnnnnnnnnnnnnnnnnnnnnnnnnnnnnnnnnnnnnnnnnnnnnnnnnnnnnnnnnnnnnnnnnnnnnnnnnnnnnnnnnnnnnnnnnnnnnnnnnnnnnnnnnnnnnnnnnnnnnnnnnnnnnnnnnnnnnnnnnnnnnnnnnnnnnnnnnnnnnnnnnnnnnnnnnnnnnnnnnnnnnnnnnnnnnnnnnnnnnnnnnnnnnnnnnnnnnnnnnnnnnnnnnnnnnnnnnnnnnnnnnnnnnnnnnnnnnnnnnnnnnnnnnnnnnnnnnnnnnnnnnnnnnnnnnnnnnnnnnnnnnnnnnnnnnnnnnnnnnnnnnnnnnnnnnnnnnnnnnnnnnnnnnnnnnnnnnnnnnnnnnnnnnnnnnnnnnnnnnnnnnnnnnnnnnnnnnnnnnnnnnnnnnnnnnnnnnnnnnnnnnnnnnnnnnnnnnnnnnnnnnnnnnnnnnnnnnnnnnnnnnnnnnnnnnnnnnnnnnnnnnnnnnnnnnnnnnnnnnnnnnnnnnnnnnnnnnnnnnnnnnnnnnnnnnnnnnnnnnnnnnnnnnnnnnnnnnnnnnnnnnnnnnnnnnnnnnnnnnnnnnnnnnnnnnnnnnnnnnnnnnnnnnnnnnnnnnnnnnnnnnnnnnnnnnnnnnnnnnnnnnnnnnnnnnnnnnnnnnnnnnnnnnnnnnnnnnnnnnnnnnnnnnnnnnnnnnnnnnnnnnnnnnnnnnnnnnnnnnnnnnnnnnnnnnnnnnnnnnnnnnnnnnnnnnnnnnnnnggagcttggtttgatccgcaaacctgcctcattcatgaccagcatctgtgatgagcgaggacaggagctcatctacgcgggcatgcccatcacggaggtcttcaaggaagagatgggcattggcggggtcctcggcctcctctggttccagaaaagg

SEQ ID NO: 27600 - DNA, 446 bp, Macaca Mulatta
tcagtcaaatcatgatttaactgagtaagtatagatattaaataggaaagtacctgaatgttgtgggaataatatacatcatatctaagtttgtgggttcctatgttttctagtgaacaggagctacaactaccaagacattgtcttttgtgccagaactagatagagtatagattaattaaggtgattatggaccaatagtcttttcttttcagattatcttcctttccagtcatgcattttctaaggtgtaaacctgactatctctatgcattctaatctaatgcatctgattttcttacttctttcctgtacttttgaccatagactgataaactccctgaaatcttcaatttggctcctccttttcctaacagctcaattctgccattgctgattgtgaactacacatcacaactctgtctacactggtttaataacaagac

SEQ ID NO: 27601 - DNA, 1599 bp, Macaca Mulatta
  misc_feature (1)...(1599): n = A,T,C or G
agcaaataccttttgtttctctcacgttggggctacttgttttagggcgcaaaggaacggcactcaaaagggggtccttccccagccgagaaccaagaatcgttcacaggcccgcgcgctcgaccggacggtgnnnnnnnnnnnnnnnnnnnnnnnnnnnnnnnnnnnnnnnnnnnnnnnnnnnnnnnnnnnnnnnnnnnnnnnnnnnnnnnnnnnnnnnnnnnnnnnnnnnnnnnnnnnnnnnnnnnnnnnnnnnnnnnnnnnnnnnnnnnnnnnnnnnnnnnnnnnnnnnnnnnnnnnnnnnnnnnnnnnnnnnnnnnnnnnnnnnnnnnnnnnnnnnnnnnnnnnnnnnnnnnnnnnnnnnnnnnnnnnnnnnnnnnnnnnnnnnnnnnnnnnnnnnnnnnnnnnnnnnnnnnnnnnnnnnnnnnnnnnnnnnnnnnnnnnnnnnnnnnnnnnnnnnnnnnnnnnnnnnnnnnnnnnnnnnnnnnnnnnnnnnnnnnnnnnnnnnnnnnnnnnnnnnnnnnnnnnnnnnnnnnnnnnnnnnnnnnnnnnnnnnnnnnnnnnnnnnnnnnnnnnnnnnnnnnnnnnnnnnnnnnnnnnnnnnnnnnnnnnnnnnnnnnnnnnnnnnnnnnnnnnnnnnnnnnnnnnnnnnnnnnnnnnnnnnnnnnnnnnnnnnnnnnnnnnnnnnnnnnnnnnnnnnnnnnnnnnnnnnnnnnnnnnnnnnnnnnnnnnnnnnnnnnnnnnnnnnnnnnnnnnnnnnnnnnnnnnnnnnnnnnnnnnnnnnnnnnnnnnnnnnnnnnnnnnnnnnnnnnnnnnnnnnnnnnnnnnnnnnnnnnnnnnnnnnnnnnnnnnnnnnnnnnnnnnnnnnnnnnnnnnnnnnnnnnnnnnnnnnnnnnnnnnnnnnnnnnnnnnnnnnnnnnnnnnnnnnnnnnnnnnnnnnnnnnnnnnnnnnnnnnnnnnnnnnnnnnnnnnnnnnnnnnnnnnnnnnnnnnnnnnnnnnnnnnnnnnnnnnnnnnnnnnnnnnnnnnnnnnnnnnnnnnnnnnnnnnnnnnnnnnnnnnnnnnnnnnnnnnnnnnnnnnnnnnnnnnnnnnnnnnnnnnnnnnnnnnnnnnnnnnnnnnnnnnnnnnnnnnnnnnnnnnnnnnnnnnnnnnnnnnnnnnnnnnnnnnnnnnnnnnnnnnnnnnnnnnnnnnnnnnnnnnnnnnnnnnnnnnnnnnnnnnnnnattcaccaggcatgtaaactcatctgcagaaaatgtaaacgtcatgtgacagatctaacagggcaagtggtacaggagggaaccaggcgctacagactgtgtaatgagtgtcttgcagaatttggcatagacagcctccccattgacttggaagctgaacaacatcttatgtccccatcagatggagataaggattccagatggcacttgagtgaagatgagaatagatcctatgtggagattgtagaagatgggtctgctgatctggtcatccaacaggttgatgatagtnnnnnnnnnnnnnnnnnnnnnattaagcccaacattaggtagctgtaatgtgaaccaacagagctggcatgtctgcaatttacat

SEQ ID NO: 27602 - DNA, 358 bp, Macaca Mulatta
tagcggcaaccagttctttttcttctccaaatgtatcctctatggagtccttcccgccactcgcatactctactcctcagccgccccttcctcctatgaggccttcagcgccattaccttttgtgcctcctcctgcagttccttctgtcccaccacttgttacttctatgccacctcctgtttctccatcatctgctgctgcctttggtaatcctcctatatcccacttcccaccttcaacttctgctccaaacgctctttcacctgcaccgccttcgggtcctcctatatcaggatatgctgttggttcaacttacgacattacaaggggacatgcagggagagctccccagacacc

SEQ ID NO: 27603 - DNA, 754 bp, Macaca Mulatta
tattattgattccacttattttgtaaaaatggttatggctgctgccttccttgtggatgaaaagtggctgtaaagaagcttcctaagaacgttttttttctgccttgtaagatcactacgtgtgaaatgctctgtgtacctttcaaatatacctacttttggtggtaagtgtagggatgctttaggtgggtactttgcatatgtcgaatttaaattctaaactcacactgattaaataactcagtagactactttgcaggggccatgttattcgtattatctcctccagtacaaagaattcctagaattttgatttgctcaggtatgagctgacattttattgtactaccccattcttgtgtcaagccatgtggatttaggacagtgatcttcaaacttgctttaacttatgctccctcttgagaatcagcatcacttgaaatgtcaaaatatgtcaactctcatagccaaatcggagcagtgatcattttgaatgtgttttttaaatctccacacacctgcacctctctggtaattctgccctgtcccaacccctctgtcttagttacaaatttctggtcttgtaagactggaagctgataggccatttatgaaagagataagaatgtaatgaggttcagctttctgagaaaacacagaaatgatacatcctgagacatcaaggaaagcggctcttctgctgcctcaggctgtagcacgctcgatgttgtcactctacacgtacacttcctat

SEQ ID NO: 27604 - DNA, 118 bp, Macaca Mulatta
gtttcatgaacaggcgtgttatatctgctaacccatatctggggggcacctccaacggctatgcccaccccagcgggacggcgcttcattacgacgacgtcccctgcatcaacggctc

SEQ ID NO: 27605 - DNA, 4212 bp, Macaca Mulatta
  misc_feature (1)...(4212): n = A,T,C or G
gtacgcgggcctaggggatccggnnnnnnnnnnnnnnnnnnnnnnnnnnnnnnnnnnnnnnnnnnnnnnnnnnnnnnnnnnnnnnnnnnnnnnnnnnnnnnnnnnnnnnnnnnnnnnnnnnnnnnnnnnnnnnnnnnnnnnnnnnnnnnnnnnnnnnnnnnnnnnnnnnnnnnnnnnnnnnnnnnnnnnnnnnnnnnnnnnnnnnnnnnnnnnnnnnnnnnnnnnnnnnnnnnnnnnnnnnnnnnnnnnnnnnnnnnnnnnnnnnnnnnnnnnnnnnnnnnnnnnnnnnnnnnnnnnnnnnnnnnnnnnnnnnnnnnnnnnnnnnnnnnnnnnnnnnnnnnnnnnnnnnnnnnnnnnnnnnnnnnnnnnnnnnnnnnnnnnnnnnnnnnnnnnnnnnnnnnnnnnnnnnnnnnnnnnnnnnnnnnnnnnnnnnnnntgagaaaaaattctcacttggcgaactaaaacctcagtaattcattnnnnnnnnnnnnnngttttgataattttactagtgctgaaatctgggaacggcagtccgacactttcattttacagagaaagaaattaggctcaaggtcatcgctttagttgttagaattctttgactgttattcatcattcagagggtcttggatctagtggctgtgatagccattcagaacagttcccaaagagctttacaggtgtgtgttnnnnnnnnnnnnnnnnnnnnnnnnnnnnnnnnnnnnnnnnnnnnnnnnnnnnnnnnnnnnnnnnnnnnnnnnnnnnnnnnnnnnnnnnnnnnnnnnnnnnnnnnnnnnnnnnnnnnnnnnnnnnnnnnnnnnnnnnnnnnnnnnnnnnnnnnnnnnnnnnnnnnnnnnnnnnnnnnnnnnnnnnnnnnnnnnnnnnnnnnnnnnnnnnnnnnnnnnnnnnnnnnnnnnnnnnnnnnnnnnnnnnnnnnnnnnnnnnnnnnnnnnnnnnnnnnnnnnnnnnnnnnnnnnnnnnnnnnnnnnnnnnnnnnnnnnnnnnnnnnnnnnnnnnnnnnnnnnnnnnnnnnnnnnnnnnnnnnnnnnnnnnnnnnnncgtgctcccagatggcaggcctgtggagaaggagagccagatggaagaggagatcgtctactgggacccagctgacgaccttgctgccgacatttattccttttctgagctgcctacccctgatacgcctgtgaaccccttagaccttctctgtgccctgctgatctcctcagacagtttcctgcaacaagaaatagtgttgaaaatggccctctgccagtttgcactcccactcgtgttgcctgactcggagaaccactaccatacatttctgctgtgggccatgcggggcattgtgaggacatggtggtcccagcccccaaggggcgtggggagcttccgggaagacagcgtggtcctgtccagggcgcctgccttcgcctttgtgcgcatggatgtcagtagcaactccaagtcccagcttctcaacgccgtcctcagcccgggccacaggcagtgggactgcttctggcatcgggacctcaacttgggcaccaatgcccgggagatttcggatgggttggtagaaatttcctggttttttcccagcggaagggaggacttggacatttttccagaacctgtgacctttctgaacctgagaggtgacatcgggtctcactggctgcagtttaagctcttgacagaaatctcctccgctgtgtttatattgactgacaatatcagtaagaaggaatacaaattgctgtactccatgaaggagtcaaccacaaaatactacttcatcctgagtccgtaccgtgggaagcgcaacacaaacctgagatttctgaataagttaattcctgtgctgnnnnnnnnnnnnnnnnnnnnnnnnnnnnnnnnnnnnnnnnnnnnnnnnnnnnnnnnnnnnnnnnnnnnnnnnnnnnnnnnnnnnnnnnnnnnnnnnnnnnnnnnnnnnnnnnnnnnnngaggacatggcgcacgcagcccgcaagctcggtacaagaatgacgaggactgtgaggagtgtcagaaagcgaaagaccggatggagtggatcaccaagaaaaagcaaagactcggatgcctacagaagggatgagctgaggctgcagggggacccctggagaaaggcagcccaagtggagaaggagttctgccagctccagtgggccgtggacccccctgagaagcacagggctgagctgaggcggcggctgctagaacttcgaatgcagcagaacagccacgatccctcctcgggggtgcaggagttcatctcggggatcagcagcccctccttgagtgagaagcagtacttcctgaggtggatggagtggggcctggcacgggtggcccagccacgactgagacagcctccggagacacttctcaccctgagaccaaagcatgggggcgccacagacttgggggagctgctctggcctgagcccctgggggtggaacacttcctgcgggagatgggacagttttatgaggccgagagctgtcttgtggaggcggggaggctgccagcaggccaaaggcgttttgcccacttcccaggcttggcctcggagctgctgctgacagggctgcctctggagctaatcnnnnnnnnnnnnnnnnnnnnnnnnnnnnnnnnnnnnnnnnnnnnnnnnnnnnnnnnnnnnnnnnnnnnnnnnnnnnnnnnnnnnnnnnnnnnnnnnnnnnnnnnnnnnnnnnnnnnnnnnnnnnnnnnnnnnnnnnnnnnnnnnnnnnnnnnnnnnnnnnnnnnnnnnnnnnnnnnnnnnnnnnnnnnnnnnnnnnnnnnnnnnnnnnnnnnnnnnnnnnnnnnnnnnnnnnnnnnnnnnnnnnnnnnnnnnnnnnnnnnnnnnnnnnnnnnnnnnnnnnnnnnnnnnnnnnnnnnnnnnnnnnnnnnnnnnnnnnnnnnnnnnnnnnnnnnnnnnnnnnnnnnnnnnnnnnnnnnnnnnnnnnnnnnnnnnnnnnnnnnnnnnnnnnnnnnnnnnnnnnnnnnnnnnnnnnnnnnnnnnnnnnnnnnnnnnnnnnnnnnnnnnnnnnnnnnnnnnnnnnnnnnnnnnnnnnnnnnnnnnnnnnnnnnnnnnnnnnnnnnnnnnnnnnnnnnnnnnnnnnnnnnnnnnnnnnnnnnnnnnnnnnnnnnnnnnnnnnnnnnnnnnnnnnnnnnnnnnnnnnnnnnnnnnnnnnnnnnnnnnnnnnnnnnnnnnnnnnnnnnnnnnnnnnnnnnnnnnnnnnnnnnnnnnnnnnnnnnnnnnnnnnnnnnnnnnnnnnnnnnnnnnnnnnnnnnnnnnnnnnnnnnnnnnnnnnnnnnnnnnnnnnnnnnnnnnnnnnnnntcaggaacggcctgtcgaaccaaaacaaaaacatccagcagctcattgagctggtgagacggctgtgagtgtgcagagaaacccagttcaggtgtaggaggctgctgtgggcagccctgtctgatggggcacccgtgtgggctgtgccctggtgcctgagaatggccggtgcccaatcgacatgagaagacaagcaaaagacagagggtttggagtctcctcaacagtgttaagagaggaagtgacctcacagaccagctcagagatgttaccaggaatatcacaacccccagggtagggagacacgcagcagtttgttctgtctcagctcctgtcaaggatcccacggggtgggccctctgtatagctgctctctgtcactggcccctggagtgggagcagtgtcctcagtcactgcaggcccaggcgggcaggtggtcccaggacagaggtggggaagttgtcttgaggaagcagaagtaggccttgctcccgcccagcccaagggcctccagtggaccagcatttgagatgtgagtgcccgtggtgcacaaggcactcccatggcactgtatttattgactgaaggcttccctgacccctgcccaggaagagttcattggtcgctctgttgtgccccacagcactttgttatacctctgccacacacttcacgcagcgcgttgtaactcatgtgtttacatgtctgtcccccagactgtgagctaccttgagggcagggactgtacattctccagctctgtgtccccagggcctggcacattatagatgcttaataaatgtctgttgaatgaatgaatgcacaagtga

SEQ ID NO: 27606 - DNA, 384 bp, Macaca Mulatta
ctgcctgttgcctaagatcagttgcttttatactcagaatggaaatacctgatcttggctagctttgtttgttataagatattgatttcacttagatttccctccacgaggtcaacaaactatcatgttcttatgtgaacttaggccaaggccagagttatcataatccctaggttgctaaggcttattatgtgtttggtaaaaggtgattgcaggttctcagatgagtttactttatgtgggatggaatcaggcaaagaggctaggatgatggagaaaggtcgaggtgcaggtttaaaaaaaagttgtggaaatgaaagttccaaagaggtgatttctaaggaagtcagagaactcagggccagagcaggcagtaatgggtga

SEQ ID NO: 27607 - DNA, 541 bp, Macaca Mulatta
  misc_feature (1)...(541): n = A,T,C or G
gacacccccaaaggatggatttgtaatcgctgacgttcaactagttacaagcaattctccagaggaaaaacagtcccctttatcagcttttcggtcctcttcctctttaagaaagaagaataactcagggcagaaagcacttccaccctggcgatcttctgataagcatccaacagatatcattcgttttaattacctagacaactgtgaccccttggagactgtcnnnnnnnnnnnnnnnnnnnnnnnnnnnnnnnnnnnnnnnnnnnnnnnnnnnnnnnnnnnnnnnnnnnnnnnnnnnnnnnnnnnnnnnnnnnnnnnnnnnnnnnnnnnnnnnnnnnnnnnnnnnnnnnnnnnnnnnnntgtccctaagttccagctctcccctaaaagttccagctcatctcgcctggcctcctcctgagtcagtgggactcccagccactgccaccacagctgaaattctcatgcagcatcttcagagacaccctgggccccaggcatgactcatccaggttccagagccaaagcggactgaaca

SEQ ID NO: 27608 - DNA, 382 bp, Macaca Mulatta
ccatctccgtgggcagcggtggcgctggccttggcgcacacccgggccaccagccaggcagcgcaggccagtctccggacctggcgcaccacgccgccagccccgcggcgctgcagggccaggtatccagcctgtcccacctgaactcctcgggctcggactacggcaccatgtcctgctccactttgctatatggtcggacctggtgagaggacgccgggcccgccctagcccagcgctctgcctcaccacttccctcctgcccgccacacagaccaccatccaccgctgctccacgcgcttcgacttttcttaagaacctggccgcgtttagaccaaggaacaaaaaaccacaaaggccaaactgctggacgtctttctt

SEQ ID NO: 27609 - DNA, 1980 bp, Macaca Mulatta
  misc_feature (1)...(1980): n = A,T,C or G
agtatatttttggagattttagccctgatgaattcaatcagttctttgtgactcatcgatcttcagttgagnnnnnnnnnnnnnnnnnnnnnnnnnnnnnnnnnnnnnnnnnnnnnnnnnnnnnnnnnnnnnnnnnnnnnnnnnnnnnnnnnnnnnnnnnnnnnnnnnnnnnnnnnnnnnnnnnnnnnnnnnnnnnnnnnnnnnnnnnnnnnnnnnnnnnnnnnnnnnnnnnnnnnnnnnnnnnnnnnnnnnnnnnnnnnnnnnnnnnnnnnnnnnnnnnnnnnnnnnnnnnnnnnnnnnnnnnnnnnnnnnnnnnnnnnnnnnnnnnnnnnnnnnnnnnnnnnnnnnnnnnnnnnnnnnnnnnnnnnnnnnnnnnnnnnnnnnnnnnnnnnnnnnnnnnnnnnnnnnnnnnnnnnnnnnnnnnnnnnnnnnnnnnnnnnnnnnnnnnnnnnnnnnnnnnnnnnnnnnnnnnnnnnnnnnnnnnnnnnnnnnnnnnnnnnnnnnnnnnnnnnnnnnnnnnnnnnnnnnnnnnnnnnnnnnnnnnnnnnnnnnnnnnnnnnnnnnnnnnnnnnnnnnnnnnnnnnnnnnnnnnnnnnnnnnnnnnnnnnnnnnnnnnnnnnnnnnnnnnnnnnnnnnnnnnnnnnnnnnnnnnnnnnnnnnnnnnnnnnnnnnnnnnnnnnnnnnnnnnnnnnnnnnnnnnnnnnnnnnnnnnnnnnnnnnnnnnnnnnnnnnnnnnnnnnnnnnnnnnnnnnnnnnnnnnnnnnnnnnnnnnnnnnnnnnnnnnnnnnnnnnnnnnnnnnnnnnnnnnnnnnnnnnnnnnnnnnnnnnnnnnnnnnnnnnnnnnnnnnnnnnnnnnnnnnnnnnnnnnnnnnnnnnnnnnnnnnnnnnnnnnnnnnnnnnnnnnnnnnnnnnnnnnnnnnnnnnnnnnnnnnnnnnnnnnnnnnnnnnnnnnnnnnnnnnnnnnnnnnnnnnnnnnnnnnnnnnnnnnnnnnnnnnnnnnnnnnnnnnnnnnnnnnnnnnnnnnnnnnnnnnnnnnnnnnnnnnnnnnnnnnnnnnnnnnnnnnnnnnnnnnnnnnnnnnnnnnnnnnnnnnnnnnnnnnnnnnnnnnnnnnnnnnnnnnnnnnnnnnnnnnnnnnnnnnnnnnnnnnnnnnnnnnnnnnnnnnnnnnnnnnnnnnnnnnnnnnnnnnnnnnnnnnnnnnnnnnnnnnnnnnnnnnnnnnnnnnnnnnnnnnnnnnnnnnnnnnnnnnnnnnnnnnnnnnnnnnnnnnnnnnnnnnnnnnnnnnnnnnnnnnnnnnnnnnnnnnnnnnnnnnnnnnnnnnnnnnnnnnnnnnnnnnnnnnnnnnnnnnnnnnnnnnnnnnnnnnnnnnnnnnnnnnnnnnnnnnnnnnnnnnnnnnnnnnnnnnnnnnnnnnnnnnnnnnnnnnnnnnnnnnnnnnnnnnnnnnnnnnnnnnnnnnnnnnnnnnnnnnnnnnnnnnnnnnnnnnnnnnnnnnnnnnnnnnnnnnnnnnnnnnnnnnnnnnnnnnnnnnnnnnnnnnnnnnnnnnnnnnnnnnnnnnnnnnnnnnnnnnnnnnnnnnnnnnnnnnnnnnnnnnnnnnnnnnnnnnnnnnnnnnnnnnnnnnnnnnnnnnnnnnnnnnnnnnnnnnnnnnnnnnnnnnnnnnnnnnnnnnnnnnnnnnnnnnnnnnnnnnnnnnnnnnnnnnnnnnnnnnnnnnnnnnnnnnnnnnnnnnnnnnnnnnnnnnnnnnnnnnnnnnnnnnnnnnnnnnnnnnnnnnnnnnnnnnnnnnnnnnnnnnnnnnnnnnnnnnnnnnnnnaggtctgtggtttaccagcagagttcaaaagaatctgccactttgcagccatttttcacgttgcagttggatatccagtctgacaagatacgcacagtccaggatgccctggagagcttggtggcaagagaatctgtccaaggttataccacaaaaaccaaacaagagg

SEQ ID NO: 27610 - DNA, 615 bp, Macaca Mulatta
  misc_feature (1)...(615): n = A,T,C or G
atcacaaggcatcaagcccttctccctgcactcatgaatcccttaataaatattctcattgacaatcagaaatcttgtttcatctcattttttcttaaattcctagtcttcccggggatcttagtgtggggtacagggaattctgcatccagtgtcaaagttaccaaaggagaggaggctcacagcctccccgagtcatctccccaaagggtccttcctctcccagtcacccctcccccaactctccactgtacccctgagccaccagcctggcatcagttcagaccagtcccacaccttcctcaattttacttctcaacaaagacctgatcatgtaaaacccagcatttctaatgtgccatctgtatctggtcatgtgtctgggctgaagggtccccgctcagggacagggggcagttccaggtgagatcccatgtcaccatcatcccacaccccacccaacctgccagggaaccgggtgagctccctgtgccagtgggaactgcaatccagggcagaaaactgtcctgcagtctttgcccaactggnaaaggacaggggcccagtgggaagtttgctggggccctgtggggagattcaggagaaatgaaggga

SEQ ID NO: 27611 - DNA, 265 bp, Macaca Mulatta
gctgtgattctgtctctccgttacttggaccgttgaccctcagatttccagccttaaactctaccttccttatcacacgcctctctgaatcacagcctgaccattccagactccctgtccagatcttctcagcctctttcagtcaccatctgtcatagaataacaccgagaaagacatctcgcatgttctttccgtttctgttctgttctcctgcatattctcttcgatgcgcaggaaccctgccctatgcttgagagttcaggg

SEQ ID NO: 27612 - DNA, 635 bp, Macaca Mulatta
gccttcatactcagctcctctcacggctgcacattgaagcccttctccatggaaacataacaaagcaggctgcattaggagttatgcagatggtcgaagacacccttattgaacatgctcataccaaacctctccttccaagtcagctggttcggtatagagaagttcagctccctgacagaggatggtttgtttatcagcagagaaatgaagttcacaataactgtggcatcgagatatactaccaaacagacatgcaaagcacctcagagaatatgtttctggagctcttctgtcagattatctcggaaccttgtttcaacaccctgcgcaccaaggagcagttgggctatatcgtcttcagcgggccacgtcgagccaatggcatacagggcctgcgattcatcatccagtcagaaaagccacctcactacctagaaagcagagtggaagctttcttaattaccatggaaaagtccatagaggacatgacagaagaagccttccaaaaacacattcaagcattagcaattcgtcgactagacaaaccaaagaagctatctgcagagtgtgctaaatattggggagaaatcatctcccagcaatatcattttgacagagataacactgaagtt

SEQ ID NO: 27613 - DNA, 1574 bp, Macaca Mulatta
  misc_feature (1)...(1574): n = A,T,C or G
atctgtgaatgaatcattaaaacctctttattacagaagaagattatcaggctctgcgaacatcaatagatgcttatgacaactttgacaatatctcgcttgctcagcgtttggaaaaacatgaactcattgagttcaggagaattgctgcttatctcttcaaaggcaacaatcgctggaaacagagtgtagagctgtgcaagaaagacagcctttacaaggatgcaatgcagtatgcttctgaatctaaagatactgagttggctgaagaactcctgcagtggtttttgcaggaagaaaaaagagagtgctttggagcttgtctgtttacctgttacgatcttttaaggccagatgttgtcctagaaactgcatggaggcacaatatcatggattttgccatgccctatttcatccaggtcatgaaggaatacttgacaaaggtggataaattagatgcttcagaatcactgagaaaagaagaagaacaagctacagagacacaacccattgtttatggtcagccccagctgatgctgacagcaggacccagtgttgccgtccctccccaggcaccttttggttatggttataccgcaccaccgtatggacagccacagcctggctttgggtacagcatgtgagatgaaaagctgatcctgtagtcatctattttcgtactgaaacatcgtctctacccacttctctgtttataatgggggaaacaggcaacgtgttcttgtaacctttatttcatgaaggactcctttttgtttctaactataaacttggatcacctatgttaaaaccttatttcacattccacatcattttagaatttattttcgaaggggaatagtttcaatgttttattcacttgggctttttttcttccccctcattcttaaactgcttaatatttaatctgttgtgaagaatctgatttgcactctgtagtgtttaaagaaacaaagaaactctaatattgaatctcttaaatttagtgtatgtaaacagcttacaaatatgtattgtctaaatgcatttaaatctgttttattcaaagaaaagctaaagcaaaaatactggcatatgaccatgcaagactgtcaatgccaacaaagacaacactaatcagcacatcctacactggattgcagtgctttccagattatttgaaaaatgttacagacaacttgcctgatttttaaatgagcataaaaggccctctaacctatgcaggtttccccattatacatatagaaaatgctagtatgttttgctcacttcatatgtaacaggtgcccttatgttgtgctgtatcctgtgctttttctgtgggaccattccatttcaggagcaaagagcaccatgattccaatcttgtgtgtgtttactaacccttccctgaggtttgtgtatgttggaatattgtgggtgttttagatcactgagtgtacgaagaagaaatcaacaaatattgcgtatcgttttgttgatgatctcgtaaaatcgaggaactaaaaacaanancnnnnnnnnnnnnnnnnnnnnnnnnnnnngcgttgtaataa

SEQ ID NO: 27614 - DNA, 702 bp, Macaca Mulatta
  misc_feature (1)...(702): n = A,T,C or G
ggattgcggcaagaaggcccagctcaacattggcaatgtgctccctgtgggcaccatgcctgagggtacgatcgtgtgctgcctggaggagaagcccggagaccgtggcaagctggcccgggcatcagggaactatgccaccgttatctcccacaaccctgagaccaagaagacccgtgtgaagctgccctccggctccaagaaggttatctcctcagctaacagagctgtggttggtgtggtggctggaggtggccgaattgacaaacccatcttgaaggctggccgggcctaccacaaatataaggcaaagaggaactgctggccacgagtacggggtgtggccatgaatcctgtggagcatcctttcggaggtggcaaccaccagcacattggcaagccctctaccatccgcagagatgcccctgctggccgcaaagtgggtctcattgctgcccgccggactggacgtctccggggaaccaagactgtgcaggagaaagagaactagtgctgagagcctcaataaagtttgtctttatgtnnnnnnnnnnnnnnnnnnnnnnnnaggagacaagcgctgtgtagctgcgcttccgcaaagatggcggcggctgcggggagctgcgctcggctggcggcctggggcggaagactgcgacgggggctcgctgccagccgacgggctctgccgagtcccgg

SEQ ID NO: 27615 - DNA, 568 bp, Macaca Mulatta
gagcctcgggctggggctgcccattgggggccccacgtgtccccgcagggttggcagggccagagcccagaccgtgttgccagccagggagctgtccctctgtgaagggcggaggctcactgagtagagggctgttgtgtaaactgagagaacggcctgtgtgtaagaggaaaagaaagtgtccctggggtgctgtctctgaggaagcggagtttcgttaccgtcttgtagccccaatgtcatcatgtaattattacccagaatgctcttccataaatctcgtgcctttgtccaagctatacaataaaatctttcagtagtgcagtagttaagtccaaatggtggcaatggggtcttgaattactaccttttaatttctatatggaaaagaactcacttcactttgactaatgcttctgtaaattatattaaaatataagttccttcacactattatccatgtaaaaacaattttgctttgcttcaaacccagatttcaggaaaacgccaccaaaatattctccaaactttactactacatgtgtggagtcattttgttctcttaatt

SEQ ID NO: 27616 - DNA, 237 bp, Macaca Mulatta
  misc_feature (1)...(237): n = A,T,C or G
caggagcggtgagatcactgcctcacgcggatcctggactgacggtcacgactgcttacccgctaaccctgttctgagctnnnnnnnnnnncacacccgaaacctgtgtgcaggatccgcctccatggagctacagcctcctgaagcctcgaccgccgtcgtttcgattccccgccagctgccgggctcacattcggaggctggtgtccagggtctcagcgcgggggatgactcagg

SEQ ID NO: 27617 - DNA, 3627 bp, Macaca Mulatta
  misc_feature (1)...(3627): n = A,T,C or G
ctggagcagagccgctgggcgccggagctgaggcgagcgccgcgcgcaccactggtggagttgctgtgggtgagctgctgcggtttgtagccaagcatgctgtggtcggatctgcccagccgtggaacagaaacatttgctggatggaaaatccataaaagaaagctcctgtgaaaagctgaggctgacaataatttaagcaaaatcagnnnnnnnnnnnnnnnnnnnnnnnnnnnnnnnnnnnnnnnnnnnnnnnnnnnnnnnnnnnnnnnnnnnnnnnnnnnnnnnnnnnnnnnnnnnnnnnnnnnnnnnnnnnnnnnnnnnnnnnnnnnnnnnnnnnnnnnnnnnnnnnnnnnnnnnnnnnnnnnnnnnnnnnnnnnnnnnnnnnnnnnnnnnnnnnnnnnnnnnnnnnnnnnnnnnnnnnnnnnnnnnnnnnnnnnnnnnnnnnnnnnnnnnnnnnnnnnnnnnnnnnnnnnnnnnnnnnnnnnnnnnnnnnnnnnnnnnnnnnnnnnnnnnnnnnnnnnnnnnnnnnnnnnnnnnnnnnnnnnnnnnnnnnnnnnnnnnnnnnnnnnnnnnnnnnnnnnnnnnnnnnnnnnnnnnnnnnnnnnnnnnnnnnnnnnnnnnnnnnnnnnnnnnnnnnnnnnnnnnnnnnnnnnnnnnnnnnnnnnnnnnnnnnnnnnnnnnnnnnnnnnnnnnnnnnnnnnnnnnnnnnnnnnnnnnnnnnnnnnnnnnnnnnnnnnnnnnnnnnnnnnnnnnnnnnnnnnnnnnnnnnnnnnnnnnnnnnnnnnnnnnnnnnnnnnnnnnnnnnnnnnnnnnnnnnnnnnnnnnnnnnnnnnnnnnnnnnnnnnnnnnnnnnnnnnnnnnnnnnnnnnnnnnnnnnnnnnnnnnnnnnnnnnnnnnnnnnnnnnnnnnnnnnnnnnnnnnnnnnnnnnnnnnnnnnnnnnnnnnnnnnnnnnnnnnnnnnnnnnnnnnnnnnnnnnnnnnnnnnnnnnnnnnnnnnnnnnnnnnnnnnnnnnnnnnnnnnnnnnnnnnnnnnnnnnnnnnnnnnnnnnnnnnnnnnnnnnnnnnnnnnnnnnnnnnnnnnnnnnnnnnnnnnnnnnnnnnnnnnnnnnnnnnnnnnnnnnnnnnnnnnnnnnnnnnnnnnnnnnnnnnnnnnnnnnnnnnnnnnnnnnnnnnnnnnnnnnnnnnnnnnnnnnnnnnnnnnnnnnnnnnnnnnnnnnnnnnnnnnnnnnnnnnnnnnnnnnnnnnnnnnnnnnnnnnnnnnnnnnnnnnnnnnnnnnnnnnnnnnnnnnnnnnnnnnnnnnnnnnnnnnnnnnnnnnnnnnnnnnnnnnnnnnnnnnnnnnnnnnnnnnnnnnnnnnnnnnnnnnnnnnnnnnnnnnnnnnnnnnnnnnnnnnnnnnnnnnnnnnnnnnnnnnnnnnnnnnnnnnnnnnnnnnnnnnnnnnnnnnnnnnnnnnnnnnnnnnnnnnnnnnnnnnnnnnnnnnnnnnnnnnnnnnnnnnnnnnnnnnnnnnnnnnnnnnnnnnnnnnnnnnnnnnnnnnnnnnnnnnnnnnnnnnnnnnnnnnnnnnnnnnnnnnnnnnnnnnnnnnnnnnnnnnnnnnnnnnnnnnnnnnnnnnnnnnnnnnnnnnnnnnnnnnnnnnnnnnnnnnnnnnnnnnnnnnnnnnnnnnnnnnnnnnnnnnnnnnnnnnnnnnnnnnnnnnnnnnnnnnnnnnnnnnnnnnnnnnnnnnnnnnnnnnnnnnnnnnnnnnnnnnnnnnnnnnnnnnnnnnnnnnnnnnnnnnnnnnnnnnnnnnnnnnnnnnnnnnnnnnnnnnnnnnnnnnnnnnnnnnnnnnnnnnnnnnnnnnnnnnnnnnnnnnnnnnnnnnnnnnnnnnnnnnnnnnnnnnnnnnnnnnnnnnnnnnnnnnnnnnnnnnnnnnnnnnnnnnnnnnnnnnnnnnnnnnnnnnnnnnnnnnnnnnnnnnnnnnnnnnnnnnnnnnnnnnnnnnnnnnnnnnnnnnnnnnnnnnnnnnnnnnnnnnnnnnnnnnnnnnnnnnnnnnnnnnnnnnnnnnnnnnnnnnnnnnnnnnnnnnnnnnnnnnnnnnnnnnnnnnnnnnnnnnnnnnnnnnnnnnnnnnnnnnnnnnnnnnnnnnnnnnnnnnnnnnnnnnnnnnnnnnnnnnnnnnnnnnnnnnnnnnnnnnnnnnnnnnnnnnnnnnnnnnnnnnnnnnnnnnnnnnnnnnnnnnnnnnnnnnnnnnnnnnnnnnnnnnnnnnnnnnnnnnnnnnnnnnnnnnnnnnnnnnnnnnnnnnnnnnnnnnnnnnnnnnnnnnnnnnnnnnnnnnnnnnnnnnnnnnnnnnnnnnnnnnnnnnnnnnnnnnnnnnnnnnnnnnnnnnnnnnnnnnnnnnnnnnnnnnnnnnnnnnnnnnnnnnnnnnnnnnnnnnnnnnnnnnnnnnnnnnnnnnnnnnnnnnnnnnnnnnnnnnnnnnnnnnnnnnnnnnnnnnnnnnnnnnnnnnnnnnnnnnnnnnnnnnnnnnnnnnnnttggctggatctgtcacaagcaacatttaagtcctactgcactttgccctgttatccacattggagtaggcactgcatagcagataccattgaattgctgtaaaaataggatggcgagtttgtgttttaatttttcataaaattgaacctgttggttgacaaaattggctgttggcatcagtatagaaaccaactggcagctttccttgacaagctctttgacacatggataccatttcatgtctacagctgtttgtgggatgttggaaaaagtgaaacttcaaaattgatgaaaaactaaatttgaggaattaaaatcgaacaaaacatagcttttcttttcagatggttttcaaactgattatttttaaaagagattaataaaatcataatgcattttgggtgggacatatttcaaacttctgccttatattgtacggtgcagctagagaattatagttcactatggccattctctacataaacattaagatgaaatactcctcatcagcctttcatccttagtttgagaactagctgatatgcaatttgaagttgaggaaatatcattgatatttccatcatgcacaattattttcgatttctaccaccatgttatttttgctagtccatgtgctagaggtaaaggttctgctggaattctgcatccagctcagtccccctctgatgctttttgcccagaaagctgtctgtccatcatttattgtccatggcaacaaattacattaggttgaacctttccttgaatttatgtatttaatattagaatttgttggactcaactagatannnnnnnnnnnnnnnnnnnnnnnnnnnnnnnnnnnnnnnnnnnnnnnnnncatatctgagcaaagtctacatagaaataatggactatttaacaagtttcccaaaaatagcattttcctgctcctttttatgtagatgagaaacttagctgtaaagacatacagatttagactcttgttgacattgtcgttttaaaaggaagttgctaaggcgatcaatctcaatattagtcttgtttacttctttttaatgttaaaattaacatttacaacatccaattataaaagtaatgctttatgttta

SEQ ID NO: 27618 - DNA, 136 bp, Macaca Mulatta
  misc_feature (1)...(136): n = A,T,C or G
gatgactttccagttcagcatatgggacaaatttcgggacttggaaaacttgccagctacgaatttctctaatttggttcatctggtggcccacttgttgaagacaaaatctctttccctttccatcttaaaggtn

SEQ ID NO: 27619 - DNA, 892 bp, Macaca Mulatta
  misc_feature (1)...(892): n = A,T,C or G
acagccagccgggcattgctgccggttcagtgggcctggcgagagggcagcgttacccgccggctttaaagcgatacacacagcccccgtggccaccatggccttcgaccccacctccacgctgctagccacaggtncaggtggctgtgacggggccgtgcgcatctgggacatcgtgcggcactatgggacacaccacttccgaggctcgcccggtgttgtgcancctagtggccttccacccggaccctacacgcctgctgctcttctcctcagccgcggatgccgccatccgcgtgtggtcactgcaggaccggtcgtgcctggctgtgctgactgcccactacagcgctgtcacctcactgaccttcagcgccgacggccacaccatgctncagctccggccgtgacaagatctgtgtcatctgggaccttcagagctgccaggccacaaagaccgtgcctgtgtttgagnnnnnnnnnnnnnnnnnnnnnnnnnnnnnnnnnnnnnnnnnnnnnnnnnnnnnnnnnnnnnnnnnnnnnnnnnnnnnnnnnnnnnnnnnnnnnnnnnnnnnnnnnnnnnnnnnnnnnnnnnnnnnnnnnnnnnnnnnnnnnnnnnnnnnnnnnnnnnnnnnnnnnnnnnnnnnnnnnnnnnnnnnnnnnnnnnnnnnnnnnnnnnnnnnnnnnnnnnnnnnnnnnnnnnnnnnnnnnnnnnnnnnnnnnnnnnnnnnnnnnnnnnnnnnnnnnncagttcgctggctacagtgaggaggtcttggatgtccggtttcttggccccgaggactcccacgtcatcgtggcttccaatagcccctgcctgaaagtgtntgagctgcagacgtcagcctgccaaatcctccatggccacacg

SEQ ID NO: 27620 - DNA, 856 bp, Macaca Mulatta
  misc_feature (1)...(856): n = A,T,C or G
gggcattcaggggcggccggctttgttgggtgtgcttggtttggtgtccctgcggctgaccgtgattggtgattcgcagcatcttcgtaaccgctaacaggtcaaaatgcagatcttcgtgaagaccctgaccggcaagaccatcacccttgaggtgngagcccagtgacaccatcgaaaacgtgaaggccaaaatccaggataaggaaggcattccccccgaccagcagaggctcatctttgcaggcaagcagctggaagatggccgcactctttcctgacttacaacatccagaaagagtccaccctgcacctttgtcctgcgcctgagaagtggtatgcagaatcttcttgaaagaccccgaaccggcaaaaaccatcccccctggaaattgggacccccattgacccccttccaaaaaatgttgaaagggccaaaaattccnnnnnnnnnnnnnnnnnnttccctttccccaaacacgataaaaagggcccattttttttttcagggggaaaacaaactttgtgaaaaaagggggccccccccactttttttttgtagaaacaaaacaccttcccctaaaagggagggtttcaccccccctctagcttatttattaatttctcaaccccctaataaaaagaggggatttcattataatatattattattcttaggagaaaaaaacccccacctcccgtggagaagaaaaaaatacacatcactctgattgtttgttggtggggggggaatactccccatttatataattttattacctattatatataaatactatttgggggagacgggtgactctctcgcccccctgttcgaaatcaatttatacggagc

SEQ ID NO: 27621 - DNA, 772 bp, Macaca Mulatta
  misc_feature (1)...(772): n = A,T,C or G
cctgcccagcaacatggggtccagcagcttcttggtcctcatggtgtctctcgctcttgtgaccctggtggctgcggaaggagttaaagggggtngtatagaaaaagcaggggtttgcccagctgacaacatacgctgcttcaagtccgatcctccccagtgtcacacagaccaggactgtctgggggaaaggaaatgttgttacctgcactgtggcttcaagtgtgtgattcctgtgaagaaactggaagaaggnnnnnnnnnnnnnnnnnnnnnnnnnnnnnnnnnnnnnnnnnnnnnnnnnnnnnnnnnnnnnnnnnnnnnnnnnnnnnnnnnnnnnnnnnnnnnnnnnnnnnnnnnnnnnnnnnnnnnnnnnnnnnnnnnnnnnnnnnnnnnnnnnnnnnnnnnnnnnnnnnnnnnnnnnnnnnnnnnnnnnnnnnnnnnnnnnnnnnnnnnnnnnnnnnnnnnnnnnnnnnnnnnnnnnnnnnnnnnnnnnnnnnnnnnnnnnnnnnnnnnnnnnnnnnnnnnnnnnnnnnnnnnnnnnnnnnnnnnnnnnnnnnnnnnnnnnnnnnnnnnnnnnnnnnnnnnnnnnnnnnnnnnnnnnnnnnnnnnnnnnnnnnnnnnnnnnnnnnnnnnnnnnnnnnnnnnnnnnnnnnnnnnnnnnnnngagatgagaaactggcccccactagatgctgaatctgctggtgccttgatcttggacttcccagcctccagaactgtaagaaataaatatttgttgtttacaatc

SEQ ID NO: 27622 - DNA, 657 bp, Macaca Mulatta
aggaaataaagttggaaacagctctttggtgggaatacttcagatagagcaagaaagcattcacagcaaggcctataatcaataagatgtgtgaaaagttgggtagccacaggaggtgttcattaaggatatgattccatttatatagctatttctattgcataaccaggacggtgttattgttttgaggtcagtgttcttttaaaatttgattttgtgtaaaaagaggctttttggcccagaaagccttaacttattttacatcttccagtttgtccatcccatgagttagagttcgtcttgactctgcaagctagaatcaaaggattatgaaagtaagatcatttagatatgaccaagggcaccactaaatggtgtcgggttgtaggaagcagacgcgtgtataaaaagaaaatgaacaaagatttcacttattggggcccaggcataactggatgcctggattgtcctgccacccagctgccaccaataaaatcattcatcactctgcaagagggaccagatgcttccatcatcagtactccttgtttttctcttatctcctttgaggtagctaaaaatggcagccaaaaaaaaatttttgaggcttttcgcaaagtatatattcatgttattatgcagaagatagggtcaact

SEQ ID NO: 27623 - DNA, 543 bp, Macaca Mulatta
  misc_feature (1)...(543): n = A,T,C or G
gtgacctgctgggcctcccaatggaccataggcagtggcagttggacccaagagaagactgcggcagactacacagtacttcttgtcaaaatgattctccttcaaggtttccaaaacctttagcacaaagagagcaaaaccttccagccttgcctgcttggtgtccagttaaaactcagtgtactgccagattcatctaaatgtctatcatgtccagatttactttgcttctgttactgccagagttactagagatctcataataggataagaagaccctcatatgacctgcatagctcgtattctccttctgaaagaaactactacctaggagaatctaaactatagcagggatgatttatacgaatttgaactagcttttctattcacaattcagtttctcccaaccaaccagtcttcacttcaaaagggccacactgcaacctcagctnnnnnnnnnnnnnnnnnnnnnctcaggagtagggcttgaccaggcatggtggatcaccggaggtcattatttcatgaccatcctgcccaaca

SEQ ID NO: 27624 - DNA, 1203 bp, Macaca Mulatta
atggacagcagcgctgtccccacgaacgccagcaattgcactgatgccttggcgcactcaagttgctccccagcacgcagccccggttcctgggtcaacttgtcccacttagatggcaacctgtccgacccatgcggtccgaaccgcaccgacctgggcgggagagacagcctgtgccctccgaccggcagtccctccatgatcacggccatcaccatcatggccctctactccatcgtgtgcgtggtggggctcttcggaaacttcctggtcatgtatgtgattgtcagatacaccaaaatgaagactgccaccaacatctacattttcaaccttgctctggcagatgccttagtcaccagtaccctccccttccagagtgtgaattacctaatgggaacatggccatttggaaccatcctttgcaagatcgtgatctccatagattactataatatgtccaccagcatattcaccctctgcaccatgagtgttgatcgatacattgcagtctgccaccctgtcaaggccttagatttccgtactccccgaaatgccaaaattatcaatgtctgcaactggatcctctcttcagccattggtcttcctgtaatgttcatggctacaacaaaatacaggcaaggttccatcgattgtacactaacattctctcatccaagctggtactgggaaaacctgctgaagatctgtgttttcatctttgccttcatcatgcctgtgctcatcattaccgtgtgctatggactgatgatcttgcgcctcaagagcgtccgcatgctctctggctccaaagaaaaggacaggaatcttcgaaggatcaccaggatggtgctggtggtggtggctgtgttcatcatctgctggactcccattcacatttacgtcatcattaaagccttagttacaatcccggaaactacgttccagactgtttcttggcacttctgcattgctctaggttacacaaacagctgcctcaacccagtcctttatgcatttctggatgaagacttcaaacgatgcttcagagagttctgtatcccaacctcttccaacatcgagcaacaaaactccactcgaattcgtcagaacactagagaccacccctccacggccaatacagtggatagaactaatcatcagctagaaaatctggaagcagaaactgctccattgccctaa

SEQ ID NO: 27625 - DNA, 305 bp, Macaca Mulatta
actttcacctgcttcttcaccatcagcaccacaccctggaggacatacttcagcctcctgaacaagacctgcttggagggattccactaagtgaaacctactcacaggcctggccatgtgctgctcccacatgccgtggacatcagcacttctcttctgacgactcttcagtggctgtacagctttgtacttgtttgttatcctattttgcatgtgtttgagatcttggaccagcgttttagaaaatacacacatcttgagcctaatcatgtagtatagatcaataagcatcagcatgctaagaa

SEQ ID NO: 27626 - DNA, 372 bp, Macaca Mulatta
gtgagaggcccgggcaggggcggggctggtggggtcctgggaggcggtggctgaattctgtccccacccaccccgaggtctcccggtttccccctagcccagctcctgttcttgctccacgtggagttgaggacaagcttccccaaggtgctggagtcaatttcacagactggccaggagcctgccgcaggccacagctctgcccagtgctggggagccccctggccgagggtggcgggaccttgcagccctgtctctgcctccccctgcactcactgcaggccagctggcccggctcctcctggccctggctccctctccctgctcaaactccagaccagcttcagagcgagggggatctgtgggtcctgg

SEQ ID NO: 27627 - DNA, 1326 bp, Macaca Mulatta
  misc_feature (1)...(1326): n = A,T,C or G
agggacctgctgcagctgggaggggagctggcccagacatcatgagctgtccaggaggcaggcctgggactgatcacggacctgcggctggcagagagccggaccgaggcagccctggagaagcaggcccagctggaggagcagctgcaggnnnnnnnnnnnnnnnnnnnnnnnnnnnnnnnnnnnnnnnnnnnnnnnnnnnnnnnnnnnnnnnnnnnnnnnnnnnnnnnnnnnnccagagtgacagagctgggcctggcagtggagcgtcttcagaagcagaatctggagaaggatcaggtcaacaaggacctcaccgagaagcttgaggccctgnnnnnnnnnnnnnnnnnnnnnnnnnnnnnnnnnnnnnnnnnnnnnnnnnnnnnnnnnnnnnnnnnnnnnnnnnnnnnnnnnnnnnnnnnnnnnnnnnnnnnnnnnnnnnnnnnnnnnnnnnnnnnnnnnnnnnnnnnnnnnnnnnnnnnnnnnnnnnnnnnnnnnnnnnnnnnnnnnnnnnnnnnnnnnnnnnnnnnnnnnnnnnnnnnnnnnnnnnnnnnnnnnnnnnnnnnnnnnnnnnnnnnnnnnnnnnnnnnnnnnnnnnnnnnnnnnnnnnnnnnnnnnnnnnnnnnnnnnnnnnnnnnnnnnnnnnnnnnnnnnnnnnnnnnnnnnnnnnnnnnnnnnnnnnnnnnnnnnnnnnnnnnnnnnnnnnnnnnnnnnnnnnnnnnnnnnnnnnnnnnnnnnnnnnnnnnnnnnnnnnnnnnnnnnnnnnnnnnnnnnnnnnnnnnnnnnnnnnnnnnnnnnnnnnnnnnnnnnnnnnnnnnnnnnnnnnnnnnnnnnnnnnnnnnnnnnnnagggagaagagcaacctggcccacagcctgcaggtggcccagcagcaggccgaggagctgcggcaggagcgggagaagctgcaggctgcccaggaggagctgagacgccagtgggaccggctggaggaagagcaggaggacnnnnnnnnnnnnnnnnncgggtgcgccgggagcttgagcgcannnnnnnnnnnnnnnnnnnnnnnnnnnnnnnnnnnnnnnnnnnnnnnnnnnnnnnnnnnnnnnnnnnnnnnnnnnnnnnnnnnnnnnnnnnnnnnnnnnnnnnnnnnnnnnnnnnnnnnnnnnnnnnnnnnnnnnnnnnnnnnnaggctgaggctggccgcgtggagctcgagctctccatgaccaagctgagggcagaggaggcctccctgcaggactccctgtccaagctgagcgccctcaacgagagccttgctcaggacaagctggatctgaaccgccttgttgccca

SEQ ID NO: 27628 - DNA, 816 bp, Macaca Mulatta
gcacccagaataccgggtgctcttattcagctgtttcctcttcctctactctggagccctcacaggtaatgtcctcatcatcttggccatcaccttcaaccctgggctccacacccctatgtactttttcctgttcaatttggctactatggacattatctgcacctcttccatcatgcccaaggcactggcgggtctggtgtcggaggagagcatcatctcttatgcgggctgcatggcccagctctatttcctcacttgggctgcatcctcagagctgctcctcctcacagtcatggtctatgaccggtacgcagccatctgccatccgctgcattacagcagcatgatgggcaaggcgttctgcagcgggctggccgcagccgtgtggctgctctgcgctgtcaacacggccatccacatggggctgatgctgcgcttggatttctgtggccccaatgtcgttacccatttcttctgcgaggtgcctccgctgctgcttctctcctgcagctccacctacgtcaacagtgtcatgattgtcctggcggacgctttctatggcacagtgaacttcctgatgaccatcgcgtcctatggcttcatcatctccagcgtcttgaaggtgcagactgcagcggggaggcagaaagccttctccacctgctcttcccacctcaccgaggtgtgtatgtattacaccgctgtcttctacgcctacataagcccggtctccggctacagcgcggggaagagaaggttggctggcctactgtacactgtgctgagtcctaccctcgaccccctcatctatac

SEQ ID NO: 27629 - DNA, 753 bp, Macaca Mulatta
  misc_feature (1)...(753): n = A,T,C or G
gggacagattcaaataacaattaatggattcagtattagcaatggactggcaactactcagatcaacaataaggctgcaactggagaggaggttccccgtaccattattgtaaccacccgttctcagtatgggttaccagaagatgccattgtatactgtaactttaatcagctgtataaaattgacccttctactttgcagatgtgggcaaatattctgaagcgtgttcccaatagtgtactctggctgttgcgttttccagcagtaggagagccgaatattcaacagtatgcacaaaacatgggcctgccccagaaccgtatcattttttcacctgttgctcctaaagaggaacatgtcaggagaggccagctggctgatgtctgcttggacactccactctgtaatgggcacaccacagggaattggatgtcctctgggcagggacccccatggtgactatgccaggagagactcttgcttctcgagttgcagcttcccagcttacttgcttangctgtcttgagcttattgctaaaaacagacaagagtatgaagacatagctgtgaagctgggaactgatctagaatacctgaagaaaattcgtggcaaagtctggaaacaaagaatatctagcccctctgttcaacaccaaacaatacacaatggaaactagaggcggctctatctacagatgtggggagcattatgcnagctgggcaacaaaccctgaaccccctgaatttaagcc

SEQ ID NO: 27630 - DNA, 3294 bp, Macaca Mulatta
  misc_feature (1)...(3294): n = A,T,C or G
aagggaaagaccgtggagggagagtgaactccaaggggtgtcccctcccacctctcagggccttaatttttcccttttcgagctgaacaaatcacattctgtccagattcctcctgtaaaataacccactagtgcctgagctcagtgctgctggatgatgagggagatcaagaaaaagccacgcaagggactttagcgatgaactagtggaatgccttcattccgcagtaaggttgccgagacctgaggagggtaagtgacttgcccaaggtcagagccacttggtgacagagtcaggatgagaacaaagattccatttgcaccatgccacactgctgtgttcacgtgtgccctccgtccagagcagtcccgggcaggggtgaaactccagcaggcggctgggctggaaaggagggcagggctacatcctggctcagtgggatctgatgacctgtaagtccagctcccaagttttccttctcctaccccagcctgtgtacccgtcttcccaccctctatgttcttaccccaccctacactcagtgcgtgttcccacttactctgtcctggggcctctgggattaccacaggttattcataaccttgaatcaacccgttgttctggattctgattctctcacatttgcctcgagagatnnnnnnnnnnnnnnnnnnnnnnnnnnnnnnnnnnnnnnnnnnnnnnnnnnnnnnnnnnnnnnnnnnnnnnnnnnnnnnnnnnnnnnnnnnnnnnnnnnnnnnnnnnnnnnnnnnnnnnnnnnnnnnnnnnnnnnnnnnnnnnnnnnnnnnnnnnnnnnnnnnnnnnnnnnnnnnnnnnnnnnnnnnnnnnnnnnnnnnnnnnnnnnnnnnnnnnnnnnnnnnnnnnnnnnnnnnnnnnnnnnnnnnnnnnnnnnnnnnctcagctgatgggagtgactccctgagacccagtatgaaggagcagtggctgcaggagaggccttcccagggcccccccatcagcgatgtgtcttcagagacaatccattaaagcagccaggaaggacaggctttcctctgtatgtcataggaaactcagggacatttcaagttgctgagcgttttgttgtagttgttttctaacccagccctccactgccaaaggccaaagctcagacagctgcagactcccagttagctcatcacactcattctgattctcctgggctgcaggaaaagaggggcctgcaaagcgcagtgcatgctgggtgcatgaagggcaacctgggggacagactgttgtgcgaacatctcactgtcctggcctggagctaggccttgctgttcctcttctctgtgagcccaatggggctactgcagttctcttgcagtttctggtggcatctcagggaaccacaaagctatgtctattccccaatacaggacttttatgggctgagcagttagctgccatgtaggaggctcctaagcagtgggcatagcgaggtttcatctgattgagaagggggaatcctgtgtggaatgttgaactttcgccatggtctccatcgttctgggcataaattccctggtatcaagtaggaaaatgggcagaactgcttaggggaatgaaattgccatttttcgggtgaatgccacacctccagggtcttaagagtcaggctcnnnnnnnnnnnnnnnnnnnnnnnnnnnnnnnnnnnnnnnnnnnnnnnnnnnnnnnnnnnnnnnnnnnnnnnnnnnnnnnnnnnnnnnnnnnnnnnnnnnnnnnnnnnnnnnnnnnnnnnnnnnnnnnnnnnnnnnnnnnnnnnnnnnnnnnnnnnnnnnnnnnnnnnnnnnnnnnnnnnnnnnnnnnnnnnnnnnnnnnnnnnnnnnnnnnnnnnnnnnnnnnnnnnnnnnnnnnnnnnnnnnnnnnnnnnnnnnnnnnnnnnnnnnnnnnnnnnnnnnnnnnnnnnnnnnnnnnnnnnnnnnnnnnnnnnnnnnnnnnnnnnnnnnnnnnnnnnnnnnnnnnnnnnnnnnnnnnnnnnnnnnnnnnnnnnnnnnnnnnnnnnnnnnnnnnnnnnnnnnnnnnnnnnnnnnnnnnnnnnnnnnnnnnnnnnnnnnnnnnnnnnnnnnnnnnnnnnnnnnnnnnnnnnnnnnnnnnnnnnnnnnnnnnnnnnnnnnnnnnnnnnnnnnnnnnnnnnnnnnnnnnnnnnnnnnnnnnnnnnnnnnnnnnnnnnnnnnnnnnnnnnnnnnnnnnnnnnnnnnnnnnnnnnnnnnnnnnnnnnnnnnnnnnnnnnnnnnnnnnnnnnnnnnnnnnnnnnnnnnnnnnnnnnnnnnnnnnnnnnnnnnnnnnnnnnnnnnnnnnnnnnnnnnnnnnnnnnnnnnnnnnnnnnnnnnnnnnnnnnnnnnnnnnnnnnnnnnnnnnnnnnnnnnnnnnnnnnnnnnnnnnnnnnnnnnnnnnnnnnnnnnnnnnnnnnnnnnnnnnnnnnnnnnnnnnnnnnnnnnnnnnnnnnnnnnnnnnnnnnnnnnnnnnnnnnnnnnnnnnnnnnnnnnnnnnnnnnnnnnnnnnnnnnnnnnnnnnnnnnnnnnnnnnnnnnnnnnnnnnnnnnnnnnnnnnnnnnncccaagctgcacagaaggccagaaaccacgagtatggtgactgggaagcctactgtcatgtgagtggggagcaacgcttatgaaggaggtacagaatattctttgcatcgtaagacagagtacgggtttaatctagtctagacaccagatttttttcccgcttgataaggaaagctagcagaaagtttatttaaaccacttcttgagctttatctttttggacaatatactggagaaactttcaagaacaagttcaaactgatacatatacacagattttttggataatgtaaatacagtggccatgttaatccaccctgcactgctttaagtgaacatactttgagaaaacattatgttacctgagtgatggccaagttttttctctggacaggaatgtaaatgtcttactggaaatgacaagtttttgnnnnnnnnnnnnnnnaaacaaaaaatgaaatataacaaggcaaacttatgataaagtatttgtcttgtagatcaggtgttcttttttaaattttaaaatgcaaccctgccccctccccagcaaagtcacagccccatcacagtaaaggttggagtcaatatgctctggttggcaggcaaccctctagtcatggagaaaggtatttcaagatctagtccaatctttttctagagaaaaagataatccgaagctcacaaagataaagt

SEQ ID NO: 27631 - DNA, 684 bp, Macaca Mulatta
ttagaatgctaataacacattttctttatctgttaaggcaaatgctaaaattctcatcaatcactgtcacacaaatcggggactggcagcccaccggcatcttttcttaaggtattgtatttcagggcacaacaaaatgctgtgattggggctgggggctgtgaatataagcaaagaagctcaattgacagtatatggctgcacatacaaaaaatgtcctttgctgatgaaatactgccacatagaacttcgatggtgtgaaaaattatattagagccccttcttttatacaagttcttcccctacaagaggattttagttctaatggggtcccaccggcctaatccttgcccaaatagggtgcaacctccctgcaaacatatcccattttagagattccctagggctttatccagcaatccacttcttaaggtacttttgagattaaattattaataacagcttattgagagttgttattcagtttcaaaccacaattgattctctcttgctgcagcacctattttggaaaagaggctgaggttgtagctcacacatacctggattcacacagagttgaaaaaccaaggaaccactggatgttggttactgggaatcccagggatgcctcttccaccatgttggatctgcccaaaccgcccgcagaggacactcgagccatgg

SEQ ID NO: 27632 - DNA, 2046 bp, Macaca Mulatta
  misc_feature (1)...(2046): n = A,T,C or G
caggaaaagaggcgagagggcacttngagagtggatacttacactctagtgcagcctgaggcagaagaccatgttgagagctaccgaaccatgcccgtttaccctacctacaatgaagtgcacttggatgagaggcccttccttcgccccaatatcatttctggaaaatatgacagcactgctatctatctggatacccatttccggctcctgcgagaagatttcgtcagacctttacgggaaggcattttggaacttctccaaagctttgaagaccagggcctgagaaagagaaagtttgatgacatccgaatctactttgacaccaggattatcacccccatgtgttcatcatcaggcatagtctacaaggtgcagtttgacacaaaaccactgaagtttgttcgctggcagaattccaaacgattgctctatgggtctttggtatgcatgtccaaggacaactttgagacatttctttttgccactgtatctaacagggagcaggaagatctctgtcgaggaattgtccagctctgcttcaatgagcagagccaacagctgctagcagaagtccagccctctgactctttcctcatggtggagacaactgcatactttgaggcttacaggcatgtcctggaaggactccaggaggtccaggaagaagatgtcccttttcagaggaatatcgtggagtgtgactctcatgtgaaggagccaaggtacttgctaatggggggcagatatgactttacccccttaatagagaatccgtcagccactggggaattctaagaaatgtggagggcttgannnnnnnnnnnnnnnnnnnnnnnnnnnnnnnnnnnnnnnnnnnnnnnnnnnnnnnnnnnnnnnnnnnnnnnnnnnnnnnnnnnnnnnnnnnnnnnnnnnnnnnnnnnnnnnnnnnnnnnnnnnnnnnnnnnnnnnnnnnnnnnnnnnnnnnnnnnnnnnnnnnnnnnnnnnnnnnnnnnnnnnnnnnnnnnnnnnnnnnnnnnnnnnnnnnnnnnnnnnnnnnnnnnnnnnnnnnnnnnnnnnnnnnnnnnnnnnnnnnnnnnnnnnnnnnnnnnnnnnnnnnnnnnnnnnnnnnnnnnnnnnnnnnnnnnnnnnnnnnnnnnnnnnnnnnnnnnnnnnnnnnnnnnnnnnnnnnnnnnnnnnnnnnnnnnnnnnnnnnnnnnnnnnnnnnnnnnnnnnnnnnnnnnnnnnnnnnnnnnnnnnnnnnnnnnnnnnnnnnnnnnnnnnnnnnnnnnnnnnnnnnnnnnnnnnnnnnnnnnnnnnnnnnnnnnnnnnnnnnnnnnnnnnnnnnnnnnnnnnnnnnnnnnnnnnnnnnnnnnnnnnnnnnnnnnnnnnnnnnnnnnnnnnnnnnnnnnnnnnnnnnnnnnnnnnnnnnnnnnnnnnnnnnnnnnnnnnnnnnnnnnnnnnnnnnnnnnnnnnnnnnnnnnnnnnnnnnnnnnnnnnnnnnnnnnnnnnnnnnnnnnnnnnnnnnnnnnnnnnnnnnnnnnnnnnnnnnnnnnnnnnnnnnnnnnnnnnnnnnnnnnnnnnnnnnnnnnnnnnnnnnnnnnnnnnnnnnnnnnnnnnnnnnnnnnnnnnnnnnnnnnnnnnnnnnnnnnnnnnnnnnnnnnnnnnnnnnnnnnnnnnnnnnnnnnnnnnnnnnnnnnnnnnnnnnnnnnnnnnnnnnnnnnnnnnnnnnnnnnnnnnnnnnnnnnnnnnnnnnnnnnnnnnnnnnnnnnnnnnnnnnnnnnnnnnnnnnnnnnnnnnnnnnnnnnnnnnnnnnnnnnnnnnnnnnnnnnnnnnnnnnnnnnnnnnnnnnnnnnnnnnnnnnnnnnnnnnnnnnnnnnnnnnnnnnnnnnnnnnnnnnnnnnnnnaggctctggctacagttgtaccaggctgacacccgccggaagatcctcagctatgaacgccagtaccgcacatcagcagaaagaatggctgagctgagactccaggaagacctgcacattcttaaagatgcccaggttgtaggaatgacaaccacaggtg

SEQ ID NO: 27633 - DNA, 1000 bp, Macaca Mulatta
  misc_feature (1)...(1000): n = A,T,C or G
aggctgatgcggatagtttttacatggcatgcaatggccgtcagttcaactcaatagaaggtgacgtttgccagctactgtatgtggaaagagctgaagtgctcaaatctgaagatnnnnnnnnnnnnnnnnnnnnnnnnnnnnnnnnnnnnnnnnnnnnnnnnnnnnnnnnnnnnnnnnnnnnnnnnnnnnnnnnnnnnnnnnnnnnnnnnnnnnnnnnnnnnnnnnnnnnnnnnnnnnnnnnnnnnnnnnnnnnnnnnnnnnnnnnnnnnnnnnnnnnnnnnnnnnnnnnnnnnnnnnnnnnnnnnnnnnnnnnnnnnnnnnnnnnnnnnnnnnnnnnnnnnnnnnnnnnnnnnnnnnnnnnnnnnnnnnnnnnnnnnnnnnnnnnnnnnnnnnnnnnnnnnnnnnnnnnnnnnnnnnnnnnnnnnnnnnnnnnnnnnnnnnnnnnnnnnnnnnnnnnnnnnnnnnnnnnnnnnnnnnnnnnnnnnnnnnnnnnnnnnnnnnnnnnnnnnnnnnnnnnnnnnnnnnnnnnnnnnnnnnnnnnnnnnnnnnnnnnnnnnnnnnnnnnnnnnnnnnnnnnnnnnnnnnnnnnnnnnnnnnnnnnnnnnnnnnnnnnnnnnnnnnnnnnnnnnnnnnnnnnnnnnnnnnnnnnnnnnnnnnnnnnnnnnnnnnnnnnnnnnnnnnnnnnnnnnnnnnnnnnnnnnnnnnnnnnnnnnnnnnnnnnnnnnnnnnnnnnnnnnnnnnnnnnnnnnnnnnnnnnnnnnnnnnnnnnnnnnnnnnnnngtgcactcagctaaacacgaaagtggccaaactcaccaacgagctcaaagaggagcaggaaatgaacaagtgtttgcgagccaaccaagtcctcttgcagaacaagttaaaagaggaggagagggtgttgaaagagacctgtgaccaaaaagatctgcagatcaccgagatccaggagcagctgcgtgatgtcatgttatacctggagacacagcag

SEQ ID NO: 27634 - DNA, 3581 bp, Macaca Mulatta
  misc_feature (1)...(3581): n = A,T,C or G
accgattgaagcaacagagaaatctaagaaagtggagaagagtaatcgagggtttaaaaacataccaaactcgaaggaggcacctgtgaacctttgtaaacctagtttaggaaaatcagcaaccaaaacgaataccccaataggttgcaaagttagaaaaactgaaattataagttacccaagaccaaacttcaagaatgtcaaagcaaaagttatgtctagaccagtgttgcagtccagagatgctgctttatctaagaacacacccagacctcagctgaccggtgcctcatcacaaaacatcagtggtttcctcaagacagccaacagtcttgagcagaacaccaagagctgacttgaatgcagacaaaaaagcagaaattctaattaacaagacgcataagcagcagtttaataaactcattactggccaggctgtgcatgttacaactcatgctaaaaatgcttcacacagggttccaagaannnnnnnnnnnnnnnnnnnnnnnnnnnnnnnnnnnnnnnnnnnnnnnnnnnnnnnnnnnnnnnnnnnnnnnnnnnnnnnnnnnnnnnnnnnnnnnnnnnnnnnnnnnnnnnnnnnnnnnnnnnnnnnnnnnnnnnnnnnnnnnnnnnnnnnnnnnnnnnnnnnnnnnnnnnnnnnnnnnnnnnnnnnnnnnnnnnnnnnnnnnnnnnnnnnnnnnnnnnnnnnnnnnnnnnnnnnnnnnnnnnnnnnnnnnnnnnnnnnnnnnnnnnnnnnnnnnnnnnnnnnnnnnnnnnnnnnnnnnnnnnnnnnnnnnnnnnnnnnnnnnnnnnnnnnnnnnnnnnnnnnnnnnnnnnnnnnnnnnnnnnnnnnnnnnnnnnnnnnnnnnnnnnnnnnnnnnnnnnnnnnnnnnnnnnnnnnnnnnnnnnnnnnnnnnnnnnnnnnnnnnnnnnnnnnnnnnnnnnnnnnnnnnnnnnnnnnnnnnnnnnnnnnnnnnnnnnnnnnnnnnnnnnnnnnnnnnnnnnnnnnnnnnnnnnnnnnnnnnnnnnnnnnnnnnnnnnnnnnnnnnnnnnnnnnnnnnnnnnnnnnnnnnnnnnnnnnnnnnnnnnnnnnnnnnnnnnnnnnnnnnnnnnnnnnnnnnnnntggtaatgccgctgtcatcaaatatgaggagaaacctccaaaaccagcatttcaaaatggttcctcaggatccttttatttgaagcctttggtatccagggctcatgttcacttgctgaaaactcctccaaaaggtnnnnnnnnnnnnnnnnnnnnnnnnnnnnnnnnnnnnnnnnnnnnnnnnnnnnnnnnnnnnnnnnnnnnnnnnnnnnnnnnnnnnnnnnnnnnnnnnnnnnnnnnnnnnnnnnnnnnnnnnnnnnnnnnnnnnnnnnnnnnnnnnnnnnnnnnnnnnnnnnnnnnnnnnnnnnnnnnnnnnnnnnnnnnnnnnnnnnnnnnnnnnnnnnnnnnnnnnnnnnnnnnnnnnnnnnnnnnnnnnnnnnnnnnnnnnnnnnnnnnnnnnnnnnnnnnnnnnnnnnnnnnnnnnnnnnnnnnnnnnnnnnnnnnnnnnnnnnnnnnnnnnnnnnnnnnnnnnnnnnnnnnnnnnnnnnnnnnnnnnnnnnnnnnnnnnnnnnnnnnnnnnnnnnnnnnnnnnnnnnnnnnnnnnnnnnnnnnnnnnnnnnnnnnnnnnnnnnnnnnnnnnnnnnnnnnnnnnnnnnnnnnnnnnnnnnnnnnnnnnnnnnnnnnnnnnnnnnnnnnnnnnnnnnnnnnnnnnnnnnnnnnnnnnnnnnnnnnnnnnnnnnnnnnnnnnnnnnnnnnnnnnnnnnnnnnnnnnnnnnnnnnnnnnnnnnnnnnnnnnnnnnnnnnnnnnnnnnnnnnnnnnnnnnnnnnnnnnnnnnnnnnnnnnnnnnnnnnnnnnnnnnnnnnnnnnnnnnnnnnnnnnnnnnnnnnnnnnnnnnnnnnnnnnnnnnnnnnnnnnnnnnnnnnnnnnnnnnnnnnnnnnnnnnnnnnnnnnnnnnnnnnnnnnnnnnnnnnnnnnnnnnnnnnnnnnnnnnnnnnnnnnnnnnnnnnnnnnnnnnnnnnnnnnnnnnnnnnnnnnnnnnnnnnnnnnnnnnnnnnnnnnnnnnnnnnnnnnnnnnnnnnnnnnnnnnnnnnnnnnnnnnnnnnnnnnnnnnnnnnnnnnnnnnnnnnnnnnnnnnnnnnnnnnnnnnnnnnnnnnnnnnnnnnnnnnnnnnnnnnnnnnnnnnnnnnnnnnnnnnnnnnnnnnnnnnnnnnnnnnnnnnnnnnnnnnnnnnnnnnnnnnnnnnnnnnnnnnnnnnnnnnnnnnnnnnnnnnnnnnnnnnnnnnnnnnnnnnnnnnnnnnnnnnnnnnnnnnnnnnnnnnnnnnnnnnnnnnnnnnnnnnnnnnnnnnnnnnnnnnnnnnnnnnnnnnnnnnnnnnnnnnnnnnnnnnnnnnnnnnnnnnnnnnnnnnnnnnnnnnnnnnnnnnnnnnnnnnnnnnnnnnnnnnnnnnnnnnnnnnnnnnnnnnnnnnnnnnnnnnnnnnnnnnnnnnnnnnnnnnnnnnnnnnnnnnnnnnnnnnnnnnnnnnnnnnnnnnnnnnnnnnnnnnnnnnnnnnnnnnnnnnnnnnnnnnnnnnnnnnnnnnnnnnnnnnnnnnnnnnnnnnnnnnnnnnnnnnnnnnnnnnnnnnnnnnnnnnnnnnnnnnnnnnnnnnnnnnnnnnnnnnnnnnnnnnnnnnnnnnnnnnnnnnnnnnnnnnnnnnnnnnnnnnnnnnnnnnnnnnnnnnnnnnnnnnnnnnnnnnnnnnnnnnnnnnnnnnnnnnnnnnnnnnnnnnnnnnnnnnnnnnnnnnnnnnnnnnnnnnnnnnnnnnnnnnnnnnnnnnnnnnnnnnnnnnnnnnnnnnnnnnnnnnnnnnnnnnnnnnnnnnnnnnnnnnnnnnnnnnnnnnnnnnnnnnnnnnnnnnnnnnnnnnnnnnnnnnnnnnnnnnnnnnnnnnnnnnnnnnnnnnnnnnnnnnnnnnnnnnnnnnnnnnnnnnnnnnnnnnnnnnnnnnnnnnnnnnnnnnnnnnnnnnnnnnnnnnnnnnnnnnnnnnnnnnnnnnnnnnnnnnnnnnnnnnnnnnnnnnnnnnnnnnnnnnnnnnnnagctttgacttgtccctatctatacattctctgtatcttttgggggtaacttcttggcagtttttcagtgttcagccatgtcagttgaaactagatttttctgtagagtttttacttacccatgtgagcctaacaaacactatcctattattcgttttctcaggctatgtgtaaatgtagaatcctaatttttctannnnnnnnnnnnnnnnnnnnnnnnnnnnnnnnnnnnnnnnnnnnnnagtaccaatgggtttttccgccttatttttaccttgatcgatccttgcagatttaacctgtcttcttctctcccattattttcattttcctttttacctttctccaccatccagagccacaaaagcaaaccttctacctcctacgtacgtttctctgggataaggataaaggaatatgattttccagagccccagagccag

SEQ ID NO: 27635 - DNA, 240 bp, Macaca Mulatta
tctaataaaattgtggaagctccatgtttagaaataaatgaaaacacctgagctggtggctgtgtactttggtacatggaggctattttaatccttctaactaaactaaaatagaataaagaaattaaactaaaatagaagtaaagctagacaaaggcccagaaatcatattgtaaggaaatattggaagctgattcccagagcagaccacatatacagcaggatatgtctgtggcatga

SEQ ID NO: 27636 - DNA, 1304 bp, Macaca Mulatta
  misc_feature (1)...(1304): n = A,T,C or G
nagccttgagaatctgaggaatggagactcagatccgcagagagggtctcgggtgcagccctgccagcatcaagaggaagaagaagaaggaggactcaggacaccttggactccaggnnnnnnnnnnnnnnnnnnnnnnnnnnnnnnnnnnnnnnnnnnnnnnnnnnnnnnnnnnnnnnnnnnnnnnnnnnnnnnnnnnnnnnnnnnnnnnnnnnnnnnnnnnnnnnnnnnnnnnnnnnnnnnnnnnnnnnnnnnnnnnnnnnnnnnnnnnnnnnnnnnnnnnnnnnnnnnnnnnnnnnnnnnnnnnnnnnnnnnnnnnnnnnnnnnnnnnnnnnnnnnnnnnnnnnnnnnnnnnnnnnnnnnnnnnnnnnnnnnnnnnnnnnnnnnnnnnnnnnnnnnnnnnnnnnnnnnnnnnnnnnnnnnnnnnnnnnnnnnnnnnnnnnnnnnnnnnnnnnnnnnnnnnnnnnnnnnnnnnnnnnnnnnnnnnnnnnnnnnnnnnnnnnnnnnnnnnnnnnnnnnnnnnnnnnnnnnnnnnnnnnnnnnnnnnnnnnnnnnnnnnnnnnnnnnnnnnnnnnnnnnnnnnnnnnnnnnnnnnnnnnnnnnnnnnnnnnnnnnnnnnnnnnnnnnnnnnnnnnnnnnnnnnnnnnnnnnnnnnnnnnnnnnnnnnnnnnnnnnnnnnnnnnnnnnnnnnnnnnnnnnnnnnnnnnnnnnnnnnnnnnnnnnnnnnnnnnnnnnnnnnnnnnnnnnnnnnnnnnnngaaatggtgggtagtgtcatcaaaaattacaagnactactttcctttcattttcaaggaatcttccgagtacatgcagctgatctttggcaatgacgtgaagggagtggtcctcnccggtcattcctatgtccttgtcacctccctgggcctctcctatgatggcatgctggttgatgacctgagcaagcccaagacggacctcctaataattgtcctgtgtgtgatctacatggagggcaactgtgccccagaggaggttatgtgggaagccctgaatgtgatagagatgtatgctgggtgggagcacttcatctatggggagcccaggaagctgctcacccaggattgggtgcaggaaaattacctggagtactggcaggtgcccagaagtgatcctgcatgctatgagttcctgtggggtccaagggcccatgctgaaaccagcaagaagaaagtcttggagtacgtgaccaagatcagtggaagagaactcacttcatacccattcctgtatgaagaggatttgagagaggaggaagagagag

SEQ ID NO: 27637 - DNA, 510 bp, Macaca Mulatta
  misc_feature (1)...(510): n = A,T,C or G
gaagaaagcccataaaaagatgcataagcaccannnnnnnnnnnnnnccacgagcatggcaaacattcctcctcttccctctcttcttccatcagtgattctgactgaatacaggccctggacccttctctcaagtctcaccagttctgctctcccatcaagcttcagaggccatgttgtactgggaaaagtagcccttgtgctctccacccctacccccacctgagcctcaccttgctgttcagccctgagcggctagggaaaatgggaagaggattgccatggcctggccatcttcttgctgcttggatagatcatatagctaatgagtttagcaagggaactagtttttgaaggtgatgagctaaatattgaagacaagtttgagatctgaaaaacgtggttttttacttctgcttataatacttgtgattggggaggtttgtggaaatttaattatgatgaaaaacctctatcttttttgtaatgttggcatacttggggaattta

SEQ ID NO: 27638 - DNA, 706 bp, Macaca Mulatta
cttgtattaaatgtttcctttgtattctcagggtgaattaatgttataatatttaaaattacaaaatagattgttaactgttacactatggcattggaattttaactctctgtatttactggtatgagaggactatctacaagggtaatatttctgattaccttggttgacagaaacctccagcagtctttgaaacatctcaaatgactctagttattgattgcttttaacggtattatggtactgttggtagtcatagtggctgtctatagaacaatcttcaaactgagccatgcttcaggggagggaaaggggctaaagtctcttctgttggtaatgcattagttactcctgaaacgataaaatccaacagaaaggaagagaaagctactgtatattacagtaaagaaaactgcatagttattttaaatttaatggaggtgaatatggttaatatctacaactacttctgcttgagaataggaagagtattgttttaaaacatattctacccaactagagagttcttttaaaatgattggccatatgaacatttgtaatcttgccattaggcttggacctgccatattttattttattctaggatcctaaatagttccttttaatagtctaaaagtatttatcaatactaggcagactttaaagaaattactttgtaaacctgctgactacctgtatgtattgt

SEQ ID NO: 27639 - DNA, 1128 bp, Macaca Mulatta
  misc_feature (1)...(1128): n = A,T,C or G
atttgttaacttacaatagccaaaagagctttacagaagggaaaataaaatacacatccattttagaaaagccctttttgtttctctaaatcagaggccccctctagtgtttgaaagcagtctcaggcaacacacaatgcaattgcagtaaacagtcacagcattttaccccagacctttcaaaacaaaaggcatgcttctgttccattcaagtggcacaaaaatcaatgagagaaaaatagctaatcataattaatattgcaaattcctgctatgattcacagattcattatcctctcattcagtaatttctttattatttactgctgggttattttttagaagattaatactctgttaannnnnnnnnnnnnnnnnncatagggactttaatttccctaataagaaatatatctcatttaaaatgacagaaaattaatgttaccatatatcctactctgctttgatggaagttattggtaacttcctaaagtatatacttaattatatttggaaatcagaactttttaaagtacatatattttgaaattcaacctaatctgtgactttgctaaaactttttcagtactctgtaaaaggaggtgggaagcgttgctttgaggacaaatgttggctgtgaagaatatgatataaaggaactcttagagtttatacagacatggcactgaataaattcaataactgaatctcgtgcactttgaaaaagattgactgaaattagggggagtaaaaaatagttgattttcactccattttttcagctaatgtctttatgtgtctgtttccatgttctattacagagggtttaagctgacagctagtattactataactggaaaataaaaacaaatctctaattttaacaaaataacacaatgcaaacttgaggaagaaaccaacagagaaaactatattaagctaatacttcatgttcttaaaagttataagtacactgagaatttgaaaattcaatagctcttgaaacaaatttaatctgtattaactttatttaaacaaatgaccaatcttgtcaccaaacatgacatatggcttctctgcactgatcttactttgttttcaaacttgtcacttgcaaatattataaga

SEQ ID NO: 27640 - DNA, 890 bp, Macaca Mulatta
  misc_feature (1)...(890): n = A,T,C or G
gcctctggcacctgccccagcccaggattcgactcgggcctccactccaggcagccctctctcccccaccgaagacgaacacttcttcgcactgctgactccaaccggggaggcagagactacctgccgtctccgtgcaacccatggctgccggaatcacacactcgtccagctggaccaatatgaaaaccatggcttagtgcccgatggtgnnnnnnnnnnnnnnnnnnnnnnnnnnnnnnnnnnnnnnnnnnnnnnnnnnnnnnnnnnnnnnnnnnnnnnnnnnnnnnnnnnnnnnnnnnnnnnnnnnnnnnnnnnnnnnnnnnnnnnnnnnnnnnnnnnnnnnnnnnnnnnnnnnnnnnnnnnnnnnnnnnnnnnnnnnnnnnnnnnnnnnnnnnnnnnnnnnnnnnnnnnnnnnnnnnnacagaacgccaggccttccagccctggcctgagaggcttagcaacaacgtggaagagctcctacaatcctccttgtccctgggaggccaggagcaagcgccagagcgcaggcaagagcaaggagtggagcatctggcaggagccgatgcaagaacacaagcaggaagaggggcgggaacaagaagagcnnnnnnnnnnnnnnnnnnnnnnnnnnnnnnnnnnnnnnnnnnnnnnnntaaggagggactggaggctgtgtctcagctgcagacagactcagagcccaagtttcactctgaatctttatcttctaacccttcctccttcactccccgggtgcgagaagtagagtctactcccatgatgatggagaacatccaggagctcattcggtcagcccagcaaatggatgaaatgaatgaaatatatgatgagaactcctactggagaaaccaaaaccctggcag

SEQ ID NO: 27641 - DNA, 896 bp, Macaca Mulatta
tggattgaagctatcaaaaagctaacatgacaaggacctgagggaaccaggattcctccctcctaccagatgacacagacaggaattcctggagaatgggagtgtgttaagacttttgacttctttgtaagtttcgtactgctttggagagtgaatgctgaagagttcctcagattacaaacagcaatgatgccatttccttcctcatcttcatgttacaaacctggaaaggctagaacagccattaggcgtcagcatcttgacttttccccagcatcacaaacagccatttcctcgggcaccaaagtaggttccctttgttggaacaattacactggccatgccatgttgaataaaactctcttcttatgcggttctctcttaacttctttggaattagtaaaagctgacatttgtttctggctattagagtcccatataaagttttatagttttcaagcaacatttcaagtatctctgtcattaagacatacttcatcttaaagtggggatggtggccaaactttgtacattcagagaatattgttttgctttagaaaacaagcctgcataaatattatacattacagaagtcatggactctgtcggagaacttaatcacatatatgaaaaatacatacatagcttttctatgaaaaatgggcatttagagatgcagagtaagagtgctctgaaggacagaaaaagatgtaaacggggaaggtttatatcaagacattaaattttggttttaaaatgaacataagctgagacaaataggtaccaagaaacttcaccggttgggaggttaatctgtagtgaaaagtctgtatcatacaatactttttaagaacatttttattccttttcagtttatacagtaatctggcacaagc

SEQ ID NO: 27642 - DNA, 1168 bp, Macaca Mulatta
  misc_feature (1)...(1168): n = A,T,C or G
cgagggctggattactctgctggtctccccatcccctggaggagagcaaagccatgggccggcccctgctgctgcccctgctgctgcccctgctgcccctgctgctgccgccagcatttctgcaacctggtggctccgcgagatccggtccaagcggcccttatggggtcactcaacgaaaacacctctcagcccctatgggtggctccgtggaaattcccttctccttctatcacccctgggagttagccgcagctcccaacatgaaaatatcctggagacggggcaacttccacggggagttcttctacagaacaaggccagctttcattcacgaggattactcgaaccggctccttctgaactggacagagggtcaggaccgcgggctcctcaggatctggaacctgcggaaggaggaccagtctgtgtatttctgccgagtcgagctggacacacggagatcagggaggcagcggtggcagtccatcaaggggaccaaactcaccatcacccaggctgtcacgaccaccacccagaggcccagcagcatgaccaccacccggaggcccagtagcgcaaccaccacagccggcctcagggtcacacaggtcaaacgacactcagactcttggcacctaagtctgaaaactgccgtgggggtgacagtggctgtcgctgtgctcggcctcatgactttggggactgatctgccttctcaagtggagaagaacgacaggtctgncgcggactaaagccacaaccccaggcaagtaaccttccaaaacagaagagccctatgagaaatccggattagggcgaatacgttccacccaaccaggagaaggatcatatccccggcctccatccccacaaaactctccaaccctgacgcaaaattttttgtgtaagacccacagggggaggaccttggtgctcacacaaannnnnnnnnnnnnnnnnnnnnnnngttttgtgtctctagtgggtgtgacatatacgatagcataaatgtggtgaatgtagcactagagcaggagcacacacgagggagggctagaaatatagaataggagaagaagtagataacagagactgacgacggaagaggataggcgagatggagaaagagggggcaaaaagagaataagagagagaaagctgtggg

SEQ ID NO: 27643 - DNA, 245 bp, Macaca Mulatta
atgactgaactaaaattttggctcttagcttcctggtggcaaagtaaagaggggagtaagtcagttagctttcttattgaaaagaaaaacacttagtggttcctcatggagagcaaagctttattagttcttccctttaaagaaaagggcttgtgttggggaggttgttacctaagagcagtagtttttcattatattgtaattttttttggtgttaaagcaaatactgaggcatatagaaatac

SEQ ID NO: 27644 - DNA, 3080 bp, Macaca Mulatta
  misc_feature (1)...(3080): n = A,T,C or G
gacacatatcagtattagctgaaacaataaagaagggaatacatgatgctgattccgaagcaagaatagaagccagaannnnnnnnnnnnnnnnnnnnnnnnnnnnnnnnnnnnnnnnnnnnnnnnnnnnnnnnnnnnnnnnnnnnnnnnnnnnnnnnnnnnnnnnnnnnnnnnnnnnnnnnnnnnnnnnnnnnnnnnnnnnnnnnnnnnnnnnnnnnnnnnnnnnnnnnnnnnnnnnnnnnnnnnnnnnnnnnnnnnnnnnnnnnnnnnnnnnnnnnnnnnnnnnnnnnnnnnnnnnnnnnnnnnnnnnnnnnnnnnnnnnnnnnnnnnnnnnnnnnnnnnnnnnnnnnnnnnnnnnnnnnnnnnnnnnnnnnnnnnnnnnnnnnnnnnnnnnnnnnnnnnnnnnnnnnnnnnnnnnnnnnnnnnnnnnnnnnnnnnnnnnnnnnnnnnnnnnnnnnnnnnnnnnnnnnnnnnnnnnnnnnnnnnnnnnnnnnnnnnnnnnnnnnnnnnnnnnnnnnnnnnnnnnnnnnnnnnnnnnnnnnnnnnnnnnnnnnnnnnnnnnnnnnnnnnnnnnnnnnnnnnnnnnnnnnnnnnnnnnnnnnnnnnnnnnnnnnnnnnnnnnnnnnnnnnnnnnnnnnnnnnnnnnnnnnnnnnnnnnnnnnnnnnnnnnnnnnnnnnnnnnnnnnnnnnnnnnnnnnnnnnnnnnnnnnnnnnnnnnnnnnnnnnnnnnnnnnnnnnnnnnnnnnnnnnnnnnnnnnnnnnnnnnnnnnnnnnnnnnnnnnnnnnnnnnnnnnnnnnnnnnnnnnnnnnnnnnnnnnnnnnnnnnnnnnnnnnnnnnnnnnnnnnnnnnnnnnnnnnnnnnnnnnnnnnnnnnnnnnnnnnnnnnnnnnnnnnnnnnnnnnnnnnnnnnnnnnnnnnnnnnnnnnnnnnnnnnnnnnnnnnnnnnnnnnnnnnnnnnnnnnnnnnnnnnnnnnnnnnnnnnnnnnnnnnnnnnnnnnnnnnnnnnnnnnnnnnnnnnnnnnnnnnnnnnnnnnnnnnnnnnnnnnnnnnnnnnnnnnnnnnnnnnnnnnnnnnnnnnnnnnnnnnnnnnnnnnnnnnnnnnnnnnnnnnnnnnnnnnnnnnnnnnnnnnnnnnnnnnnnnnnnnnnnnnnnnnnnnnnnnnnnnnnnnnnnnnnnnnnnnnnnnnnnnnnnnnnnnnnnnnnnnnnnnnnnnnnnnnnnnnnnnnnnnnnnnnnnnnnnnnnnnnnnnnnnnnnnnnnnnnnnnnnnnnnnnnnnnnnnnnnnnnaggttttcagtatgtttttggagactcttgtggattttataataattcataaggatgatttacaagactggctttttgttcttctcacacaattacttaagaaaatgggagcagatttacttggatctgtgcaagcaaaagttcaaaaggctctagatgtcacaagnnnnnnnnnnnnnnnnnnnnnnnnnnnnnnnnnnnnnnnnnnnnnnnnnnnnnnnnnnnnnnnnnnnnnnnnnnnnnnnnnnnnnnnnnnnnnnnnnnnnnnnnnnnnnnnnnnnnnnnnnnnnnnnnnnnnnnnnnnnnnnnnnnnnnnnnnnnnnnnnnnnnnnnnnnnnnnnnnnnnnnnnnnnnnnnnnnnnnnnnnnnnnnnnnnnnnnnnnnnnnnnnnnnnnnnnnnnnnnnnnnnnnnnnnnnnnnnnnnnnnnnnnnnnnnnnnnnnnnnnnnnnnnnnnnnnnnnnnnnnnnnnnnnnnnnnnnnnnnnnnnnnnnnnnnnnnnnnnnnnnnnnnnnnnnnnnnnnnnnnnnnnnnnnnnnnnnnnnnnnnnnnnnnnnnnnnnnnnnnnnnnnnnnnnnnnnnnnnnnnnnnnnnnnnnnnnnnnnnnnnnnnnnnnnnnnnnnnnnnnnnnnnnnnnnnnnnnnnnnnnnnnnnnnnnnnnnnnnnnnnnnnnnnnnnnnnnnnnnnnnnnnnnnnnnnnnnnnnnnnnnnnnnnnnnnnnnnnnnnnnnnnnnnnnnnnnnnnnnnnnnnnnnnnnnnnnnnnnnnnnnnnnnnnnnnnnnnnnnnnnnnnnnnnnnnnnnnnnnnnnnnnnnnnnnnnnnnnnnnnnnnnnnnnnnnnnnnnnnnnnnnnnnnnnnnnnnnnnnnnnnnnnnnnnnnnnnnnnnnnnnnnnnnnnnnnnnnnnnnnnnnnnnnnnnnnnnnnnnnnnnnnnnnnnnnnnnnnnnnnnnnnnnnnnnnnnnnnnnnnnnnnnnnnnnnnnnnnnnnnnnnnnnnnnnnnnnnnnnnnnnnnnnnnnnnnnnnnnnnnnnnnnnnnnnnnnnnnnnnnnnnnnnnnnnnnnnnnnnnnnnnnnnnnnnnnnnnnnnnnnnnnnnnnnnnnnnnnnnnnnnnnnnnnnnnnnnnnnnnnnnnnnnnnnnnnnnnnnnnnnnnnnnnnnnnnnnnnnnnnnnnnnnnnnnnnnnnnnnnnnnnnnnnnnnnnnnnnnnnnnnnnnnnnnnnnnnnnnnnnnnnnnnnnnnnnnnnnnnnnnnnnnnnnnnnnnnnnnnnnnnnnnnnnnnnnnnnnnnnnnnnnnnnnnnnnnnnnnnnnnnnnnnnnnnnnnnnnnnnnnnnnnnnnnnnnnnnnnnnnnnnnnnnnnnnnnnnnnnnnnnnnnnnnnnnnnnnnnnnnnnnnnnnnnnnnnnnnnnnnnnnnnnnnnnnnnnnnnnnnnnnnnnnnnnnnnnnnnnnnnnnnnnnnnnnnnnnnnnnnnnnnnnnnnnnnnnnnnnnnnnnnnnnnnnnnnnnnnnnnnnnnnnnnnnnnnnnnnnnnnnnnnnnnnnnnnnnnnnnnnnnnnnnnnnnnnnnnnnnnnnnnnnnnnnnnnnnnnnnnnnnnnnnnnnnnnnnnnnnnnnnnnnnnnnnnnnnnnnnnnnnnnnnnnnnnnnnnnnnnnnnnnnnnnnnnnnnnnnnnnnnnnnnnnngggttatgacaacaccgaaagtagcgtgcgcaaggccagcgtgttttgcttggtggcaatttattccgtaatcggagaagacctgaaacctcaccttgcacagctcacagggagcaag

SEQ ID NO: 27645 - DNA, 640 bp, Macaca Mulatta
  misc_feature (1)...(640): n = A,T,C or G
gggattaactgtgttatttttatacactttttaagccttaactcgccattgatttaccagtttaacgtttcctggggtttcttttcccatggggttctctgcccccacccccagccctttgtttgacttgcgtcgtctgatactcagtattgtagctttttgtccgcatgttactccctgtaaatacgctgttatacatactgttaacacccctttgctttttctatgggacctccaggccaccatatttagaactagttaccttannnnnnnnnnnnnnnnagnnnnnnnnnnnnnnnnnnnnnnnnnnnnnnnnnnnnnnnnnnnnnnnnnnnnnnnnnnnnnnnnnnnnnnnnnnnnnnnnnnnnnnnnnnnnnnnnnnnnnngataggccccaaaaaaccttataaaaactttctattcgtcccgttagacccaaaaggcaattggccttggccaccgcgcctccccaagaatacaaggatatgattggggcgaggaaggcccgcataaaaaaaacaagaaggccccgagcctccaaacattcaaaagcattatgagtttttacggataaagacgggccccagggacgtgaaccaataacacctggcgcacttgcattatgaaaatcagaaacttt

SEQ ID NO: 27646 - DNA, 392 bp, Macaca Mulatta
aagctcaaaagcactatagaaatgtgactgatactgtttatctgtgaccttcatattataaagatcatgcccaagaagccagcacaagcagaagaaggaaatgatttgaagggagtgtcagaaacatcgggtccaaaaaatgatgggaaacagctgtgccccccggggaaagcaaatacctctgagaagactaacaagagatctggtaagaggaaacagtttgggaacaacccctctggcttccctggctatgttcaggtgtggggactgggtgtatggcatggatcccagacaagcctgggtccaggctgggctgaggagctcacccagctccagatgagatgctagacatgacttccagagacacagactggagttgtcatccatataaa

SEQ ID NO: 27647 - DNA, 170 bp, Macaca Mulatta
  misc_feature (1)...(170): n = A,T,C or G
cagacacctgcttctgattccacaaggagctttttcctcaaccctgtggccatctttgaagtgactnnnnnnnnaatgtatttatgtatgtatttgattgttttatataagatggtttcttacctttgagcacaaaatgtccatggtgaaataaagtcaacattataagc

SEQ ID NO: 27648 - DNA, 153 bp, Macaca Mulatta
ttttaagcatgtttctgagtgttgcttcacataagctttcaattttaaataacacaatccatttatttcactaggcgtctttatttgcttaaagtgaagaatcagagattgtcattgtgttgtaaataagtctaacctttatttccctttaca

SEQ ID NO: 27649 - DNA, 144 bp, Macaca Mulatta
gctctttgagatatcagtgcctttgacatcagtacctgaattagtgcctgttaaagttgccaatcatacaggttgtaagtgcttgccgacagtcccgcgccatccatactcaattatcagaagatccatccaggtccctgaaga

SEQ ID NO: 27650 - DNA, 1514 bp, Macaca Mulatta
  misc_feature (1)...(1514): n = A,T,C or G
tggatcaagcaacttgatctttttcttcataacttgccgactgaccccgtgacagcaaaacccggcagaagctcggtgacctgtcaccctgagtctgcaggtagngccgccgcccgccgcccgccgccatggggctgaaggccgcccagaagacgctgttcccgctgcgctccatcgacgacgtggtgcgcctgtttgctgccgagctgggccgagaggagccggacctggtgctcctttccttggtgctgggcttcgtggagcattttctggctgtcaaccgcgtctccccaccaacgtnnnnnnnnnnnnnnnnnnnnnnnnnnnnnnnnnnnnnnnnnnnnnnnnnnnnnnnnnnnnnnnnnnnnnnnnnnnnnnnnnnnnnnnnnnnnnnnnnnnnnnnnnnnnnnnnnnnnnnnnnnnnnnnnnnnnnnnnnnnnnnnnnnnnnnnnnnnnnnnnnnnnnnnnnnnnnnnnnnnnnnnnnnnnnnnnnnnnnnnnnnnnnnnnnnnnnnnnnnnnnnnnnnnnnnnnnnnnnnnnnnnnnnnnnnnnnnnnnnnnnnnnnnnnnnnnnnnnnnnnnnnnnnnnnnnnnnnnnnnnnnnnnnnnnnnnnnnnnnnnnnnnnnnnnnnnnnnnnnnnnnnnnnnnnnnnnnnnnnnnnnnnnnnnnnnnnnnnnnnnnnnnnnnnnnnnnnnnnnnnnnnnnnnnnnnnnnnnnnnnnnnnnnnnnnnnnnnnnnnnnnnnnnnnnnnnnnnnnnnnnnnnnnnnnnnnnnnnnnnnnnnnnnnnnnnnnnnnnnnnnnnnnnnnnnnnnnnnnnnnnnnnnnnnnnnnnnnnnnnnnnnnnnnnnnnnnnnnnnnnnnnnnnnnnnnnnnnnnnnnnnnnnnnnnnnnnnnnnnnnnnnnnnnnnnnnnnnnnnnnnnnnnnnnnnnnnnnnnnnnnnnnnnnnnnnnnnnnnnnnnnnnnnnnnnnnnnnnnnnnnnnnnnnnnnnnnnnnnnnnnnnnnnnnnnnnnnnnnnnnnnnnnnnnnnnnnnnnnnnnnnnnnnnnnnnnnnnnnnnnnnnnnnnnnnnnnnnnnnnnnnnnnnnnnnnnnnnnnnnnnnnnnnnnnnnnnnnnnnnnnnnnnnnnnnnnnnnnnnnnnnnnnnnnnnnnnnnnnnnnnnnnnnnnnnnnnnnnnnnnnnnnnnnnnnnnnnnnnnnnnnnnnnctacaactactgccgggaagacgaggagatctacaaggagttcttcgaagtagccaatgatgtcatccccaacctgctgaaggaggcagccagcttgctggaggcgggcgaggagcggccgggggagcagagccaggnagggcacccagagccaaggttctgccctccaggaccctgagtgcttcgcccacctgctgcgattctacgacggcatctgcaaatgggaggagggcagtcccacacctgtgctgcacgtgggctgggccacctttcttgtgcagtccctaggccgtttcgagggacaggtg

SEQ ID NO: 27651 - DNA, 94 bp, Macaca Mulatta
atcatgagcgtcttgttgttcatcgagcactccatagaggtggcccatggcaaggcgtcctgcaagctctcgaagatgggctacctcaggatcg

SEQ ID NO: 27652 - DNA, 520 bp, Macaca Mulatta
  misc_feature (1)...(520): n = A,T,C or G
gtgtggggacgctcaggtgccggcgtggggccccctcggaggctgtgaatcttttggacccccgaatgtaaatgggagatgnnnnnnnnnnnnnnnnnnnnnnnnnnnnnnnnnnnnnnnnnnnnnnnnnnnnnnnnnnnnnnnnnnnnnnnnnnnnnnnnnnnnnnnnnnnnnnnnnnnnnnnnnnnnnnnnnnnnnnnnnnnnnnnnnnnnnnnnnnnnnnnnnnnnnnnnnnnnnnnnnnnnnnnnnnnnnnnnnnnnnnnnnnnnnnnnnnnnnnnnnnnnnnnnnnagagtacccagagaaggagaagccagcaaaggcgacgacacagacaagacctcagagatcaaataggaggccccttaatatcctggaataatgtgacccatccccttaatcagtgagtctcatccacccacttgccagcttctactggcagcaagtagaagctaagtcctggctcaaatctcttccctccctctcccagctgtcagtgcttttggacttgtgctcaggt

SEQ ID NO: 27653 - DNA, 290 bp, Macaca Mulatta
aagtaggcggagaaaggcgaggaggaccggcgggccaagctttcctagcctgacggtagccacttcggaacgtacgtcccagccctctttagctacttagcgcctccgggcccgggagcacctgcgccttggcgcagtctggcgccaacggcatcccggaagtgtacttcccagagacgtcacacgggatacttccggttcccgctcttggggttgaactctcacgtgcaggagccggtcctcgctgggctctagcaggcttctgaaggaggagctactcctttgggagg

SEQ ID NO: 27654 - DNA, 1049 bp, Macaca Mulatta
ccccagagtttccctgaaagtcctcaaagccctcctgaggggcctgcccaggctcctctctatagtcctcagagccctcctgaggggatggactgccagtctcctcgccagagacctcaaagtcctcctgagggagaggattccttgtctcctctctacattcctcattgtcttcctgaatgggaggagtccctgtcttctcgccggtttcctcatagtcctcctgtgaggaaggcctccctgtctcctctccagattcctccgtgtcctcctgacggggaggattcccagtctcctctccagactcctcaaagtcctcctgagggcgaggactccctgtctcctctccagattcctcagagtcctcctgagggggaggactccctgtctcctctccagatttcccagagccctcctgagggtgaggccgtccagtctcctctccagaatcctgcgagttccctcttcccctccactttattgagtgttttccagagttcccctgagagtactcaaagtccttttgagggttttccccagtctcctctccagattcctgtgacctcctccttcccctccactttattgcgtgttttccagagttcccctgagagttctcagagtccttttgagggttttccccagtctcctccccagattcctgtgagctcctccttctcctccactttattgagtcttttccagagttcctctgagagttctcagagtccttttgaaggttttccccagtctcctctccagattcctgtgagcgcctccttctccactttattgaggcttttccagagttcgcctgagagttctcaaagtccttttgagggttttccccagtctcctccccagattcctgtgacctcctccttcccctctactttactgaggcttttccagagttcccctgagagtactcaaagtccttttgagggttttccccagtctcctccccagtttactgcgagctcctccttctcatctactttattgcgtgttttctagagttcccctgagagttctcaaagtacttttga

SEQ ID NO: 27655 - DNA, 753 bp, Macaca Mulatta
  misc_feature (1)...(753): n = A,T,C or G
gacagaaggggcggctgctgaagcctggaaattcccctgaaggtagagcaccgcccaacccctctgggtcccagcctccctcaaggcctcctccacctccacctccaccccacccggcctggcgtccacctcttcggctcctacctgggcacgatccagttaaatggctgataagcagatcagncagcctgccagccaagctcatcaatggcggcatcgccgggctgatcggggtcacctgcgtgttccccatcgacctggccaagaccaggctgcagaaccagcagaacggccagcgcatgtacacaagcatgtnnnnnnnnnnnnnnnnnnnnnnnnnnnnnnnnnnnnnnnnnnnnnnnnnnnnnnnnnnnnnnnnnnnnnnnnnnnnnnnnnnnnnnnnnnnnnnnnnnnnnnnnnnnnnnnnnnnnnnnnnnnnnnnnnnnnnnnnnnnnnnnnggcagaagctgaccctgcttaaagagatgctggcaggctgtggggctggcacctgccaggtgatcgtgaccacgcccatggagatgctgaagatccagctgcaggatgcagggcgcannnngcccagaggaagatcctggctgcccagggccagctctcagcccaggggggtgcccagcccgcagtggaggctccagctgcccctcggcctacggccacccagctgacccgtgacctgctgcgaagccgcggcattgctggtctctacaagggactcggggccacgctgctcag

SEQ ID NO: 27656 - DNA, 432 bp, Macaca Mulatta
caagacagctatgggtcaagcagtgggtacagtcagcaggcgagtttggggccatcctcagatgagtttggccaacagcctactggccccacttcctttaccaatcagatttaacagagtagcatttgcattcttctggagatcacctcaccaccttccatttcagtggcagaagaattttttaagagtttcaatcaattattaatgcagagagtattgaatgtaaatcagagatctctagtcttcattaaggcagaaagtcctgggttgtgataaatgacacttagagatgagatgacatgaggagatatattattcatcatagattgctaattggagagtaccttgttatatatacagatactttcatggtcattttgtatgtgtgttaaagtagtagaagtattttgtagcttaaagtctctagtatgt

SEQ ID NO: 27657 - DNA, 525 bp, Macaca Mulatta
cctatgatgatgtcgtcagctttgtgccaccgcccctcgaccaagaagagatggagtcctgagcacctggtttctgttctgtcgatcccacttcactgtgaggggaaggcctttcacgggaactctccaaatatcattcaagtgcctcttgtgcagagattcctccatggtggaagggggtgtgtgtgcgcgtgttagtgtgtgtgcatgtgtgtgtctgtctttgtgggaaggtaagacaatatgaacaaactatgatcacagtgactttacatgaggttgtggtgactttacatgaggttgtggatgcttcagggcagcctccaccttgctcttctttctgagagttggctcaggcaggcaagctgctgtctttttaggaatatgttcaatgcaaagtaaaaaaatatgaattgtccccaatcctggtcatgcttttgccactttggcttctcctgtgacccccaccttgacggtggggcatagacttgacaacatcccacagtggcacaagagaaggcccac

SEQ ID NO: 27658 - DNA, 620 bp, Macaca Mulatta
  misc_feature (1)...(620): n = A,T,C or G
caatagaagctggcttccgccatattgattctgcttatttatacaacaatgaggagcaagttggactggccatccgaagcaagattgcagacggcagtgtgaagagagaagacatattctacacttcaaannnnnnnnnnnnnnnnnnnnnnnnnnnnnnnnnnnnnnnnnnnnnnnnnnnnnnnnnnnnnnnnnnnnnnnnnnnnnnnnnnnnnnnnnnnnnnnnnnnnnnnnnnnnnnnnnnngccaggtgagacgccactaccaaaagatgaaaatggaaaagtaatgttcgacacagtggatctctgtgccatatgggaggtatggagaagtgtaaggatgcaggaatggccaagtccatcggggtgtcaaacttcaaccgcagacagctggagatgatcctcaacaacccaggactcaagtacaagcccgtctgcaaccaggtngaatgtcatacttacctcaaccagagaaaactgctggatttttgcaagtcagaagacattgttctggttgcccgtagtgctctgggannnnnnnnnnnnnnnnnnnnntggaccaaaactccccggttctcttggaggaccagtcctttgtgccttggcaaaaaagcacaa

SEQ ID NO: 27659 - DNA, 545 bp, Macaca Mulatta
accacagacaattgccaaagtttccatctgaggaaggtgtttggaggttgccttttggacctaccactttgctcattcttgctaacctagtctaggtgacctacagtgcagtccatttaagtcaatggttgttaaaagaagtttcccgtgttgtaaatcatgtttcccttatcagatcatttgcaaacacatttaaatgatctcatggtaaatgttgatgtattttttggcttattttgtgtacgaacataatagagactcagctccttttatttattttgttgatttatggatcaaattctaaaataaagttgcctgttgtgatttttgtcccatctactatatacttagtgctgagatccttgtaaaatgttttgatgaaaatatatatgtagggtccaattgcattatacatacatttcaaagtgttgaaccttcttaaatgcctactcattcagcttacacaggctgaagccaagtatgacaaagaagggaaggaccaaaaacaaagaattattttaaagagaactcttgtctcttttgca

SEQ ID NO: 27660 - DNA, 975 bp, Macaca Mulatta
  misc_feature (1)...(975): n = A,T,C or G
gggtagaagcactggggtgggggcggaattggggttactcaatgtaagggattccttgtggttgtgttgggatccagtgcagttgtgatttctgtggatcccagcttggttccaggaattttgtgtgattgggttacatccagttttcaatcttcgacagctgggctagaacgtgaactcagtagctgaacctacctgactgagtcacgttctaggatcctcagaactctttactcttgtgggggtgggggtggcaccccctgtcgcgagcggccgtcgccgcgtcgctgggcttgcggcccctccctttctcggcactcccctgtcccccttccgtttcctccccctctcgctcctcgcccccttctccgtccgggcgcccccctccctggacgcttctcgggcttttacccgccccctgtccctgcctccgccccccacccgttcctgtcgtttccccccccccgcctccccgccgctcctattttttgcacccgtcccttggtcctgccgtgccctcctcccccgtactgggacacactactgccggttgggcgtagcccacacgttaccttttttttcctcttccccccccccgcgcgtatccctgcgtttttctcccgggtccccgcgttctcgccgtccccctttcccccttttcgtccccctccccctttcctttctctcgtcccccgccccctctttgtaccccatcaccttttttcctccctttcccccgccgaattcttccgccgccgctcccgctttttccgttttccgtttcccccccgantttgttgccctggtctgatccacgctgtttctgaccccacctcattctcgcttccctatcccggtccttctaatatccgcgcctcgcttatcccacctgtcggtattaagccactgactatgattctctccccactccccctttgcttttatcgcgctgttccgccgggggggaccgggggg

SEQ ID NO: 27661 - DNA, 354 bp, Macaca Mulatta
tcccttcatatttttaacttattaaatcttctattattatgtactatgatttattcctactaaaacataaattattcaatttggggagctattaaattttgatgttgcctcagttattttcattaataacttttgctaaaatttaccttttaaaaattctgaaatttggggttggtattgcaaaatgaattgaacgggtggtgctttaatgagagaagtaaaagaatatatgcctcctgtgtacttttggagaaaactgaagatttagtttccatttttctttataataaaatatttgagccactgtataaacgtgagggtgcacatgtcaagtacttagctaaaatcaacaaa

SEQ ID NO: 27662 - DNA, 1950 bp, Macaca Mulatta
  misc_feature (1)...(1950): n = A,T,C or G
atgttttggaaatttgatcttcattcatcatcccacatagacacacttctagaaagagaagatgtaacactgaaggagttaatggatgaggaagatgttttacaggaatgtaaagcccagaaccgcaaacttatagagtttctgttaaaagcagaatgtctcgaagatttagtctcattcattatagaagaaccacctcaagacatggatgaaaagatcagatacaagtnnnnnnnnnnnnnnnnnnnnnnnnnnnnnnnnnnnnnnnnnnnnnnnnnnnnnnnnnnnnnnnnnnnnnnnnnnnnnnnnnnnnnnnnnnnnnnnnnnnnnnnnnnnnnnnnnnnnnnnnnnnnnnnnnnnnnnnnnnnnnnnnnnnnnnnnnnnnnnnnnnnnnnnnnnnnnnnnnnnnnnnnnnnnnnnnnnnnnnnnnnnnnnnnnnnnnnnnnnnnnnnnnnnnnnnnnnnnnnnnnnnnnnnnnnnnnnnnnnnnnnnnnnnnnnnnnnnnnnnnnnnnnnnnnnnnnnnnnnnnnnnnnnnnnnnnnnnnnnnnnnnnnnnnnnnnnnnnnnnnnnnnnnnnnnnnnnnnnnnnnnnnnnnnnnnnnnnnnnnnnnnnnnnnnnnnnnnnnnnnnnnnnnnnnnnnnnnnnnnnnnnnnnnnnnnnnnnnnnnnnnnnnnnnnnnnnnnnnnnnnnnnnnnnnnnnnnnnnnnnnnnnnnnnnnnnnnnnnnnnnnnnnnnnnnnnnnnnnnnnnnnnnnnnnnnnnnnnnnnnnnnnnnnnnnnnnnnnnnnnnnnnnnnnnnnnnnnnnnnnnnnnnnnnnnnnnnnnnnnnnnnnnnnnnnnnnnnnnnnnnnnnnnnnnnnnnnnnnnnnnnnnnnnnnnnnnnnnnnnnnnnnnnnnnnnnnnnnnnnnnnnnnnnnnnnnnnnnnnnnnnnnnnnnnnnnnnnnnnnnnnnnnnnnnnnnnnnnnnnnnnnnnnnnnnnnnnnnnnnnnnnnnnnnnnnnnnnnnnnnnnnnnnnnnnnnnnnnnnnnnnnnnnnnnnnnnnnnnnnnnnnnnnnnnnnnnnnnnnnnnnnnnnnnnnnnnnnnnnnnnnnnnnnnnnnnnnnnnnnnnnnnnnnnnnnnnnnnnnnnnnnnnnnnnnnnnnnnnnnnnnnnnnnnnnnnnnnnnnnnnnnnnnnnnnnnnnnnnnnnnnnnnnnnnnnnnnnnnnnnnnnnnnnnnnnnnnnnnnnnnnnnnnnnnnnnnnnnnnnnnnnnnnnnnnnnnnnnnnnnnnnnnnnnnnnnnnnnnnnnnnnnnnnnnnnnnnnnnnnnnnnnnnnnnnnnnnnnnnnnnnnnnnnnnnnnnnnnnnnnnnnnnnnnnnnnnnnnnnnnnnnnnnnnnnnnnnnnnnnnnnnnnnnnnnnnnnnnnnnnnnnnnnnnnnnnnnnnnnnnnnnnnnnnnnnnnnnnnnnnnnnnnnnnnnnnnnnnnnnnnnnnnnnnnnnnnnnnnnnnnnnnnnnnnnnnnnnnnnnnnnnnnnnnnnnnnnnnnnnnnnnnnnnnnnnnnnnnnnnnnnnnnnnnnnnnnnnnnnnnnnnnnnnnnnnnnnnnnnnnnnnnnnnnnnnnnnnnnnnnnnnnnnnnnnnnnnnnnnnnnnnnnnnnnnnnnnnnnnnnnnnnnnnnnnnnnnnnnnnnnnnnnnnnnnnnnnnnnnnnnnnnnnnnnnnnnnnnnnnnnnnnnnnnnnnnnnnnnnnnnnnnnnnnnnnnnnnnnnnnnnnnnnnnnnnnnnnnnnnnnnnnnnnnnnnnnnnnnnnnnnnnnnnncacccaactggtcagctaactttgatgtcccaatggaaactacccacggtgctccactggactctgtgggatctgacgtctggagcacagaggagccaatgccaacgaaagagacaggctgggcttctttttcagagttcacgtcttccctga

SEQ ID NO: 27663 - DNA, 5429 bp, Macaca Mulatta
  misc_feature (1)...(5429): n = A,T,C or G
atggtttcagaaggaagtgcagcaggaagagactttgcaggaatggaagaggtgaggcagctccatgtgagattctgcaaaaggattaagatttggcaccaggcttggtttctgtgcagcctcttaggcagagagccccaggagagggaagcaggctgtcagctgtgcctttgcacgctctcagctgccttgaaggttggttggctcttcccgctctctggggtacccaattttaccttgttaaaggatggatgtggatgctggaggcttaaagaagaccagnnnnnnnnnnnnnnnnnnnnnnnnnnnnnnnnnnnnnnnnnnnnnnnnnnnnnnnnnnnnnnnnnnnnnnnnnnnnnnnnnnnnnnnnnnnnnnnnnnnnnnnnnnnnnnnnnnnnnnnnnnnnnnnnnnnnnnnnnnnnnnnnnnnnnnnnnnnnnnnnnnnnnnnnnnnnnnnnnnnnnnnnnnnnnnnnnnnnnnnnnnnnnnnnnnnnnnnnnnnnnnnnnnnnnnnnnnnnnnnnnnnnnnnnnnnnnnnnnnnnnnnnnnnnnnnnnnnnnnnnnnnnnnnnnnnnnnnnnnnnnnnnnnnnnnnnnnnnnnnnnnnnnnnnnnnnnnnnnnnnnnnnnnnnnnnnnnnnnnnnnnnnnnnnnnnnnnnnnnnnnnnnnnnnnnnnnnnnnnnnnnnnnnnnnnnnnnnnnnnnnnnnnnnnnnnnnnnnnnnnnnnnnnnnnnnnnnnnnnnnnnnnnnnnnnnnnnnnnnnnnnnnnnnnnnnnnnnnnnnnnnnnnnnnnnnnnnnnnnnnnnnnnnnnnnnnnnnnnnnnnnnnnnnnnnnnnnnnnnnnnnnnnnnnnnnnnnnnnnnnnnnnnnnnnnnnnnnnnnnnnaggtgagctcctgggtgacgtggctgatcctcaccggcaggctgcatggagggagaggcgagaagtcttttcatatttggtgcatgtggccaagtgctgctggaacatgggcaactacaacgctgtcatggagttcttggctggcctcaggtnnnnnnnnnnnnnnnnnnnnnnnnnnnnnnnnnnnnnnnnnnnnnnnnnnnnnnnnnnnnnnnnnnnnnnnnnnnnnnnnnnnnnnnnnnnnnnnnnnnnnnnnnnnnnnnnnnnnnnnnnnnnnnnnnnnnnnnnnnnnnnnnnnnnnnnnnnnnnnnnnnnnnnnnnnnnnnnnnnnnnnnnnnnnnnnnnnnnnnnnnnnnnnnnnnnnnnnnnnnnnnnnnnnnnnnnnnnnnnnnnnnnnnnnnnnnnnnnnnnnnnnnnnnnnnnnnnnnnnnnnnnnnnnnnnnnnnnnnnnnnnnnnnnnnnnnnnnnnnnnnnnnnnnnnnnnnnnnnnnnnnnnnnnnnnnnnnnnnnnnnnnnnnnnnnnnnnnnnnnnnnnnnnnnnnnnnnnnnnnnnnnnnnnnnnnnnnnnnnnnnnnnnnnnnnnnnnnnnnnnnnnnnnnnnnnnnnnnnnnnnnnnnnnnnnnnnnnnnnnnnnnnnnnnnnnnnnnnnnnnnnnnnnnnnnnnnnnnnnnnnnnnnnnnnnnnnnnnnnnnnnnnnnnnnnnnnnnnnnnnnnnnnnnnnnnnnnnnnnnnnnnnnnnnnnnnnnnnnnnnnnnnnnnnnnnnnnnnnnnnnnnnnnnnnnnnnnnnnnnnnnnnnnnnnnnnnnnnnnnnnnnnnnnnnnnnnnnnnnnnnnnnnnnnnnnnnnnnnnnnnnnnnnnnnnnnnnnnnnnnnnnnnnnnnnnnnnnnnnnnnnnnnnnnnnnnnnnnnnnnnnnnnnnnnnnnnnnnnnnnnnnnnnnnnnnnnnnnnnnnnnnnnnnnnnnnnnnnnnnnnnnnnnnnnnnnnnnnnnnnnnnnnnnnnnnnnnnnnnnnnnnnnnnnnnnnnnnnnnnnnnnnnnnnnnnnnnnnnnnnnnnnnnnnnnnnnnnnnnnnnnnnnnnnnnnnnnnnnnnnnnnnnnnnnnnnnnnnnnnnnnnnnnnnnnnnnnnnnnnnnnnnnnnnnnnnnnnnnnnnnnnnnnnnnnnnnnnnnnnnnnnnnnnnnnnnnnnnnnnnnnnnnnnnnnnnnnnnnnnnnnnnnnnnnnnnnnnnnnnnnnnnnnnnnnnnnnnnnnnnnnnnnnnnnnnnnnnnnnnnnnnnnnnnnnnnnnnnnnnnnnnnnnnnnnnnnnnnnnnnnnnnnnnnnnnnnnnnnnnnnnnnnnnnnnnnnnnnnnnnnnnnnnnnnnnnnnnnnnnnnnnnnnnnnnnnnnnnnnnnnnnnnnnnnnnnnnnnnnnnnnnnnnnnnnnnnnnnnnnnnnnnnnnnnnnnnnnnnnnnnnnnnnnnnnnnnnnnnnnnngggtgagagtggagaggcaactgacgacgagatggcaacccgaaaggccaagatgcacaaagagtgtcgaagccggagtggttctgatcctcaagacattaatgaacaagaagaatcagncagaggcgaataccatcgctagcccgccaaaccccctcccttccagaagagcccactctttgaccacagctggggtcccccaacttggctgccgggacgtcatctcccatcaggccagtgtcctcccctgtgctgccttcttcaaacaagagcccgtccagncagtgcttggagcagtagtagctggcacggacggatcaaaggcggcatgaagggatttcagagcttcatggtttcagacagcaacatgagttttgttgaatttgttgagctgttcaaatcgttcagnnnnnnnnnnnnnnnnnnnnnnnnnnnnnnnnnnnnnnnnnnnnnnnnnnnnnnnnnnnnnnnnnnnnnnnnnnnnnnnnnnnnnnnnnnnnnnnnnnnnnnnnnnnnnnnnnnnnnnnnnnnnnnnnnnnnnnnnnnnnnnnnnnnnnnnnnnnnnnnnnnnnnnnnnnnnnnnnnnnnnnnnnnnnnnnnnnnnnnnnnnnnnnnnnnnnnnnnnnnnnnnnnnnnnnnnnnnnnnnnnnnnnnnnnnnnnnnnnnnnnnnnnnnnnnnnnnnnnnnnnnnnnnnnnnnnnnnnnnnnnnnnnnnnnnnnnnnnnnnnnnnnnnnnnnnnnnnnnnnnnnnnnnnnnnnnnnnnnnnnnnnnnnnnnnnnnnnnnnnnnnnnnnnnnnnnnnnnnnnnnnnnnnnnnnnnnnnnnnnnnnnnnnnnnnnnnnnnnnnnnnnnnnnnnnnnnnnnnnnnnnnnnnnnnnnnnnnnnnnnnnnnnnnnnnnnnnnnnnnnnnnnnnnnnnnnnnnnnnnnnnnnnnnnnnnnnnnnnnnnnnnnnnnnnnnnnnnnnnnnnnnnnnnnnnnnnnnnnnnnnnnnnnnnnnnnnnnnnnnnnnnnnnnnnnnnnnnnnnnnnnnnnnnnnnnnnnnnnnnnnnnnnnnnnnnnnnnnnnnnnnnnnnnnnnnnnnnnnnnnnnnnnnnnnnnnnnnnnnnnnnnnnnnnnnnnnnnnnnnnnnnnnnnnnnnnnnnnnnnnnnnnnnnnnnnnnnnnnnnnnnnnnnnnnnnnnnnnnnnnnnnnnnnnnnnnnnnnnnnnnnnnnnnnnnnnnnnnnnnnnnnnnnnnnnnnnnnnnnnnnnnnnnnnnnnnnnnnnnnnnnnnnnnnnnnnnnnnnnnnnnnnnnnnnnnnnnnnnnnnnnnnnnnnnnnnnnnnnnnnnnnnnnnnnnnnnnnnnnnnnnnnnnnnnnnnnnnnnnnnnnnnnnnnnnnnnnnnnnnnnnnnnnnnnnnnnnnnnnnnnnnnnnnnnnnnnnnnnnnnnnnnnnnnnnnnnnnnnnnnnnnnnnnnnnnnnnnnnnnnnnnnnnnnnnnnnnnnnnnnnnnnnnnnnnnnnnnnnnnnnnnnnnnnnnnnnnnnnnnnnnnnnnnnnnnnnnnnnnnnnnnnnnnnnnnnnnnnnnnnnnnnnnnnnnnnnnnnnnnnnnnnnnnnnnnnnnnnnnnnnnnnnnnnnnnnnnnnnnnnnnnnnnnnnnnnnnnnnnaggtttatgatatgaactggggagaagaattttatcttgatcagaataaaaagaaaagcagacagaatgcaccagagctttctgaccttgtaatctattgtcaagcagtaaaatttccaggnnnnnnnnnnnnnnnnnnnnnnnnnnnnnnnnnnnnnnnnnnnnnnnnnnnnnnnnnnnnnnnnnnnnnnnnnnnnnnnnnnnnnnnnnnnnnnnnnnnnnnnnnnnnnnnnnnnnnnnnnnnnnnnnnnnnnnnnnnnnnnnnnnnnnnnnnnnnnnnnnnnnnnnnnnnnnnnnnnnnnnnnnnnnnnnnnnnnnnnnnnnnnnnnnnnnnnnnnnnnnnnnnnnnnnnnnnnnnnnnnnnnnnnnnnnnnnnnnnnnnnnnnnnnnnnnnnnnnnnnnnnnnnnnnnnnnnnnnnnnnnnnnnnnnnnnnnnnnnnnnnnnnnnnnnnnnnnnnnnnnnnnnnnnnnnnnnnnnnnnnnnnnnnnnnnnnnnnnnnnnnnnnnnnnnnnnnnnnnnnnnnnnnnnnnnnnnnnnnnnngatctccctttacatttaaatgctgcaatgtttgaggcaaatggtggttgtggttatgttttgaaacctccagttctgtgggacaagaactgcccgatgtatcagaagttttctccactggaaagagatttggacagcatggatcctgtagtctattctttaactnnnnnnnnnnnnnnnnnnnnnnnnnnnnnnnnnnnnnnnnnnnnnnnnnnnnnnnnnnnnnnnnnnnnnnnnnnnnnnnnnnnnnnnnnnnnnnnnnnnnnnnnnnnnnnnnnnnnnnnnnnnnnnnnnnnnnnnnnnnnnnnnnnnnnnnnnnnnnnnnnnnnnnnnnnnnnnnnnnnnnnnnnnnnnnnnnnnnnnnnnnnnnnnnnnnnnnnnnnnnnnnnnnnnnnnnnnnnnnnnnnnnnnnnnnnnnnnnnnnnnnnnnnnnnnnnnnnnnnnnnnnnnnnnnnnnnnnnnnnnnnnnnnnnnnnnnnnnnnnnnnnnnnnnnnnnnnnnnnnnnnnnnnnnnnnnnnnnnnnnnnnnnnnnnnnnnnnnnnnnnnnnnnnnnnnnnnnnnnnnnnnnnnnnnnnnnnnnnnnnnnnnnnnnnnnnnnnnnnnnnnnnnnnnnnnnnnnnnnnnnnnnnnnnnnnnnnnnnnnnnnnnnnnnnnnnnnnnnnnnnnnnnnnnnnattctgacaactgaacaagacatcaaacctgttaccacagactattttttgatggaagaaaaatattttatatctaaagaaaagaatgaatgcaggaaacaaccattccagagagccattggtccagaagaggagatcgtgcaaattttaagcagctggtttccagaagagggatatgtgggcaggattctcttaaaaacccagcaggaa

SEQ ID NO: 27664 - DNA, 2035 bp, Macaca Mulatta
  misc_feature (1)...(2035): n = A,T,C or G
gctctatgcttctttgcgcctcagccggcaggcggaggcccgagcccaactgtatttacccaccacctccccgcctcatgaagggttagacggcttagcccaagaattgagtcgaagcttgtcagtcggattggaaaacaacttgaagaaaaaggnnnnnnnnnnnnnnnnnnnnnnnnnnnnnnnnnnnnnnnnnnnnnnnnnnnnnnnnnnnnnnnnnnnnnnnnnnnnnnnnnnnnggatcccctcattcctggcgctggctcagagagacgggaagaggactcctttgacagtgatagcacagccaccttgctcaannnnnnnnnnnnnnnnnnnnnnnnnnnnnnnnnnnnnnnnnnnnnnnnnnnnnnnnnnnnnnnnnnnnnnnnnnnnnnnnnnnnnnnnnnnnnnnnnnnnnnnnnnnnnnnnnnnnnnnnnnnnnnnnnnnnnnnnnnnnnnnnnnnnnnnnnnnnnnnnnnnnnnnnnnnnnnnnnnnnnnnnnnnnnnnnnnnnnnnnnnnnnnnnnnnnnnnnnnnnnnnnnnnnnnnnnnnnnnnnnnnnnnnnnnnnnnnnnnnnnnnnnnnnnnnnnnnnnnnnnnnnnnnnnnnnnnnnnnnnnnnnnnnnnnnnnnnnnnnnnnnnnnnnnnnnnnnnnnnnnnnnnnnnnnnnnnnnnnnnnnnnnnnnnnnnnnnnnnnnnnnnnnnnnnnnnnnnnnnnnnnnnnnnnnnnnnnnnnnnnnnnnnnnnnnnnnnnnnnnnnnnnnnnnnnnnnnnnnnnnnnnnnnnnnnnnnnnnnnnnnnnnnnnnggaggaggaaaggcaagctctgaccctgagcttggaggcagaacagcagcggtgctgtgccctgcaggaagagcgggatgcagctcgggctgggcaactgagtgagcatcgtgagttagagactcttcgggctgccatagaagaagaacggcagacctgggcccagcaagagcaccagcttaaggaacactaccaggcgctgcaggaggagaaccaggctcagttggaaagggagaaggnaggagaagagccagagggaagcccaggccgcctgggaggcccagcaccagttggcgctggtgcagtctgaggtgcggcggctggaaggagagctggatacagctcgnnnnnnnnnnnnnccctgcagctggaaatgagcttggcgcaggnnnnnnnnnnnnnnnnnnnnnnnnnnnnnnnnnnnnnnnnnnnnnnnnnnnnnnnnnnnnnnnnnnnnnnnnnnnnnnnnnnnnnnnnnnnnnnnnnnnnnnnnnnnnnnnnnnnnnnnnnnnnnnnnnnnnnnnnnnnnnnnnnnnnnnnnnnnnnnnnnnnnnnnnnnnnnnnnnnnnnnnnnnnnnnnnnnnnnnnnnnnnnnnnnnnnnnnnnnnnnnnnnnnaacagcaggtggctgaggactacgagctcagntcagactggcccgggagcaagcgcgagtgcgcgaactgcagagtgggaaccagcagctggaagagcagcgggtggagctggtggaaagactgcaggccatgctgcaggcccactgggatgaggccaaccagctgctcagcaccactctcccaccgcccaaccctnnnnnnnnnnnnnnnnnnnnnnnnnnnnnnnnnnnnnnnnnnnnnnnnnnnnnnnnnnnnnnnnnnnnnnnnnnnnnnnnnnnnnnnnnnnnnnnnnnnnnnnnnnnnnnnnnnnnnnnnnnnnnnnnnnnnnnnnnnnnnnnnnnnnnnnnnnnnnnnnnnnnnnnnnnnnnnnnnnnnnnnnnnnnnnnnnnnnnnnnnnnnnnnnnnnnnnnnnnnnnnnnnnnnnnnnnnnnnnnnnnnnnnnnnnnnnnnnnnnnnagctggggccttctctgcacttggggccttccatcccgaccatagggcagaaaggccattccctgaggaagatcctggacccgacggggagggcctcctaaagcaagggctgccgcctgctcagctggagggcctcaagaattttttgcacca

SEQ ID NO: 27665 - DNA, 883 bp, Macaca Mulatta
ggggcagttcggcggtcccgcgggtctgtctcttgcttcaacagtgtttggacggaacagatccggggactctttcttccagcctccgagcgccctccgatttcctctccacttgcaacctccgggaccatcttctcggccatctcctgcttctgggacctgccagcaccgtttttgtggttagctccgtcttgccgaccaaccatgagctcccagattcgtcagaattattccaccgacgtggaggcagccgtcaacagcctggtcaatatgtacctgcaggcctcctacacctacctctctctgggcttctatttcgaccgcgatgatgtggctctggaaggcgtgagccacttcttccgcgaattggccgaggagaagcgcgagggctacgagcgtctcctgaagatgcaaaaccagcgtggcggccgcgctctttttcaggacgtcaagaagccagctgaagatgattggggtaaaaccccgggatgccatgaaagcccgccatgggccctggagaaaaaactgaatcacggccgctttgttggaatcttccgggcgctgtggtttctggcccacaagggatccccattctctggtgactttcctgggagactcctctttccctagatgagggaagttgaagcctcatccaaataggatggggttgaacaaccttgagccaaacctcttaaaagggttggacccggtcccgtaagggctggggtcctggggcaacgatctctctcctcccaaagggtcccatccttccatgctttccccccacagagcttgttttgaacccccaccggcaccatttgtaatggcgccgccgtgcggacacgagccagtcaggggcagccctcgaactcaagcctgcccc

SEQ ID NO: 27666 - DNA, 131 bp, Macaca Mulatta
caatggaacaggagtagttccagggtgccaggagctgagaagcctggagtgggggtgtgtgcattggaggaaatgatcctgacatccctcaccccctaaggatccagcacagaaacgccagacatcctgat

SEQ ID NO: 27667 - DNA, 231 bp, Macaca Mulatta
  misc_feature (1)...(231): n = A,T,C or G
gaatgacatgaaggccaagcaggaggctctggtgaaggagcgggagaagcagctggccaagaaggagcagtccaaggagctgcagatgaagctggagaagcttcgagagaaggagcgtaagaaggaagccaagcggaagatctccagcctgtccttcacccnnnnnnnnnnnnnnnnnnnnnnnnnnnnnnnnnnnnnnnnnnnatgtatgaggaggagatggaaagggaa

SEQ ID NO: 27668 - DNA, 2692 bp, Macaca Mulatta
  misc_feature (1)...(2692): n = A,T,C or G
acagtgaaagtccaaggcaatgatatctcccacaagcttcagatttccaaagtgaggaaaaaggatgaaggcttatacgagtgcagggtgactgatgccaactacggggagcttcaggaacacaaggcccaggcctatctgaaagtcaatgccaacagccatgcccgcagaatgcaggccttcgaagcctctcccatgtggctgcaggatatgaagccccgcaagaacgcctctgcagccgtccccagcagcatccatggctctgccaaccaacgaacgcactccacctccagccctcaagcggtagccaaaatgcccaaacaaagtccacaatcaggtatggaaacccatttcgagccttttattttaccactcacgaaccctccacagaaaggtcagtcgtatagagtagacacatttgtgaatgatggtttttaaaatcggagacctagttcagtgcaagtgattatgagannnnnnnnnnnnnnnnnnnnnnnnnnnnnnnnnnnnnnnnnnnnnnnnnnnnnnnnnnnnnnnnnnnnnnnnnnnnnnnnnnnnnnnnnnnnnnnnnnnnnnnnnnnnnnnnnnnnnnnnnnnnnnnnnnnnnnnnnnnnnnnnnnnnnnnnnnnnnnnnnnnnnnnnnnnnnnnnnnnnnnnnnnnnnnnnnnnnnnnnnnnnnnnnnnnnnnnnnnnnnnnnnnnnnnnnnnnnnnnnnnnnnnnnnnnnnnnnnnnnnnnnnnnnnnnnnnnnnnnnnnnnnnnnnnnnnnnnnnnnnnnnnnnnnnnnnnnnnnnnnnnnnnnnnnnnnnnnnnnnnacctcagctgcgtgtgatgatgataatggaacgtcagagaggggattgaagacagtaagtggtgcagagataccgtaactcctgtgaatgtgccttccaggccaatttagaagcttagtcacaggattctgaaggcagctgtgcaagttaaagctgttctgaatggcattaatgtatgcagtcattcagccaatggaaatgcatagaagttttaaccttgatgtgggataaaggctccgtggaatgagcggaaccctgcacaaccccgcggccatcacgatttcctcaaacacatgacatgggatgaagggagcacaaacataccgacttcatccttctttaggtttttccctnaagaagtattgatgctaccatcagtaatggaaaattacattgctaatattatttaagatttcttcagccattaaattaaaaagtctgattacttcaccaggatgatttctgagatctcatctcatatcatcctgaatacnnnnnnnnnnnnnnnnnnnnnnnnnnnnnnnnnnnctcagaaatcatcctaatcaaatatagactttaatatgtatatcaaatatatatatacatgtagaaatacatataggtttgtatctttaagtccttgcttgtgaacaatgcttttaaatgtttttaaaatactgtatgccaaaataggttttctgttaatgctttacttcctaatggatgtgatttgcacatttgtagggcacttggattagggttctctgagtttgccctgccttataatgtagacgagcaactctcctggcatgccttggtcattgcaatttatgtcagtctgatgaatagatggcttagcctctctgannnnnnnnnnnnnnnnnnnnnnnnnnnnnnnnnnnnnnnnnnnnnnnnnnnnnnnnnnnnnnnnnnnnnnnnnnnnnnnnnnnnnnnnnnnnnnnnnnnnnnnnnnnnnnnnnnnnnnnnnnnnnnnnnnnnnnnnnnnnnnnnnnnnnnnnnnnnnnnnnnnnnnnnnnnnnnnnnnnnnnnnnnnnnnnnnnnnnnnnnnnnnnnnnnnnnnnnnnnnnnnnnnnnnnnnnnnnnnnnnnnnnnnnnnnnnnnnnnnnnnnnnnnnnnnnnnnnnnnnnnnnnnnnnnnnnnnnnnnnnnnnnnnnnnnnnnnnnnnnnnnnnnnnnnnnnnnnnnnnnnnnnnnnnnnnnnnnnnnnnnnnnnnnnnnnnnnnnnnnnnnnnnnnnnnnnnnnnnnnnnnnnnnnnnnnnnnnnnnnnnnnnnnnnnnnnnnnnnnnnnnnnnnnnnnnnnnnnnnnnnnnnnnnnnnnnnnnnnnnnnnnnnnnnnnnnnnnnnnnnnnnnnnnnnnnnnnnnnnnnnnnnnnnnnnnnnnnnnnnnnnnnnnnnnnnnnnnnnnnnnnnnnnnnnnnnnnnnnnnnnnnnnnnnnnnnnnnnnnnnnnnnnnnnnnnnnnnnnnnnnnnnnnnnnnnnnnnnnnnnnnnnnnnnnnnnnnnnnnnnnnnnnnnnnnnnnnnnnnnnnnnnnnnnnnnnnnnnnnnnnnnnnnnnnnnnnnnnnnnnnnnnnnnnnnnnnnnnnnnnnnnnnnnnnntgaaatacctcaaaatatttaatttcaatatttccaaccagtgaatactggatcatatttttatatacttctatcgacattttctaatttctatttcagaagctggggcagtccagccactgacttgtgtgtaagttcctatacttgcacaattattatatataattcagtatcggggtggatatttatgtattatattcactgtaatacccacatcctgatttatgatttttgccttaaaattttcagattatattcaaataaagcttatttcaat

SEQ ID NO: 27669 - DNA, 996 bp, Macaca Mulatta
  misc_feature (1)...(996): n = A,T,C or G
gcaggtgctggtcacaggagaacagctgatggtccctgtggaagtcctggaagtagatatcgaggggtccttgtggaagtttctggtctcaggagcaatggctggggcgatgtctcgcacaggcacggctcctctggacagagccaaagtgtacatgcaggnnnnnnnnnnnnnnnnnnnnnnnnnnnnnnnnnnnnnnnnnnnnnnnnnnnnnnnnnnnnnnnnnnnnnnnnnnnnnnnnnnnnnnnnnnnnnnnnnnnnnnnnnnnnnnnnnnnnnnnnnnnnnnnnnnnnnnnnnnnnnnnnnnnnnnnnnnnnnnnnnnnnnnnnnnnnnnnnnnnnnnnnnnnnnnnnnnnnnnnnnnnnnnnnnnnnnnnnnnnnnnnnnnnnnnnnnnnnnnnnnnnnnnnnnnnnnnnnnnnnnnnnnnnnnnnnnnnnnnnnnnnnnnnnnnnnnnnnnnnnnnnnnnnnnnnnnnnnnnnnnnnnnnnnnnnnnnnnnnnnnnnnnnnnnnnnnnnnnnnnnnnnnnnnnnnnnnnnnnnnnnnnnnnnnnnnnnnnnnnnnnnnnnnnnnnnnnnnnnnnnnnnnnnnnnnnnnnnnnnnnnnnnnnnnnnnnnnnnnnnnnnnnnnnnnnnnnnnnnnnnnnnnnnnnnnnnnnnnnnnnnnnnnnnnnnnnnnnnnnnnnnnnnnnnnnnnnnnnnnnnnnnnnnnnnnnnnnnnnnnnnnnnnnnnnnnnagataccgtggagggctcaaatcccaccatgcgcggagtcctccagcggatcctggcccagcagggctggctagggctgtaccgaggcatgacccccacgctactgaaggtcttaccagcaggtggcatcagctatgtggtgtacgaagccatgaagaaaaccctgggcgtataggctgtgagctggacgacacagcctaggcagaaatgggacaggaggacctgatgaccacaggcctcaaagagccctcaaggcctcaag

SEQ ID NO: 27670 - DNA, 845 bp, Macaca Mulatta
  misc_feature (1)...(845): n = A,T,C or G
gggcccgtccaaagtggactctggattaatcagcatcaaaatgggagaaatgaaacatgtttcccccacccccaggactccgtgtgtttgcatgactactgagttgactccctctggctgtgagcagtacctcccggtcctttcagggaaatgggctcaattcacacaaaaggaagtaaagcctacaaatcaagtcaaaaggtagagctctttaaatatttatttactggccaggcgtggtgactcgcgtctgtaatcccagtactttggagaggccaatgcagatggatcgcttgaaatcaggagttgaagaccaacctggcctgggtgacagagacctcctcttaaagaaataaagacagcaaggggaggggagagagagagaganagggaagaaagcaggaagaaaggacagaaaagaaggagtcagaaaagagcaaatcttgaatattnnnnnnnnnnnnnnnnnnnnnngtctgtaatggaagagttaaaaggtgaggtttaacaagtctcccagagagaaaaggagatgggaaataggaccgaaaagagaataaacaggagaatttgaagatgaattttagaagctccacctttccattttcagtaattcctaaaaaagaaatgaagaattttttcccaaaaaatgaaagggggggaagttttccagaaatgaaaaacatcccccaaagggctcgcgggtcacaataataggccaaaaatatttctacaccccagaaaccctagcggaaataaaaaaggggaaagaaatcccaaaaaggttttttnnnnnnnnnnnnnnnnnngggcctaatatcacaacaaactttgggaattccgan

SEQ ID NO: 27671 - DNA, 782 bp, Macaca Mulatta
  misc_feature (1)...(782): n = A,T,C or G
cctcggccagccctgtctgccaccaggaggatgaaggtctccgtggctgtcctctcctgcctcatgcttgttactgcccttggatcccaggcccaggtcacaaatgatgcagagacagggttcatgatgtcaaagctttcactggcaaattcagaagttctggacagctttcacgctattaatgctgactgctgcacctcctacatcccaggaagcatcccgtgttcactcttggagagttaccttgaaacaagcagcaagtgccccaagccgggtgtcatcttcctcaccaagaacgggcgacgtttatgtgtcagtcctagtaataagcaagttctggcttgcaggataatgctgaagctggccacacggatcaaggccaggaagaactgaacttgtcaaggcaaagggacgcaagttgccagctaccaactttcttgcctcaactaccttcctgaattatttttttaagaagcatttattcttgtgttctggatttaaagcaattcatctaataaagagtttctcnnnnnnnnnnnnnnnnnnnnnnnnnncgtgccgattcggcacgagggtcagttccttcccacctnnnnnnnnnnnnnnnnnnnnnnnnnnnnnnnnngttgaattctattttatttttaattctctcttctcctccagacacaatggcactgcttatctccgaaatggtgtgatcgtctcctcattgagcagcggctaccaccgcgctgtgggtagtgtgtgaccgtggctgtactgtatagtgaacatagttg

SEQ ID NO: 27672 - DNA, 145 bp, Macaca Mulatta
gcggagatccagcactgtttggtcaacgctggcgatgtggggtgtggcgtgtttgaatgtttcgagaacaattcttgtgagattcggggcttacatgggatttgcatgacttttctgcacaacgctggaaaatttgatgcccagg

SEQ ID NO: 27673 - DNA, 738 bp, Macaca Mulatta
  misc_feature (1)...(738): n = A,T,C or G
ggggaactataaatggaaagaaagttttgatttccttttttgtttgatgggcagtatgccatattatacccaaagttggtttaaaaaatatttccatcaacnnnnnnnnnnnnnnnnnncatttgagggaagttaccaaggcagcttttttcctcaaaagtaacctgttcctctttggaatagcacattttaggggcatggttaataactgagatttttactcagtaaatcctggtggttactgtgtgtaaaatatctttaagtaagattgaaggcctctgtggggaataaaatattaccaaagtctataaaaataaattttacatgttctcttttatgacagagagcagcactggttctgttatttttaaaatgaataattgatttcttgataggtgtttaatatttcttccctcactgctgattcttagatagaaaccattcttgatatttgatagactgttttcagaaaacccttatcaacaagtgtacaatacttatctaaaactgtacatttagaatggagcagttcaatactagatctcagaagtttggaaaatagcaaagaagactggatttggaaaggatggtctacagttgcttgtcaaattctgaagctatgaagaataaatgttttaactttggattatgaaaccccannnnnnnnnnnnnnnnnnncaccttgaaaataaaaaatggtttaaaactaaaatttttggttccagtggaacgtttaac

SEQ ID NO: 27674 - DNA, 655 bp, Macaca Mulatta
aagccttttgaatgcagtgaatgtggaaaatccttctgtaaaaagtcaatattcatcatccaccagagggctcacacaggagagaaaccttatgaatgtaatgtatgtgggaaatccttcagccaaaagggaaccctcactgtacatcggagatcacacttagaggagaagccctataaatgtaatgaatgtgggaaaaccttttgtcagaagttacacctcactcagcacctaagaactcattcaggagagaaaccctacgaatgtagtgaatgtgggaaaaccttctgccaaaagacacatctcaccctacaccagaggaatcattcaggagagaggccctatccatgtaacgaatgtgggaaatccttctcccgcaagtccgcactcagtgatcatcagagaactcacacaggagagaagctttataaatgtaatgaatgtgggaaatcctactaccgaaagtctaccctgattacacatcagagaacacacacgggagagaagccctatcagtgtagcgagtgtgggaaattcttttctcgggtgtcatacctcactatacattatagaagtcatttagaagagaaaccctatgaatgtaatgaatgtggcaaaactttcaatttaaattcagccttcattagacatcgga

SEQ ID NO: 27675 - DNA, 149 bp, Macaca Mulatta
agacgttaaaaaatggcccaggggttatgcaggttctaggtttggttcttgcctttggcaactacatgaatggaggaaataagactcgaggacaggcagatggctttggattagacattcttccaaaactgaaagatgtcaagagcagt

SEQ ID NO: 27676 - DNA, 278 bp, Macaca Mulatta
ccctcctgccccggttcgagagccgagtctatgggcactctctgccttcatgcacctgtcctttctaacagtcacctccaactgtaatcacaacatcctgaatccgtcatttaataaagaaggaacgtcaggcatgctaccaggcctgtccagcccctcagtgccagtggcgtctgagacctaggggttggccagagggtgggggagtccggcacgggtggggctcggctctgtggactgtgtgggctccagggtgagggggtgggttgggatccctg

SEQ ID NO: 27677 - DNA, 309 bp, Macaca Mulatta
gttttatgtccttctccatccctgcctgccccctgcccaaggtgtgtgtgtggttgggcccgactgtataactggtgtgcgtgtgatggtcaggtatgtacgagccgggtgggctctgctgaggcttgggtacctgaggaggtagctgtgcaggagagagccagacacgctgctcccactcctgtctggggcatgtctgaagtgggctggctgacttgactggcttggatccttatcagtctggtgttgcataatatagaatggatggaatattccacatggtctcacttgtctttctgaaccaccctg

SEQ ID NO: 27678 - DNA, 1904 bp, Macaca Mulatta
  misc_feature (1)...(1904): n = A,T,C or G
gctgggcgcggtggctcacccctgtaatcccagcactttgggaggcnnnnnnnnnnnnnnnnnnnnnnnnnnnnnnnnnnnnnnnnnnnnnnnnnnnnnnnnnnnnnnnnnnnnnnnnnnnnnnnnnnnnnnnnnnnnnnnnnnnnnnnnnnnnnnnnnnnnnnnnnnnnnnnnnnnnnnnnnnnnnnnnnnnnnnnnnnnnnnnnnnnnnnnnnnnnnnnnnnnnnnnnnnnnnnnnnnnnnnnnnnnnnnnnnnnnnntgagagagcaagaccttgcctatagaagaaaagaaaagaggaaagaaaacgctagctcttcnagctcttcagttttctagctcatgttagaatgaatattaaagtacacaccttccctctgtgtgccccccgaagtcagaggctccctcccccagggagatgttgggctgaagtggatggagcccagagcacaactcccagctggcgccgggagcactatggtgcacctcgctgtctgcagctgtgaatgtgggcagagacctgcagcctaggtagggtctggctgtggtggccagcagacctggattcaaactcggcctctctgctccttggctgagtggccctgggcaggttgcttatgggctctgagccttagtttcctggtcggtgaaatggtcattagcagctctccccatccctccnnnnnnnnnnnnnnnnnnnnnnnnnnnnnnnnnnnnnnnnnnnnnnnnnnnnnnnnnnnnnnnnnnnnnnnnnnnnnnnnnnnnnnnnnnnnnnnnnnnnnnnnnnnnnnnnnnnnnnnnnnnnnnnnnnnnnnnnnnnnnnnnnnnnnnnnnnnnnnnnnnnnnnnnnnnnnnnnnnnnnnnnnnnnnnnnnnnnnnnnnnnnnnnnnnnnnnnnnnnnnnnnnnnnnnnnnnnnnnnnnnnnnnnnnnnnnnnnnnnnnnnnnnnnnnnnnnnnnnnnnnnnnnnnnnnnnnnnnnnnnnnnnnnnnnnnnnnnnnnnnnnnnnnnnnnnnnnnnnnnnnnnnnnnnnnnnnnnnnnnnnnnnnnnnnnnnnnnnnnnnnnnnnnnnnnnnnnnnnnnnnnnnnnnnnnnnnnnnnnnnnnnnnnnnnnnnnnnnnnnnnnnnnnnnnnnnnnnnnnnnnnnnnnnnnnnnnnnnnnnnnnnnnnnnnnnnnnnnnnnnnnnnnnncaggaagctaaggcagcagggtggtcaaaggtcaggggtcaaagaccgctgncctaggtgtgagtttggctctgctgctgacagctgggtggcctggggcgagtggctctacagcgggagtaacactcttgctgggnnnnnnnnnnnnnnngaggcttgctccaggcccttcatgatagctgctactctgctcccatcccctcccagccctgtccctgaaaaaagcccgcaaaccttgtgcatggccgggaggcttttagccccagttccgtggggccccagcctggaggagacagaagtgaagaacggggagactactcctcagaggccccagggcgggtgtgcgcagtcctcggtggggaggggagtggcagggcccaggccccttcttcatttcgtgcatccagcaaacccaccgagtgccctgggccaggcctgtgctcaacactgggcacagggatgactggcatagtccttgccctgggacatgagctctaagctccaacaggaagaaggctcccaggtgacccgacagccaggagacagggcagacacagtgcaggggaagctggggctgtgggtgcatttagcgccttttagtggggacaagaatggaagggcaggagggtgctaggcagggggatgcaggaggctgctggggctgtctgctgcaacaggagcagagggtaagggcagccacagagcagaggcctg

SEQ ID NO: 27679 - DNA, 362 bp, Macaca Mulatta
  misc_feature (1)...(362): n = A,T,C or G
ggtgagtgaagaattggggccatcagtgaaatgactctatctggtgtttatatcgcacccttgaccttcactggcttagcttcagagtcggtagctcagctacaattcgaggcaactcaactagatggctattatcctattcagctttaaatgcagagaaacctgtgagttccagtggaaccccactgctcttngaatctaattaaaagtcacatgatgagattctgatagggccatttgtgttctactaatttttgtgatttatgatcttaacattcactaagggaaatgaagtangaataggtcttctaccctggtgtctgggaattttttctcatctgtattcttcaaaaattttgcta

SEQ ID NO: 27680 - DNA, 251 bp, Macaca Mulatta
  misc_feature (1)...(251): n = A,T,C or G
ctcctgtcctgctcacgtctgtgagtctgtcctttcccacccactagccctatctctctctgtgtggcaaacnnnnnnnnnnnnnnnnnnnnnnnnnnnnnnnnnnnnnggaaagatcccaagtcaaacagtgtggcttaaacattttttgtttcttggtgttgttatggcgagtttttggtaatgatgattcaatcattttgggaaattcttgcactgtatccaagttatttgatctggtgcgtgtggcc

SEQ ID NO: 27681 - DNA, 234 bp, Macaca Mulatta
tataagcacatttagctagttgttttgaagacatccttttataagtaatattgttgttcaagtacatcttattaccttaataaaaatgttttttgcttctttaggaatggcattatacagtacttcctcaaagcaaatctagctttgtctgaagtttctttggaaactctgcaatgcactgaagacatctgtaatatgatgttaccaaagcagtttacatatgtccttatatgc

SEQ ID NO: 27682 - DNA, 1308 bp, Macaca Mulatta
  misc_feature (1)...(1308): n = A,T,C or G
natggcggccccctatcccggcagtggcggcggaagcgaggtcaaatgcgtgggaggccgcggcgccagcgtcccgtgggactttctacccgggctgatggtcaaggcgccgtccggacnncctgcaggcgcagcgcaaggagaagtcccggaacgcggcgcgctcgcggcgcgggaaagagaacctggagttcttcgagctggccaagcttctcccgctgcccggcgccatctcgagccagctggacaaggcttccatcgtgcgcctcagcgtcacctacctccgcctgcgccggttcgccgcgctgggggcgcccccctgggggctgagagccgcggggccgccagctggcctcgnnnnnnnnnnnnnnnnnnnnnnnnnnnnnnnnnnnnnnnnnnnnnnnnnnnnnnnnnnnnnnnnnnnnnnnnnnnnnnnnnnnnnnnnnnnnnnnnnnnnnnnnnnnnnnnnnnnnnnnnnnnnnnnnnnnnnnnnnnnnnnnnnnnnnnnnnnnnnnnnnnnnnnnnnnnnnnnnnnnnnnnnnnnnnnnnnnnnnnnnnnnnnnnnnnnnnnnnnnnnnnnnnnnnnnnnnnnnnnnnnnnnnnnnnnnnnnnnnnnnnnnnnnnnnnnnnnnnnnnnnnnnnnnnnnnnnnnnnnnnnnnnnnnnnnnnnnnnnnnnnnnnnnnnnnnnnnnnnnnnnnnnnnnnnnnnnnnnnnnnnnnnnnnnnnnnnnnnnnnnnnnnnnnnnnnnnnnnnnnnnnnnnnnnnnnnnnnnnnnnnnnnnnnnnnnnnnnnnnnnnnnnggtcatccacgtgactggacgccttcgggcccacgccctgggccttgtggccctcgggcacacgttgnnnnnnnnnnnnnggctgagctgccactccacggacacatgatcgtcttccgtctcagcctgggtctcaccatccttgcctgtgagagcagnnnnnnnnnnnnnnnnnnnnnnnnnnnnnnnnnnnnnnnnnnnnnnnnnnnnnnnnnnnnnnnnnnnnnnnnnnnnnnnnnnnnnnnnnnnnnnnnnnnnnnnnnnnnnnnnnnnnnnnnnnnnnnnnnnnnnnnnnnnnnnnnnnnnnnnnnnnnnnnnnnnnnnnnnnnnnnnnnnnnnnnnnnnnnnnnnnnnnnnnnnnnnnnnnnnnnnnnnnnnnnnnnnnnnnnnnnnnnnnnnnnnnnnnnnnnagccaagccgagggtggccaaactcctttggatgccttccagcttccagccagcgtggcctgtgaggaggcatccagcccggggccagagcccacag

SEQ ID NO: 27683 - DNA, 2275 bp, Macaca Mulatta
  misc_feature (1)...(2275): n = A,T,C or G
ggacagaaaactccctccttttccaagttagccttatagtctagggcttaaaatactggtttaatggtgaaggtaagtgcttttcttctttatgggtagaaggataattactaacttaccaaaggtccattaaggggagggaacagttttaggagaagtcagcagaaaagacattaacagcaacataaggatctccatctggtaatattgcctaattccaaaatgaagagactttctgaaaaagataactgattcaatcaagaccctagggcaaggcttgagaagccactggtaccaatggacactgtggacaatggtcatttctccaaggacgctnnnnnnnnnnnnnnnnnnnnnnnnnnnnnnnnnnnnnnnnnnnnnnnnnnnnnnnnnnnnnnnnnnnnnnnnnnnnnnnnnnnnnnnnnnnnnnnnnnnnnnnnnnnnnaggtccagatttctgttcatttacgcattgggctggctcttatccttgcacttttcaaacttcaccatgtataactcagccgtgttgagtctgatcattgtaataattgccatggtgaaaaccacttatcagcatgctctttctaatgcttccactgagggggcctgttgcagacgcccttcattaactccagcctatccnnnnnnnnnnnnnnnnnnnnnnnnnnnnnnnnnnnnnnnnnnnnnnnnnnnnnnnnnnnnnnnnnnnnnnnnnnnnnnnnnnnnnnnnnnnnnnnnnnnnnnnnnnnnnnnnnnnnnnnnnnnnnnnnnnnnnnnnnnnnnnnnnnnnnnnnnnnnnnnnnnnnnnnnnnnnnnnnnnnnnnnnnnnnnnnnnnnnnnnnnnnnnnnnnnnnnnnnnnnnnnnnnnnnnnnnnnnnnnnnnnnnnnnnnnnnnnnnnnnnnnnnnnnnnnnnnnnnnnnnnnnnnnnnnnnnnnnnnnnnnnnnnnnnnnnnnnnnnnnnnnnnnnnnnnnnnnnnnnnnnnnnnnnnnnnnnnnnnnnnnnnnnnnnnnnnnnnnnnnnnnnnnnnnnnnnnnnnnnnnnnnnnnnnnnnnnnnnnnnnnnnnnnnnnnnnnnnnnnnnnnnnnnnnnnnnnnnnnnnnnnnnnnnnnnnnnnnnnnnnnnnnnnnnnnnnnnnnnnnnnnnnnnnnnnnnnnnnnnnnnnnnnnnnnnnnnnnnnnnnnnnnnnnnnnnnnnnnnnnnnnnnnnnnnnnnnnnnnnnnnnnnnnnnnnnnnnnnnnnnnnnnnnnnnnnnnnnnnnnnnnnnnnnnnnnnnnnnnnnnnnnnnnnnnnnnnnnnnnnnnnnnnnnnnnnnnnnnnnnnnnnnnnnnnnnnnnnnnnnnnnnnnnnnnnnnnnnnnnnnnnnnnnnnnnnnnnnnnnnnnnnnnnnnnnnnnnnnnnnnnnnnnnnnnnnnnnnnnnnnnnnnnnnnnnnnnnnnnnnnnnnnnnnnnnnnnnnnnnnnnnnnnnnnnnnnnnnnnnnnnnnnnnnnnnnnnnnnnnnnnnnnnnnnnnnnnnnnnnnnnnnnnnnnnnnnnnnnnnnnnnnnnnnnnnnnnnnnnnnnnnnnnnnnnnnnnnnnnntttgagtctggttgaggaatgtctttttcctgtctgctgcagtcaacatgtttggcctggtcttttacgtcacatttgggcaagcagaacttcaagactgggccaaagagaggaccctcacccgcctctgaggacataaagttacaaacttaaatgcagtactgagcatgaactttttaaacattttttacttatcttcatattcttgaccatagactcagcagttcttaactctcgctgtgtgttagtcttccctggggagcctttataagatactgatgcctgggactcactccagagattctgaatgaattggtctggggtggaacccagataccactaatttttagatattccttagaggtttctacatgtacctggggttgacaacagctggacaaacttgaaaatccatgtggcctttgaattttcctcattggaaagtactaaataaataaaaattcatgtgaaaatgatcactgataaatatcttcatagtagggcaagttattggatacagagaagagctgctcggaattgtaaccatatgttacagatctcagcacccatcagaactgtaaagctataatccccagaattaaagtttttattattttttatacattgtaaaacatggacgtttatttatgtggttaaattctattaaaatttacatgctaaaataaaataga

SEQ ID NO: 27684 - DNA, 852 bp, Macaca Mulatta
  misc_feature (1)...(852): n = A,T,C or G
cgaaggcccgggctgcgagcgttggcggccggagtcccagccatggccgagtctgtggagcggctgcagcagcgggtccaggagctggagcgggaacttgcccaggagagaaatcggcgggtcccggggagcggcgaaggagggggcggccgggtccgcatcgataagatgagctcagaggtggtggattcgaatccctacagnnnnnnnnnnnnnnnnnnnnnnnnnnnnnnnnnnnnnnnnnnnnagaaaatccgtacctttgccgtagcaatagtaggtgttggaagagtaggtagtgtgactgctgaaatgctgacaagatgtnnnnnnnnngttgctactctttgattatgacaaggtggaactcgccaatatgaatagacttttcttccaacctcatcaagcaggattaagtaaagttcaagcagcagaacatactctgaggnnnnnnnnnnnnnnnnnnnnnnnnnnnnnnnnnnnnnnnnnnnnnnnnnnnnnnnnnnnnnnnnnnnnnnnnnnnnnnnnnnnnagtaatggtgggttagaagaaggaaaacctgttgatctagttcttagctgtgtggacaattttgaagctcgaatgacaataaatacannnnnnnnnnnnnnnnnnnnnnnnnnnnnnnnnnnnnnnnnnnnnnnnnnnnnnnnnnnnnnnnnnnnnnnnnnnnnnnnnnnnnnnnnnnnnnnnnnnnnnngtgtgctccaccacttgtagttgctgcaaatattgatgaaaagactctgaaacgagaaggtgtttgtgcagccagtcttcctaccactatgggtgtggttgccgggatcttagtacaaaacgtgttaaag

SEQ ID NO: 27685 - DNA, 892 bp, Macaca Mulatta
  misc_feature (1)...(892): n = A,T,C or G
accaacagcccttttctggagataaaaaatttcttgcggcggtgggtttcggatgaattctcgggataatttctttctttctttccggggggtccgaaagaattttcccccttttcccggggggtttctggggcttttcccggcaggctttctttcttttccattggaaacgttaaagccattccggttaaagaatgtttttgggggatttttgggccaactggctagatatcggaatttttgggttgaggtgggcaaatgaacaaaattttcgtgggggtgtttttcgttaggaggaaacttcgatttgaggacccagagggtcccagttcaccaagtaacaagcccactagcccagctgctttcaggaaaaccaccctcttgccccctgtggcgtccagtgaggatgatcagaatggtcccgggggtaatgctggctcgcagttttctcacgtgctgactgaagggttttttgccgtggctcaacagctttcgaggcacatcttcagtaggataatatctaggcattttgcgaagtttaaccacccgggtaccgccgttcttgtcaccaccaactggttttgtaagagttgcaagaaccttcnnnnnnnnnnnnnnnnnnnncttggatttagcggctgagtacttcctcttgtacatggcctttctggaatacatggcggatcgggaatacctgccaattcctctgacaaggacagggttgcggctgcaatggggcttccccttcttgggcttcttagccttgaggttaccctttttcaccttgccaccagcatcagccttcttggcttcgggtttcttctctttagtatctggcttctcaactttttcacccgccatcttgcaagatgggaaagagccctaacgtccc

SEQ ID NO: 27686 - DNA, 131 bp, Macaca Mulatta
agggtctcctcatgctgctgcagaacctacctacaatacactggggcaacgaagagattgggctgcttctcgccgaggcatacagactcaagtacatgtttgccgatgccccgaatcactaccgccgatag

SEQ ID NO: 27687 - DNA, 903 bp, Macaca Mulatta
gcgaaccccgtgggaccagaggatatgggggcgacagctgtctatgagctggacacagagaaagagcgcgatgcacaagccatctttgagcgcagccagaagatccaggaggagctgaggggcaaggaggatgacaagatctatcggggaatcaacaattatcagaaatacatgaagcccaaggatacgtctatgggcaatgcctcttccgggatggtgaggaagggccccatccgagcgcccgagcatctacgtgccaccgtgcgctgggattaccagcccgacatctgtaaggactacaaagagactggcttctgcggcttcggagacagctgcaaattcctccatgaccgttcagattacaagcatgggtggcagatcgaacgtgagcttgatgagggtcgctatggtgtctatgaggatgaaaactatgaagtgggaagcgatgatgaggaaataccattcaagtgtttcatctgtcgccagagcttccaaaacccagttgtcaccaagtgcaggcattatttctgcgagagctgtgcactgcagcatttccgcaccaccccgcgctgctatgtctgtgaccagcagaccaatggcgtcttcaatccagcgaaagaattgattgctaaactagagaagcatcgagctacaggagagggtggtggtgcttccgacttgccagaagaccccgatgaggatccaattcccgttacttagctgtctgataattcttaaatttaaaaaataaatattttgttcttttggaagtcttaattcgtgtccttcctttgtagagacagtgacagagaaggcgggtggtgaagtagggtcctggattaaaaacctcaaggtaggtataatcaggatttttagccctaggataaccattttgcctgtgtt

SEQ ID NO: 27688 - DNA, 771 bp, Macaca Mulatta
  misc_feature (1)...(771): n = A,T,C or G
gggggagaatctgaggctggatcgtggacgccattactcgggactgggccaggttgtccactcccaacccccacaaacccctatataattataagccaaactattatttacagaggaggaggggaaagagtgctggtagttttggtttcttctgtttactgacttgggccagatagacccaatgcacttttgcttgggcctctcaatgacccaggctaaggactcaggcagtgaaagcctctagcacactgagctatgttttattttaaagcaaacacttcttcaggaccatctcttgctctttctccttaagttttcagtacatagacatttgctccaactccggttggggcagtttgacagagctctgtgcgcacacctcatgtgacccaattcaaacctcttaatctgatgactgaannnnnnnnnnnnnnnnnnnnnngtttttaaactttcttccagatgcctgtggtctctctgatgtagcccatgtggaaagcttgcagganaagtctcagtgtgctttggaagaatacgttaggagccagtaccccaaccagccgacgcgattcggaaagcttttgcttcgcctcccttcccctcgcaccgtctcctcctcagtcatagaggcattgttttttcgtcgttttggtaggtaaaaccccccatcgaaccctcatccggggatatgttactgtccggcagcagttttaactggccgtatattggcaattcctttaattaaattaaatanaaagggggagtgaaact

SEQ ID NO: 27689 - DNA, 742 bp, Macaca Mulatta
tcctcaccccacactatcccaggcctcagaaggcccggcgggagaggtgggggtgactctgccccaggaacccacccagcgtcaggttgtggcatcctggttccctcggggacctgggtgcagtggagtcagtgatgccattggcctcctgccagcactgcctgtctgaggagcccgagattcgagccttcgaccctgaagcagcggctgtgcagccctaccaagaccagacgtaccagtcagtctactttgtgtctgagagcttcagcgatgccaaggacaagctcaggtgggctaggctcctagggcaagcccccaacggtgcccccaaactgggccagccaggcctgccttctggccttgagcagggctgggcctgtgagcccaggtcacagataagaacaccaacccccagttgcagcagcccccacacagcagggaccccgtccgtgagaaggaccccagcgtctgaggaggggcagacctataggactgggggctgctgggtggccagatcaaggccggtcttggaggtgctggcagagcctgagttttgtgaggaggtcctgtggaacctgtcccaaccccctgccctgggatggggagaagtcagaggggatagacagagtcagggtggggggcatggtgggagtggggtccccagggctgggggcctttggtgcaatgaccagagtgtcaggagaggggaaagaagcccactagcctcatcctcataaaaggt

SEQ ID NO: 27690 - DNA, 124 bp, Macaca Mulatta
tgcgtccggggcttcttggtccgacgccagttccagagcctgcgagctgagtatgaggcgattgtacgggaggtcgagggcgacctgggcacgcttcagtggaccgagggccgcattcccaggc

SEQ ID NO: 27691 - DNA, 1405 bp, Macaca Mulatta
  misc_feature (1)...(1405): n = A,T,C or G
ggtcggctcgtgctcatcatcctgtgctctgtggtcttctctgccgtctacttcctcctgtgctgctgggccggcctgcctctctgcctggccacctgcctggaccaccacttctccacagactccaggcccactgtgccgggccccttgcacttcagtggatatagcagtgtgacagatgggaagnnnnnnnnnnnnnnnnnnnnnnnnnnnnnnnnnnnnnnnnnnnnnnnnnnnnnnnnnnnnnnnnnnnnnnnnnnnnnnnnnnnnnnnnnnnnnnnnnnnnnnnnnnnnnnnnnnnnnnnnnnnnnnnnnnnnnnnnnnnnnnnnnnnnnnnnnnnnnnnnnnnnnnnnnnnnnnnnnnnnnnnnnnnnnnnnnnnnnnnnnnnnnnnnnnnnnnnnnnnnnnnnnnnnnnnnnnnnnnnnnnnnnnnnnnnnnnnnnnnnnnnnnnnnnnnnnnnnnnnnnnnnnnnnnnnnnnnnnnnnnnnnnnnnnnnnnnnnnnnnnnnnnnnnnnnnnnnnnnnnnnnnnnnnnnnnnnnnnnnnnnnnnnnnnnnnnnnnnnnnnnnnnnnnnnnnnnnnnnnnnnnnnnnnnnnnnnnnnnnnnnnnnnnnnnnnnnnnnnnnnnnnnnnnnnnnnnnnnnnnnnnnnnnnnnnnnnnnnnnnnnnnnnnnnnnnnnnnnnnnnnnnnnnnnnnnnnnnnnnnnnnnnnnnnnnnnnnnnnnnnnnnnnnnnnnnnnnnnnnnnnnnnnnnnnnnnnnnnnnnnnnnnnnnnnnnnnnnnnnnnnnnnnnnnnnnnnnnnnnnnnnnnnnnnnnnnnnnnnnnnnnnnnnnnnnnnnnnnnnnnnnnnnnnnnnnnnnnnnnnnnnnnnnnnnnnnnnnnnnnnnnnnnnnnnnnnnnnnnnnnnnnnnnnnnnnnnnnnnnnnnnnnnnnnnnnnnnnnnnnnnnnnnnnnnnnnnnnnnnnnnnnnnnnnnnnnnnnnnnnnnnnnnnnnnnnnnnnnnnnnnnnnnnnnnnnnnnnnnnnnnnnnnnnnccccactctggcgacacttggagccatctcaggcctcatgacttgaaggggagtggaatgaggagccctgtctccacctctactccctgagtaattcatggcatttgggggctcaccccacctccaggtctgtcaagtggcctttgtccctcgggctgatggccccctactcaccagcatcatcatgaccttgtgccagtcctggtccttcctccccagccacccctactaccttttggtgccacacttctcaggccggccgccctggttggggcagccaagagcctggggttcgttgggtgaaggggccttggagttgtgactgccggggccgtatcaggaacgtacgggtaaacgtgtgttttctgga

SEQ ID NO: 27692 - DNA, 2911 bp, Macaca Mulatta
  misc_feature (1)...(2911): n = A,T,C or G
agcggcagagactgatcaactcggccaacggtgtgagcagcaagccacttcaaaacgggagacacgagaacattgagaacgggaatgttcctgtggaaaacccggaagaccctcagcagaatcaggagcaacagccgccgccacagccaccacccccggagccagagccggtggaggctgccttcctgtcccctttctccatgccgnnnnnnnnnnnnnnnnnnnnnnnnnnnnnnnnnnnnnnnnnnnnnnnnnnnnnnnnnnnnnnnnnnnnnnnnnnnnnnnnnnnnnnnnnnnnnnnnnnnnnnnnnnnnnnnnnnnnnnnnnnnnnnnnnnnnnnnnnnnnnnnnnnnnnnnnnnnnnnnnnnnnnnnnnnnnnnnnnnnnnnnnnnnnnnnnnnnnnnnnnnnnnnnnnnnnnnnnnnnnnnnnnnnnnnnnnnnnnnnnnnnnnnnnnnnnnnnnnnnnnnnnnnnnnnnnnnnnnnnnnnnnnnnnnnnnnnnnnnnnnnnnnnnnnnnnnnnnnnnnnnnnnnnnnnnnnnnnnnnnnnnnnnnnnnnnnnnnnnnnnnnnnnnnnnnnnnnnnnnnnnnnnnnnnnnnnnnnnnnnnnnnnnnnnnnnnnnnnnnnnnnnnnnnnnnnnnnnnnnnnnnnnnnnnnnnnnnnnnnnnnnnnnnnnnnnnnnnnnnnnnnnnnnnnnnnnnnnnnnnnnnnnnnnnnnnnnnnnnnnnnnnnnnnnnnnnnnnnnnnnnnnnnnnnnnnnnnnnnnnnnnnnnnnnnnnnnnnnnnnnnnnnnnnnnnnnnnnnnnnnnnnnnnnnnnnnnnnnnnnnnnnnnnnnnnnnnnnnnnnnnnnnnnnnnnnnnnnnnnnnnnnnnnnnnnnnnnnnnnnnnnnnnnnnnnnnnnnnnnnnnnnnnnnnnnnnnnnnnnnnnnnnnnnnnnnnnnnnnnnnnnnnnnnnnnnnnnnnnnnnnnnnnnnnnnnnnnnnnnnnnnnnnnnnnnnnnnnnnnnnnnnnnnnnnnnnnnnnnnnnnnnnnnnnnnnnnnnnnnnnnnnnnnnnnnnnnnnnnnnnnnnnnnnnnnnnnnnnnnnnnnnnnnnnnnnnnnnnnnnnnnnnnnnnnnnnnnnnnnnnnnnnnnnnnnnnnnnnnnnnnnnnnnnnnnnnnnnnnnnnnnnnnnnnnnnnnnnnnnnnnnnnnnnnnnnnnnnnnnnnnnnnnnnnnnnnnnnnnnnnnnnnnnnnnnnnnnnnnnnnnnnnnnnnnnnnnnnnnnnnnnnnnnnnnnnnnnnnnnnnnnnnnnnnnnnnnnnnnnnnnnnnnnnnnnnnnnnnnnnnnnnnnnnnnnnnnnnnnnnnnnnnnnnnnnnnnnnnnnnnnnnnnnnnnnnnnnnnnnnnnnnnnnnnnnnnnnnnnnnnnnnnnnnnnnnnnnnnnnnnnnnnnnnnnnnnnnnnnnnnnnnnnnnnnnnnnnnnnnnnnnnnnnnnnnnnnnnnnnnnnnnnnnnnnnnnnnnnnnnnnnnnnnnnnnnnnnnnnnnnnnnnnnnnnnnnnnnnnnnnnnnnnnnnnnnnnnnnnnnnnnnnnnnnnnnnnnnnnnnnnnnnnnnnnnnnnnnnnnnnnnnnnnnnnnnnnnnnnnnnnnnnnnnnnnnnnnnnnnnnnnnnnnnnnnnnnnnnnnnnnnnnnnnnnnnnnnnnnnnnnnnnnnnnnnnnnnnnnnnnnnnnnnnnnnnnnnnnnnnnnnnnnnnnnnnnnnnnnnnnnnnnnnnnnnnnnnnnnnnnnnnnnnnnnnnnnnnnnnnnnnnnnnnnnnnnnnnnnnnnnnnnnnnnnnnnnnnnnnnnnnnnnnnnnnnnnnnnnnnnnnnnnnnnnnnnnnnnnnnnnnnnnnnnnnnnnnnnnnnnnnnnnnnnnnnnnnnnnnnnnnnnnnnnnnnnnnnnnnnnnnnnnnnnnnnnnnnnnnnnnnnnnnnnnnnnnnnnnnnnnnnnnnnnnnnnnnnnnnnnnnnnnnnnnnnnnnnnnnnnnnnnnnnnnnnnnnnnnnnnnnnnnnnnnnnnnnnnnnnnnnnnnnnnnnnnnnnnnnnnnnnnnnnnnnnnnnnnnnnnnnnnnnnnnnnnnnnnnnnnnnnnnnnnnnnnnnnnnnnnnnnnnnnnnnnnnnnnnnnnnnnnnnnnnnnnnnnnnnnnnnnnnnnnnnnnnnnnnnnnnnnnnnnnnnnnnnnnnnnnnnnnnnnnnnnnnnnnnnnnnnnnnnnnnnnnnnnnnnnnnnnnnnnnnnnnnnnnnnnnnnnnnnnnnnnnnnnnnnnnnnnnnnnnnnnnnnnnnnnnnnnnnnnnnnnnnnnnnnnnnnnnnnnnnnnnnnnnnnnnnnnnnnnnnnnnnnnnnnnnnnnnnnnnnnnnnnnnnnnnnnnnnnnnnnnnnnnnnnnnnnnnnnnnnnnnnnnnnnnnnnnnnnnnnnnnnnnnnnnnnnnnnnnnnnnnnnnnnnnnnnnnnnnnnnnnnnnnnnnnnnnnnnnnnnnnnnnnnnnnnnnnnnnnnnnnnnnnnnnnnnnnnnnnnnnnnnnnnnnnnnnnnnnnnnnnnnnnnnnnnnnnnnnnnnnnnnnnnnnnacctagaaattgggctcatggtcttcaacttgaggacaagggtgattttcctaagaaatcagccaagtgggaaggcagggaccctgtagattcaccagtatcaactttagctgcagagatgccagagccctcgggaccactcagtccccttaatagcttagttctcctggttcctcccatcttacaggctcatccgggttccaaagagcttctgtctctgttttgattctccaaactgccctgtgatgttcgtagggattattctccccacttaacagaaagtagtgtcttggagaggtcaagggtctgtagttcaatggccag

SEQ ID NO: 27693 - DNA, 335 bp, Macaca Mulatta
  misc_feature (1)...(335): n = A,T,C or G
nnnnnnnnnnnnnnnnnnnnnnnnnnnnnnnnnnnngctggtaacatcagttttattgggttggggcagcagccacagcctggctgtgggtggggcgggccctcacaggttgttgagttccagcagggtctggtccaaggtctggtgaatctcgacgttctcctccttggcactggccaaggtctcttctaggtcatcaatggttttctccaactttgccacagacctctcagcaaactctgctcgggtctcagcctccttcagcttctcctccaacagtttgatctcctcttnnnnnnnnnnnnnnnnncnnnnnnnnnnnnnnnnnnnnnnnn

SEQ ID NO: 27694 - DNA, 717 bp, Macaca Mulatta
ctatttcagcacatgcatgtcatctagccatcagtcaatgactgtcctttgaaaatcaagaaataaaaaacattgacatctggggaaaatgtatatgctctatttgatttttggttctttgtttttatgggaagaattatgtggtcagcctaaagtctggcctgcaaacatattttcccacttaaatgaatccattaaggtggtgatgtgttaatgtattcgagcatgcatgtgctagcatcaccctgaaataaaggtatccagtgtactgtgccaatatgtaccatgaccaaaaaagtgttatctattattatgtgtgttacacagtctctcacttttatttcatgtttatgcccaaaggtatgtgaaggccttcccttttacaaacaagaatcagcagaaggaaatgattgaaaccaaagtagtaaaggaggagaaggccgatgatatcaaccctaatgaagaatcaaagaaaacggataacaacccagaagagcccaagagtccaagcaaaactaccgtgcgatgcctggaagctgaagtttagatgagacagaaatgaggagacacacctgaggctggtttctttcaccatcctcaccctgccccagctgaggaaatcaaacgggccaaagaaccaaagaagaaagtccacccttagttccttactggaatcagctcaggactgccgttggactatggagtgcaccaaagaga

SEQ ID NO: 27695 - DNA, 348 bp, Macaca Mulatta
acagctgtcagtaacaattccctcttcctgctgggtgttctcttccattacagacagagtgggaagctttggagctgacagatcaccagtgggcactagatgatgtcgaagaagagctcatggccaaagacctccacttcgaaggcatgttcaaaaaggaactacagacctctattttttgaagactgagcagggattagctgtgtcaggaacttggcattgcacttaaccttgtaactttgtttggagctggcacctctcagaataaaaggaggatgcaagagctggcaggcatgcagcaaggcttgttcttgtctgggctgggttcccctttatgtttgaaactag

SEQ ID NO: 27696 - DNA, 872 bp, Macaca Mulatta
gccaatcctatgctatgtgcccttttcttcatgggttttctaacagtttatatagttaccatagtgggaaatattagcataatcctcttaatccaaagcagcccaaaacttcacaccccaatgtacctttttctcagccatttggctttgtgaacattgagtattccacatcggttacaccaatcatgctcatcagtttcttaagagagaaaacaactattcctgtcacgggctgtatagcacagcttgctctgatgtcatgtttggaaccacagagtgcttcctactggccactatggcctacgatcgctatgtagctatctgctttcccctgctttactccatccaaatgcccccagtcatctgcctcctcctactgggagcctcctacctgggtggattcatgaacgcttcgtcttttacaggctgttcgatgaacctgtccttctctggtccaaataaaatcaaccattttttctctgacctcttcccacacttgaagctttcttgtggccatgtttacattgctgaaatatcccctgccatctcctctgcatctgtccttatcagcacgctgtttaccataatcatgtcctacatctacatcctccgctccatcctgaagatgcgctctactgagggaaggaagaacgttttctccacctgcgcttcccacctcactgcagtcactttgttctatgtgaccattttgtttgtttatgtgatgcccaagtcaagctattcagcggatcaggtcaaggtggcatctgttatctacacggtgatgattcctatgctgaaccccctcatctacagtcttaggaataaggaggtgaaagaggccatgagaaaattgatggcaagaacacatt

SEQ ID NO: 27697 - DNA, 67 bp, Macaca Mulatta
aggcttggtccagcatagtttatcagctgattcccaatgttcagcagctggaaatgaacctaaggaa

SEQ ID NO: 27698 - DNA, 325 bp, Macaca Mulatta
  misc_feature (1)...(325): n = A,T,C or G
gcccgagtgattgatgtatctaatggngaaagttcatgttgctgaaagctgtttggaaagaacaggtggcctgggagtaaaattgtcctagatgctggannnnnnnnnnnnnnnnnnnnnnnnnnnnnnnnnnnnnnnnnnnnnnnnnnnnnnnnnnnnnnnnnnnnnnnnnnnnnnnnnnnnnnnnnnnnnnnnnnnnnnnnnnnnnnnnnnnnnnnnnnnnggatcctccagatagccattgccttttcctcaagggagcaacgttagctttcctgaatgatgaagtttggaatttgtcaaatgtacaacagggaaaatatct

SEQ ID NO: 27699 - DNA, 438 bp, Macaca Mulatta
  misc_feature (1)...(438): n = A,T,C or G
gtgtctgtatctctacaagacactccttctcaagctcttctgagagtataccttgaaaagaaacaggatgttggtgaaagcctgacaatgcatttctcaacatgtgaagaatttttaagctcctatgtatactttattttgagaggagcaattcagcaaattgttggaaagccagttggagaaaccccagactatataaacttcaacaatataacaaaagtgtcatttgatgattgttttgagtctattcgtggcaagaattttttaagtgaattagttcanactacaaaggagaggtcagaagagatagaacaaacaagtttaagttcaaagagtgagagcgctggaccagagagcagggccgactggtgtatttctcataggacttatgacattnggcaatagaaaggagttttgaagatttagaaaattataaag

SEQ ID NO: 27700 - DNA, 1951 bp, Macaca Mulatta
  misc_feature (1)...(1951): n = A,T,C or G
aggtgaaaaggagggacggagaaattcagtgcagaaacaatctttggtctggaagaacaccttttggcaaggagacattgacagtttccatgacgacgtcattcagagaaaccaacggttcattccattcttgaatcccagaacaccgaggaagctaacaccttacaccgtggtgctgcacggccccgcgggcgtggggaaaaccacactggccaaaaagtgtatgctggactggacagactgcaacctcagcccgactgtcagatacgctttctacctcagctgcaaggagctcagccgcatgggcccgtgcagttttgcagagctgatctccaaagactggcctgaattgcaggatgacattccacacatcctagcccaagcacagagaatcctgttcgtggtcgacggccttgatgagctgaaagtcccacctggggcgctgatccaggacatctgcggggactgggagcagcagaagccggtgccggtcctcctggggagtttgctgaagaggaagatgttacccaaggcaaccctgctggtcaccacgcggcccagggccctgagggacatccagctcctggtgcagcagcccatctacataagggtggaggggttcctggaggaggacaggagggcctatttcctgagacactttggagacgaggaccaagccatgcgtgcctttgagctgatgaggagcaacgcggccctgttccagctgggctcggcgcccgcggtgtgctggatcgtgtgcacgactctgaagctgcagatggagaagggggaggacccggcccccacctgcctcaccagcacggggctgttcctgcgcttcctctgcagccagttcccgcagggcgcacagctccggggcgcgctgcgggcgctgagcctcctggccgcgcagggtttgtgggcgcagatgtccgtgctccacggagaggacctggaaagcgctggggtgcaggagtccgacctccgcccgttcctggacagagacatcctccgccaggacggagtcgccaaaggctgctactccttcatccacctcagcttccagcagtttctcacagggctgttctacgcccnnnnnnnnnnnnnnnnnnnnnnnnnnnnnnnnnnnnnnnnnnnnnnnnnnnnnnnnnnnnnnnnnnnnnnnnnnnnnnnnnnnnnnnnnnnnnnnnnnnnnnnnnnnnnnnnnnnnnnnnnnnnnnnnnnnnnnnnnnnnnnnnnnnnnnnnnnnnnnnnnnnnnnnnnnnnnnnnnnnnnnnnnnnnnnnnnnnnnnnnnnnnnnnnnnnnnnnnnnnnnnnnnnnnnnnnnnnnnnnnnnnnnnnnnnnnnnnnnnnnnnnnnnnnnnnnnnnnnnnnnnnnnnnnnnnnnnnnnnnnnnnnnnnnnnnnnnnnnnnnnnnnnnnnnnnnnnnnnnnnnnnnnnnnnnnnnnnnnnnnnnnnnnnnnnnnnnnnnnnnnnnnnnnnnnnnnnnnnnnnnnnnnnnnnnnnnnnnnnnnnnnnnnnnnnnnnnnnnnnnnnnnnnnnnnnnnnnnnnnnnnnnnnnnnnnnnnnnnnnnnnnnnnnnnnnnnnnnnnnnnnnnnnnnnnnnnnnnnnnnnnnnnnnnnnnnnnnnnnnnnnnnnnnnnnnnnnnnnnnnnnnnnnnnnnnnnnnnnnnnnnnnnnnnnnnnnnnnnnnnnnnnnnnnnnnnnnnnnnnnnnnnnnnnnnnnnnnnnnnnnnnnnnnnnnnnnnnnnnnnnnnnnnnnnnnnnnnnnnnnnnnnngattaaaaacgtcacccctgacactgcttaccgggacttctgtcttgctttcattgggaagaggaccctcacgcacctgaccctggaagggcacatcgagtgggaacgcacgatgctgctgctgctgtgtgatctgctcagaaatcacaaatgcaacctgcagtacctgagg

SEQ ID NO: 27701 - DNA, 194 bp, Macaca Mulatta
taaggtgcacacctagcctaggtgagacactgcagccaggcaaccaccgacacacgccccttctcaaagccagaggtgagtggggcaggtgcccagggctgggcgagtggaattaggacacacacaggcttgggcttcaagttcatttattgatgcattcattggacacaataaaaccacaattgttatcaaaa

SEQ ID NO: 27702 - DNA, 286 bp, Macaca Mulatta
gagtttttgccaagccctcgctctcagcccagcccggcccggcggtgtcctcaggaggggacgtgaccctacagtgtcagacccggtatggctttgaccaatttgctctgtacaaggaaggggaccctgcgccctacaagaatcccgagagatggtaccgggctagtttccccatcatcacggtgaccgctgcccacagcggaacctaccggtgctacagcttctccagcggggacccatacctgtggtcggctcccagcgaccccctggagctcatggtcacagg

SEQ ID NO: 27703 - DNA, 142 bp, Macaca Mulatta
aacttctttgttgaagaaatgtcttcagagtcagaaaaggataaagagagactgattcaagcaggcaaaatgttcttctttcatgtacaagattttgcttctgacagaaacacactgactgagttgttaaccgcagtatgaa

SEQ ID NO: 27704 - DNA, 659 bp, Macaca Mulatta
  misc_feature (1)...(659): n = A,T,C or G
ggcattgcttctatgacagtgccagtgtacattgcggaggtctcaccacccaatttaagaggccgattagtcaccattaataccctcttcatcacaggagggcagttctttgcaagtgttgttgatggagccttcagttatctccagaaggatggatggaggtnaggtacatgttgggacttgcagcaattccggcagttatacagttttttggctttctctttttgcctgagagccctcgatggcttattcagaaaggacagactcagaaggcccgcagaattttatctcagatgcgtggtaaccagaccattgatgaggaatatgatagcatcaaaaacaacattgaagaggaggaaaaagaggtcggctcagnagctggacctgtgatctgcagaatgctgagttatcccccaactcgccgagccttaattgtgggttgtggactacaaatgttccagcaactctcaggcattaacaccatcatgtangtactacagtgcaaccattctgcagatgtctggtgttgaaagatgatagacttgcaatatggctggcttcagttacagccttcacaaatttcattttcacacttgcgggagtctggcttgtgagaaaagtgggccgcagaaagcttacctttggtagtttagcaggta

SEQ ID NO: 27705 - DNA, 1930 bp, Macaca Mulatta
  misc_feature (1)...(1930): n = A,T,C or G
aggtcacggagctcaaagggctggcaactcacatcctggtaggtagtgtgacctgtgagaccaaagagctgtttgcagcccgacctcaggtggtggctgtcgacatcaatgaccttggcaccatcaaactgaacctggaaatcacctggtnnnnnnnnnnnnnnnnnnnnnnnnnnnnnnnnnnnnnnnnnnnnnnnnnnnnnnnnnnnnnnnnnnnnnnnnnnnnnnnnnnnnnnnnnnnnnnnnnnnnnnnnnnnnnnnnnnnnnnnnnnnnnnnnnnnnnnnnnnnnnnnnnnnnnnnnnnnnnnnnnnnnnnnnnnnnnnnnnnnnnnnnnnnnnnnnnnnnnnnnnnnnnnnnnnnnnnnnnnnnnnnnnnnnnnnnnnnnnnnnnnnnnnnnnnnnnnnnnnnnnnnnnnnnnnnnnnnnnnnnnnnnnnnnnnnnnnnnnnnnnnnnnnnnnnnnnnnnnnnnnnnnnnnnnnnnnnnnnnnnnnnnnnnnnnnnnnnnnnnnnnnnnnnnnnnnnnnnnnnnnnnnnnnnnnnnnnnnnnnnnnnnnnnnnnnnnnnnnnnnnnnnnnnnnnnnnnnnnnnnnnnnnnnnnnnnnnnnnnnnnnnnnnnnnnnnnnnnnnnnnnnnnnnnnnnnnnnnnnnnnnnnnnnnnnnnnnnnnnnnnnnnnnnnnnnnnnnnnnnnnnnnnnnnnnnnnnnnnnnnnnnnnnnnnnnnnnnnnnnnnnnnnnnnnnnnnnnnnnnnnnnnnnnnnnnnnnnnnnnnnnnnnnnnnnnnnnnnnnnnnnnnnnnnnnnnnnnnnnnnnnnnnnnnnnnnnnnnnnnnnnnnnnnnnnnnnnnnnnnnnnnnnnnnnnnnnnnnnnnnnnnnnnnnnnnnnnnnnnnnnnnnnnnnnnnnnnnnnnnnnnnnnnnnnnnnnnnnnnnnnnnnnnnnnnnnnnnnnnnnnnnnnnnnnnnnnnnnnnnnnnnnnnnnnnnnnnnnnnnnnnnnnnnnnnnnnnnnnnnnnnnnnnnnnnnnnnnnnnnnnnnnnnnnnnnnnnnnnnnnnnnnnnnnnnnnnnnnnnnnnnnnnnnnnnnnnnnnnnnnnnnnnnnnnnnnnnnnnnnnnnnnnnnnnnnnnnnnnnnnnnnnnnnnnnnnnnnnnnnnnnnnnnnnnnnnnnnnnnnnnnnnnnnnnnnnnnnnnnnnnnnnnnnnnnnnnnnnnnnnnnnnnnnnnnnnnnnnnnnnnnnnnnnnnnnnnnnnnnnnnnnnnnnnnnnnnnnnnnnnnnnnnnnnnnnnnnnnnnnnnnnnnnnnnnnnnnnnnnnnnnnnnnnnnnnnnnnnnnnnnnnnnnnnnnnnnnnnnnnnnnnnnnnnnnnnnnnnnnnnnnnnnnnnnnnnnnnnnnnnnnnnnnnnnnnnnnnnnnnnnnnnnnnnnnnnnnnnnnnnnnnnnnnnnnnnnnnnnnnnnnnnnnnnnnnnnnnnnnnnnnnnnnnnnnnnnnnnnnnnnnnnnnnnnnnnnnnnnnnnnnnnnnnnnnnnnnnnnnnnnnnnnnnnnnnnnnnnnnnnnnnnnnnnnnnnnnnnnnnnnnnnnnnnnnnnnnnnnnnnnnnnnnnnnnnnnnnnnnnnnnnnnnnnnnnnnnnnnnnnnnnnnnnnnnnnnnnnnnnnnnnnnnnnnnnnnnnnnnnnnnnnnnnnnnnnnnnnnnnnnnnnnnnnnnnnnnnnnnnnnnnnnnnnnnnnnnnnnnnnnnnnnnnnnnnnnnnnnnnnnnnnnnnnnnnnnnnnnnnnagtgtttcgaaccctggtgtcccaaattctggaccaggctgagcctctgctttcctccagcctgtcctcggaagtcgtcactgttttccagtattacagttacttcaccagccacggcgtcagtgacctggagagttacctgagccagctggcaaggcaa

SEQ ID NO: 27706 - DNA, 369 bp, Macaca Mulatta
tttggctgttctgaagcaggccatcctcacctttcacctcacccacaggtggctctcgggggctggtccatgggcggctgtggcgtcaggatggagtcctagctgtgacctgtgcccaggagggcgtgatccgtgtgaagccccaggtctcagagagcaagctgtagccagaggtaccagcttggcctggggcttcaagaacctcccatctatccccattcctgagacagcagttacagtcccttttggccctcacatccaataaagagactgataccactggagtggctggcctttaattcccctgggccagaccttgccttcatccctcaactccaggactccagggcagagtccctggccttcaga

SEQ ID NO: 27707 - DNA, 163 bp, Macaca Mulatta
attttccctataggggctttctctgttttcaggacaaataattacatggacccaatttctggagacacagctagagggaaacaaaagacaaagtagtagcacctgttttgattagtttcttaattagaatatcataagatttataggtgatctatagaggact

SEQ ID NO: 27708 - DNA, 903 bp, Macaca Mulatta
actgtgcacacgagtgtagcactcttttatgggtaatctgcaaaaagtaacttgaccactgagttctgtttctaataaccccaaacacattttctttcaggctaacagcagatcccaggaaacagtgttctaaagaagatggtggtggatggtggtataataggtgtcacgcagccaatccaaatggcagatactactggggtggaaaatatacctgggacatggcaaagcatggcacagatgatggggtagtatggatgaattggaaggggtcatggtactcaatgaagaagatgagtatgaagatcaggcccttcttcccacagcaatagtccccaatacgtacatttttgctcttctctatgtgacaacatttttgtacattatgttattgtaattttctttaatacattatattcctctaaaactctcaagcagatgtgagtgtgactttttgaaaaaagtataggataaattacattaaaaatagcacatgattttcttttgtattcttcatttctcttgctcaccaagaagtaactaaaagtatagttttgacagagtcagtgttcataatttcaattctggttgactgtgagaagtttcaaataaggaagagggattttttttatccttgttgcaggaaaaccatgagggaaaggaacaactgatgtttaaaagtccactttaaaaattacatttatttatgtaggatctgtcaaagaaaacttccaaaaagattaattaattaaaccagactctgttgcaataagttaatgtttccttgttttgtaatccacacattcagtgagttaggctttgcactcgtaaggaaggagaagcgttcacaacctaaaacataataaactggtcttgaatatttgaagattaaaatctgactcc

SEQ ID NO: 27709 - DNA, 408 bp, Macaca Mulatta
  misc_feature (1)...(408): n = A,T,C or G
gaaagggagattgtctcaggctggccaactttccctgcatgtacgcacgtcttcacatgtgcacatgtgtgaaacaaatgaagcaagaaaagaaattataatttaaccagtaaacaatatgtaaaaggaaatcttaatgtcattacaattttaccaggctccgaataaaataccatccttcaaattgaacaaattacttattagctgaagataggtgaaaggaagtttggaattaacagtctagattttctcactgatgggtacaagtcactgacctgtaaaattatcttagatcctgccctccctccttcctactttctggannactatcagtctcctaccccatgcttgcccaaagagttccctgtacaaatcacaaatatgcatttgccattccctggaagcccc

SEQ ID NO: 27710 - DNA, 741 bp, Macaca Mulatta
  misc_feature (1)...(741): n = A,T,C or G
acttccgcgagtcgctcatggtcttcgccgacccccgcagcccgccctggtacgctcgcgcctgggtcttctggcttgtgtcggcggccacgctgtcgtggcccctgcgcgtcgtggccgcctatggaacggcccacgtgcactaccaggtggagaagctcttcggcgccagctcgcccccgcccggggccgtgcccagcgggcccccgctgtcccgcgtggccacagtggacttcactgagctcgagtggcacatctgctccaacaggcagttggtgcccagctactcggaggccgtggtcatgggcgcaggctcgggcgcctacctcagaggctgccagcgctgccgtcgctccgtcagcagcaactcgctgccccccgcccggcccagcgggccccgtctgccctttagccgcagccgcctctcactgggcgctgggggccgggccacgccaggggtcttccgcagcctgagcggggggcccctggggcgccgtggagaggacacagaacccctggaaagcccgccctgctatgaggacgccctctacttcccggtgctcattgtccacggagacagcggctgccagggggatgggcagggtgcgctctgagannnnnnnnnnnnnnnnnnnnnnnnnnnnnnnnccattccaccatgggcttagatgccccggtgatcgtcgtccaaaacaggcgggaaaacagaccagccacacacaaggggcaggggtgagggtg

SEQ ID NO: 27711 - DNA, 1921 bp, Macaca Mulatta
  misc_feature (1)...(1921): n = A,T,C or G
cagagcatgttttgatgaacttcaatctgattacctagaatattggctcattttagattacgtatcagacatagtctatttaattgatatgtttgtacgaacaaggacaggnnnnnnnnnnnnnnnnnnnnnnnnnnnnnnnnnnnnnnnnnnnnnnnnnnnnnnnnnnnnnnnnnnnnnnnnnnnnnnnnnnnnnnnnnnnnataccaactgatttgctgtattctatttagggtggaactatccagaaattagattaaacaggtcattacgaatctctcgtatgtttgagttcttccagagaacagaaacaaggacaaactatccaaacatcttcaggatttccaaccttgttatgtacatcgtcatcattatccactggaatgcatgtgtgtactactctatttctaaagctattggatttggaaatgatacatgggtctaccctgatactaatgatcctgaatttggccgtttggctagaaaatacgtatacagcctttactggtctacactgactttgactaccattggtgaaacaccccctcctgtgagggattctgagtatgtctttgtggtggttgatttcctaattggagtgctaatttttgctaccatcgttggtaacataggttctatgatttccaacatgaatgcggccagagcagaatttcaagcaagaattgatgctatcaagcaatatatgcattttcgaaatgtaagcaaagatatggaaaagagagttattaaatggtttgactacctgtggaccaacaaaaaaacagttgatgagaaagaagtcttaaagtatctacctgataaactaagagcagaaattgccatcaatgttcacttagacacattaaaaaaggtacgcatttttgctgattgtgaagctggtctgttggtggagttggtcttgaaattgcaaccccaagtctacagtcctggagattatatnnnnnnnnnnnnnnnnnnnnnnnnnnnnnnnnnnnnnnnnnnnnnnnnnnnnnnnnnnnnnnnnnnnnnnnnnnnnnnnnnnnnnnnnnnnnnnnnnnnnnnnnnnnnnnnnnnnnnnnnnnnnnnnnnnnnnnnnnnnnnnnnnnnnnnnnnnnnnnnnnnnnnnnnnnnnnnnnnnnnnnnnnnnnnnnnnnnnnnnnnnnnnnnnnnnnnnnnnnnnnnnnnnnnnnnnnnnnnnnnnnnnnnnnnnnnnnnnnnnnnnnnnnnnnnnnnnnnnnnnnnnnnnnnnnnnnnnnnnnnnnnnnnnnnnnnnnnnnnnnnnnnnnnnnnnnnnnnnnnnnnnnnnnnnnnnnnnnnnnnnnnnnnnnnnnnnnnnnnnnnnnnnnnnntcctgcaaacaaggtttgcccgaatcttggctgagtatgagtccatgcagcagaaactgaaacaaagattaaccaaggttgagaaatttctgaaaccgcttattgacacagaattttcaagtattgagggacctggagtagaaagtgggcccattgactctacatagaactgaaaagctggtcattgacagggacacgcctcatgatccttctgatcttgtgactgacatcaaataaaactttaaagaagaggaagactcagttcggaaatttttccatgaggaaaatgtgctttgatgcaaggtacaaggcccacaccctctctgagagatactataattaaaaaagctttatatcttgggatttttcacaactgataatgtgcaaagatataaactgattaacttgtcaatggctgtatcttctgatttttttcacatatgctcgttttatgtaataatcttcataaaaatgaataagtatccctcactttcatgccatttccattgttgagtgaagtgtatttgaagtaactgagaattaccatgtacatcatgtttgggataacattt

SEQ ID NO: 27712 - DNA, 3055 bp, Macaca Mulatta
  misc_feature (1)...(3055): n = A,T,C or G
actggcggcgcctgagcagccgccatgttcggttgatatgctgcggccnnnnnnnnnnnnnnnnnnnnnnnnnnnnnnnnnnnnnnnnnnnnnnnnnnnnnnnnnnnnnnnnnnnnnnnnnnnnnnnnnngactgagctcctcttgcactctcacacacaaacgctgcccaggattacccgccagctcacgccgtgcagcgcgcttttccgctcctcgcgccccaccagcaacattgttctctcaggactcctgggttccaggggccggaattgggcctgagccggagaggaaagagacttggctttggccgaggggtcggaggattggggccagnnnnnnnnnnnacgcacttttgggggtgtggattatctcatccccgcagtgaggtaggagaggtcgccggctgcccgcctccctgccacctccctggcgacgccggcccgcggctgcccagcagcatgaggtggtgctggcggctccgggtcgtggcgcgaccgctgcggcggcggctgctcggggggcgctgaggtagccccccggagcggcaaggcggacgcgcttctcccctgcgcgccggggcctcgagactttttttctccagccgagaggacgnnnnnnnnnnnnnnnnnnnnnnnnnnnnnnnnnnnnnnnnnnnnnnnnnnnnnnnnnnnnnnnnnnnnnnnnnnnnnnnnnnnnnnnnnnnnnnnnnnnnnnnnnnnnnnnnnnnnnnnnnnnnnnnnnnnnnnnnnnnnnnnnnnnnnnnnnnnnnnnnnnnnnnnnnnnnnnnnnnnnnnnnnnnnnnnnnnnnnnnnnnnnnnnnnnnnnnnnnnnnnnnnnnnnnnnnnnnnnnnnnnnnnnnnnnnnnnnnnnnnnnnnnnnnnnnnnnnnnnnnnnnnnnnnnnnnnnnnnnnnnnnnnnnnnnnnnnnnnnnnnnnnnnnnnnnnnnnnnnnnnnnnnnnnnnnnnnnnnnnnnnnnnnnnnnnnnnnnnnnnnnnnnnnnnnnnnnnnnnnnnnnnnnnnnnnnnnnnnnnnnnnnnnnnnnnnnnnnnnnnnnnnnnnnnnnnnnnnnnnnnnnnnnnnnnnnnnnnnnnnnnnnnnnnnnnnnnnnnnnnnnnnnnnnnnnnnnnnnnnnnnnnnnnnnnnnnnnnnnnnnnnnnnnnnnnnnnnnnnnnnnnnnnnnnnnnnnnnnnnnnnnnnnnnnnnnnnnnnnnnnnnnnnnnnnnnnnnnnnnnnnnnnnnnnnnnnnnnnnnnnnnnnnnnnnnnnnnnnnnnnnnnnnnnnnnnnnnnnnnnnnnnnnnnnnnnnnnnnnnnnnnnnnnnnnnnnnnnnnnnnnnnnnnnnnnnnnnnnnnnnnnnnnnnnnnnnnnnnnnnnnnnnnnnnnnnnnnnnnnnnnnnnnnnnnnnnnnnnnnnnnnngattgtaaaaatttctcttaagtgcaaacagttttttattcaacttagaaaagaattcatgaatctagagaaacattattgggatttaatatggtgaattacagagcatgtaaaaatttgtggaaagcatgtgtagaacatcacacattcttccgtttggacagaccacttccacctcaaaagaatttttttgcacattattttacattaggttcaaaattccggtactgnnnnnnnnnnnnnnnnnnnnnnnnnnnnnnnnnnnnnnnnnnnnnnnnnnnnnnnnnnnnnnnnnnnnnnnnnnnnnnnnnnnnnnnnnnnnnnnnnnnnnnnnnnnnnnnnnnnnnnnnnnnnnnnnnnnnnnnnnnnnnnnnnnnnnnnnnnnnnnnnnnnnnnnnnnnnnnnnnnnnnnnnnnnnnnnnnnnnnnnnnnnnnnnnnnnnnnnnnnnnnnnnnnnnnnnnnnnnnnnnnnnnnnnnnnnnnnnnnnnnnnnnnnnnnnnnnnnnnnnnnnnnnnnnnnnnnnnnnnnnnnnnnnnnnnnnnnnnnnnnnnnnnnnnnnnnnnnnnnnnnnnnnnnnnnnnnnnnnnnnnnnnnnnnnnnnnnnnnnnnnnnnnnnnnnnnnnnnnnnnnnnnnnnnnnnnnnnnnnnnnnnnnnnnnnnnnnnnnnnnnnnnnnnnnnnnnnnnnnnnnnnnnnnnnnnnnnnnnnnnnnnnnnnnnnnnnnnnnnnnnnnnnnnnnnnnnnnnnnnnnnnnnnnnnnnnnnnnnnnnnnnnnnnnnnnnnnnnnnnnnnnnnnnnnnnnnnnnnnnnnnnnnnnnnnnnnnnnnnnnnnnnnnnnnnnnnnnnnnnnnnnnnnnnnnnnnnnnnnnnnnnnnnnnnnnnnnnnnnnnnnnnnnnnnnnnnnnnnnnnnnnnnnnnnnnnnnnnnnnnnnnnnnnnnnnnnnnnnnnnnnnnnnnnnnnnnnnnnnnnnnnnnnnnnnnnnnnnnnnnnnnnnnnnnnnnnnnnnnnnnnnnnnnnnnnnnnnnnnnnnnnnnnnnnnnnnnnnnnnnnnnnnnnnnnnnnnnnnnnnnnnnnnnnnnnnnnnnnnnnnnnnnnnnnnnnnnnnnnnnnnnnnnnnnnnnnnnnnnnnnnnnnnnnnnnnnnnnnnnnnnnnnnnnnnnnnnnnnnnnnnnnnnnnnnnnnnnnnnnnnnnnnnnnnnnnnnnnnnnnnnnnnnnnnnnnnnnnnnnnnnnnnnnnnnnnnnnnnnnnnnnnnnnnnnnnnnnnnnnnnnnnnnnnnnnnnnnnnnnnnnnnnnnnnnnnnnnnnnnnnnnnnnnnnnnnnnnnnnnnnnnnnnnnnnnnnnnnnnnnnnnnnnnnnnnnnnnnnnnnnnnnnnnnnnnnnnnnnnnnnnnnnnnnnnnnnnnnnnnnnnnnnnnnnnnnnnnnnnnnnnnnnnnnnnnnnnnnnnnnnnnnnnnnnnnnnnnnnnnnnnnnnnnnnnnnnnnnnnnnnnnnnnnnnnnnnnnnnnnttaaatgtcaccaatattggccacaacccacaggcagttcatcttatggatgctaccaagttacctgccactctgaggaaggaaacactgcctatatcttcaggaagatgacactgtttaaccaagag

SEQ ID NO: 27713 - DNA, 785 bp, Macaca Mulatta
ggaagtgttacatttcaggcatctgcacatcacattgtgaccaggtaaagcttagatgtcatttcccacattatccaaactgtgcatctcaaacatatcctcgtctcagtaaagacaagtttctatttcatactgttaagtgcgggaagttgagagagatacaaatccagtgaaaacacattaatctcaattcaactcagttaaaaaaaaaaagcaaatttaaattagtttttttcagagaagaaagggaaaggagttcatggggttaagagtcaaaactgtgacaatggttggcagctatacctggcatgttgtagctctggaaactatctgtcatatgatattttaaaataaagtggcttttgtggattttttcttttttggtattgtaaacatgtactgtttaatattacccgaatttaatttaaaacatgtttgcaaacaaaacaaaattaaaagcctttaaggcaaacctccccctaaggaaaaaagtcatttgttataaaattgtgaggatacccacgcaagaccccacttaagatttgtcagcatgaacttgagagcttttgtccactgctcctcagagttaaactgggttttgatggaataggagccgccgctgcctcctgtgtcttcaatcttgcctttctccacatccatcctgtagggaagacaaaaacgtgtctcgcctttctcaacctcttctttgaactgctgcacacagtccaggaaagccaccattgcatggtcaaacttgttgtcccagaaaaaccgcaacccccccc

SEQ ID NO: 27714 - DNA, 1768 bp, Macaca Mulatta
  misc_feature (1)...(1768): n = A,T,C or G
aaggacctctgcgagagctgcagcggtgccaaggtgatccgtgagaagaaattatcgaggtacatgttgaaaaaggtnnnaggtatgaaagatgggcaaaagatactatttcatggagaaggagatcaggagcctgagctggagcctggtgatgtcataattgtgcttgatcagaaggatcatagtgtctttcagagacgaggccatgacttgatcatgaaaatgaaaattcagctttctgaagctctttgtggcttcaagaagacgataaaaacactggacaatcgaattcttgttattacatccaaatcaggnnnnnnnnnnnnnnnnnnnnnnnnnnnnnnnnnnnnnnnnnnnnnnnnnnnnnnnnnnnnnnnnnnnnnnnnnnnnnnnnnnnnnnnnnnnnnnnnnnngtaatcttccctgaaaaacactggctttctctggaaaagcttcctcagctggaagctttactgcctcctcgacagaaagtgaggattacagatgacatggatcaggtggagctgaaggagttttctcccaatgagcagaactggcgtcagcacagggaggcctatgaggaggacgaagacgggccccgggctggagtgcagtgccagacagcatnnnnnnnnnnnnnnnnnnnnnnnnnnnnnnnnnnnnnnnnnnnnnnnnnnnnnnnnnnnnnnnnnnnnnnnnnnnnnnnnnnnnnnnnnnnnnnnnnnnnnnnnnnnnnnnnnnnnnnnnnnnnnnnnnnnnnnnnnnnnnnnnnnnnnnnnnnnnnnnnnnnnnnnnnnnnnnnnnnnnnnnnnnnnnnnnnnnnnnnnnnnnnnnnnnnnnnnnnnnnnnnnnnnnnnnnnnnnnnnnnnnnnnnnnnnnnnnnnnnnnnnnnnnnnnnnnnnnnnnnnnnnnnnnnnnnnnnnnnnnnnnnnnnnnnnnnnnnnnnnnnnnnnnnnnnnnnnnnnnnnnnnnnnnnnnnnnnnnnnnnnnnnnnnnnnnnnnnnnnnnnnnnnnnnnnnnnnnnnnnnnnnnnnnnnnnnnnnnnnnnnnnnnnnnnnnnnnnnnnnnnnnnnnnnnnnnnnnnnnnnnnnnnnnnnnnnnnnnnnnnnnnnnnnnnnnngatgatcctcttaaagaacaaaagcacatccatggatcggacatggctgcctgtgcctgcttaacagggccaacttagttcttactgttctgtgcccttcagtggatggaatgtgagtgtgtctgatcatctctcttggaagttttatgaaccttccaagctctgtggtgaggacaaaccagtgttttgaatcatatggtgataactgtttgccgtgaccctcacaccttgttcttcatggttttaatgattttctgttgacaacttttgcagtgctttcccaccaaagtgcttacctgtaaagaaaactaaataaatatgtgtccccggcagcctcagtgcagcaacggaagctgagggagaatgctaatgatttggcccatggcacagccagtttctctggccagtaatctggggtgacttgagggtctgcaaaggcatagaactccccagtgttttgcacctcattctcccagattcagctcccttccaaaggattgttcctctcattgcacagccgtattacaaagggcttcatgctcaagtgatgttttggtaagaactgctgtgagttccactgtggattacagtttgtaaagactaatactgtaaattatagcttgtttggaggggtgtcagtcattattt

SEQ ID NO: 27715 - DNA, 74 bp, Macaca Mulatta
ggctggtgcatttgttttagatccaatgtgcggacttggaacaatacttttggaagctgctaaagaatggccag

SEQ ID NO: 27716 - DNA, 1742 bp, Macaca Mulatta
  misc_feature (1)...(1742): n = A,T,C or G
agctctcacagaaagagacgctggtcaccctgtttgacaatcggacgtgggtccaccagggcctggtggaggagctagaaccacccagcacctcacaggcctggaacccaccacgaacgaacgtcttcctcaccctggtcatcttcattctcatgannnnnnnnnnnnnnnnnnnnnnnnnnnnnnnnnnnnnnnnnnnnnnnnnnnnnnnnnnnnnnnnnnnnnnnnnnnnnnnnnnnnnnnnnnnnnnnnnnnnnnnnnnnnnnnnnnnnnnnnnnnnnnnnnnnnnnnnnnnnnnnnnnnnnnnnnnnnnnnnnnnnnnnnnnnnnnnnnnnnnnnnnnnnnnnnnnnnnnnnnnnnnnnnnnnnnnnnnnnnnnnnnnnnnnnnnnnnnnnnnnnnnnnnnnnnnnnnnnnnnnnnnnnnnnnnnnnnnnnnnnnnnnnnnnnnnnnnnnnnnnnnnnnnnnnnnnnnnnnnnnnnnnnnnnnnnnnnnnnnnnnnnnnnnnnnnnnnnnnnnnnnnnnnnnnnnnnnnnnnnnnnnnnnnnnnnnnnnnnnnnnnnnnnnnnnnnnnnnnnnnnnnnnnnnnnnnnnnnnnnnnnnnnnnnnnnnnnnnnnnnnnnnnnnnnnnnnnnnnnnnnnnnnnnnnnnnnnnnnnnnnnnnnnnnnnnnnnnnnnnnnnnnnnnnnnnnnnnnnnnnnnnnnnnnnnnnnnnnnnnnnnnnnnnnnnnnnnnnnnnnnnnnnnnnnnnnnnnnnnnnnnnnnnnnnnnnnnnnnnnnnnnnnnnnnnnnnnnnnnnnnnnnnnnnnnnnnnnnnnnnnnnnnnnnnnnnnnnnnnnnnnnnnnnnnnnnnnnnnnnnnnnnnnnnnnnnnnnnnnnnnnnnnnnnnnnnnnnnnnnnnnnnnnnnnnnnnnnnnnnnnnnnnnnnnnnnnnnnnnnnnnnnnnnnnnnnnnnnnnnnnnnnnnnnnnnnnnnnnnnnnnnnnnnnnnnnnnnnnnnnnnnnnnnnnnnnnnnnnnnnnnnnnnnnnnnnnnnnnnnnnnnnnnnnnnnnnnnnnnnnnnnnnnnnnnnnnnnnnnnnnnnnnnnnnnnnnnnnnnnnnnnnnnnnnnnnnnnnnnnnnnnnnnnnnnnnnnnnnnnnnnnnnnnnnnnnnnnnnnnnnnnnnnnnnnnnnnnnnnnnnnnnnnnnnnnnnnnnnnnnnnnnnnnnnnnnnnnnnnnnnnnnnnnnnnnnnnnnnnnnnnnnnnnnnnnnnnnnnnnnnnnnnnnnnnnnnnnnnnnnnnnnnnnnnnnnnnnnnnnnnnnnnnnnnnnnnnnnnnnnnnnnnnnnnnnnnnnnnnnnnnnnnnnnnnnnnnnnnnnnnnnnnnnnnnnnnnnnnnnnnnnnnnnnnnnnnnnnnnnnnnnnnnnnnnnnnnnnnnnnnnnnnnnnnnnnnnnnnnnnnnnnnnnnnnnnnnnnnnnnnnnnnnnnnnnnnnnnnnnnnnnnnnnnnnnnnnnnnnnnnnnnnnnnnnnnnnnnnnnnnnnnnnnnnnnnnnnnnnnnnnnnnnnnnnnnnnnnnnnnnnnnnnnnnnnnnnnnnnnnnnnnnnnnnnnnnnnnnnnnnnnnnnnnnncccccttgaggggaaaggggtagaactaagatgggtttataactggaacctccaatgaccagatgtatatagagatttacaaagatttttatattaatttaataaaacaaattcttaaatagaacaaaataaac

SEQ ID NO: 27717 - DNA, 778 bp, Macaca Mulatta
gggctagtggcttgacgtatccgcgggagcagcagggtggcgggaggaaccgttacgggaactgaagctgccgattaagcctgatcaagatgacaacctcccaaaagcaccgagacttcgtggcagagcccatgggggagaagccagtggggagcgtggctgggattggtgaagtcctgggcaagaagctggaggagaggggctttgacaaggcctatgttgtccttggccagtttctggtgctaaagaaagatgaagacctcttccgggaatggctgaaggacacgtgtggcgccaacgccaagcagtcccgggactgcttcggatgccttcgagagtggtgtgacgccttcttgtgatgctctctgggaagctctcaatccccagccctcatccagaatttgcagccgagtagggactcctcccctgccctctacgaaggaaaagattgctattgtcgtactcacctccgaagtactccagggtcttttgggagttttctccccctaacctttcaactttttttggattctcgctcttgcatgccctccccccgcccttttttcccttgcctagttccctgggaggaaagttaacaaacttttcctgcaaatgggatttcttgggcccgccgttccctttaacccccccaacctgtcaattttataagttttctgtttatgtataatcaattcttaggctctccccctattttttggggcgcgggaaaagacgatcgctccctgctctcccttattttaaaaaagtgtttactttt

SEQ ID NO: 27718 - DNA, 693 bp, Macaca Mulatta
gcagcagcacgaaggttttcctcctgccctgggcccaggcgagaagaggattaaaggacgcaccggctggccgcagcaagtctgggcgctggagttaaaccagtgagccgaggcccgcgccgaggacctggccaggccagccactcctggagccccgggaggagaggaaggcagcggcgaacgccaggctctgggctccggcggctggtgctacgcatcccgcggagcttctgctgagcgccggcagatcgtcggctgcaaccacacacttggatcgcacgtgcaatgtcctttgaattttttaaaatacattaagagaaagagaaatatatatatatccaccccccgcccaaccgagggcggctcttggccacaccatgcaggaaggagggactgcccaacctaagggcgcaaagacgcactcttccacccttttggggcgaatttagaacctcagccccatccccatttccctatctggctctttctttcttgtccctccaaatgatccgccttgacaacctattctctaattaaaatgcaataaggaatcaattcttttctgcctgagaagcagaaccagatgcaggaaggtgaaaggctgccctttgttcttcttcgaatcgtggtggttttataggatttttctttttgtcgctgcacttcctgtttagtttcaagggaaacactttc

SEQ ID NO: 27719 - DNA, 699 bp, Macaca Mulatta
  misc_feature (1)...(699): n = A,T,C or G
gtggactccatatgctcataagaaccacacaatggacaagtgagctacattcatgggagcagccaggctcagtttgtggcagaatcacacattattctggtactgaatgccgctatcaccatggggatggttcttctaaatgaagcagcaacttcgaaaggagatgttggaaaaagacggactttttaattaaatgaagccaagtgggatttgcataaagtgaatgttaccatgaagataaactgttcctgactttatactattttgaattcattcatttgattgtgatcagctagcttattcttgtgtactttttttaaactgtgggttttcctagtaaatttaatttatagaaatcaatggtagcatttagtgttctacaaaggaaatatcaaagtgtttttcaagcctattatattcagtgtgtgccacaggattgaaataaatgacaatgtaattnnnnnnnnnnnnnnnnnnnnnnnnnnnnnnnnnnnnnnnnnnnnnnnnnnnnnnnnnnnnnnnnnnnnnnnnnnnnnnnnnnnnnnnnnnnnnnnnnnnnnnnnnnnnnnnnnnnnnnnnnnnnnnnnnnnnnnnnnnnnnnnnnnnnnnnnnnnnnnnnnnnnnnnnnnnnnnnnnnnnnnnnnnnnnnnnnnnnnnnnnnnnnnnnnnnnnnnnnnnnnnnnnnnnnnnnnnnnnnnn

SEQ ID NO: 27720 - DNA, 597 bp, Macaca Mulatta
aggccaagtgagagagcccaggccacaggacatgctgccattctgccaagagaggctcttctgggggccaggctgggactgggccccggaaaccaaaagtccgtgccttacccagctggggccctcccggagccttctttgggtgttgtggctgggaccccaacaggcaccagtaccctgccagggctagtgccctcctggactgcctgcacgcgccagcctcctacctgcttcctaaaggcgaccctggcccacacccgcatgcacccggtgcagcctgccaagggccagtcgggggggctgtgtcctgccagtgtccaccacagctctgcctgcccttcagcccagcagggtttaatcaaaacgcaatgctttgcgagtctttactgctcggaggtggctgagttgggggccctgggcaggggtaggctggcaggcagtgccatggcaggccagggtcccctcccgtggggtctggcccccatcccagcatgtccagcccctgaagttggagtggggagcggtctgcatttgctgccaccgccaggcgtctgccctgcagctgaaacttggccatcagaacaacagaaaacccct

SEQ ID NO: 27721 - DNA, 493 bp, Macaca Mulatta
ttctgccaaccaagcctcttgggcaagttgctaacttgttttgggctgtgcccactttctcagtagagttgaaaccttggcgcactttatgcctgggcagcaatgtcctacaggaaagggccacttaaccccagcctaagtaaccaagaatatcactgcaaagtttccttccagagggatgtgagactccctccagatcagagtatggaaaggtattttgaaccatgggcccagtgccaggaatcatttcattctgctgttcacctttcacctcccataaaatcagttccctctctttagtaccacacgagaatcccataggatgatcaggcaacaggtggggtctagagaaggaaagagctactaaataaaaactatgttcatacttacgtgatataccttaagatcaaaaaaggaatgttctatttccatcccctgtggtatctttctcctatctgataagtcatcttcctgacacatatgatactttttg

SEQ ID NO: 27722 - DNA, 135 bp, Macaca Mulatta
tcagttggtaattttatccaatgagatgactacagacttgatattttgcttttgttgttcctttgtgtcactaagagttgatataaaactgtgaagtgacctctacgtgtgtaaacaagacacacaggtctaaat

SEQ ID NO: 27723 - DNA, 4319 bp, Macaca Mulatta
  misc_feature (1)...(4319): n = A,T,C or G
tcagattcctgaatttgacaacttgtacctggatatgaatggaattatacatcagtgctcccatcctaatgatgatgatgttcactttagaatttcagatgataaaatctttactgatatttttcactacctggaggtgttgtttcgcattattaaacccaggaaagtgttctttatggctgtcgatggtgtggctcctcgagcaaaaatgaaccagcagcgtgggaggcgttttaggnnnnnnnnnnnnnnnnnnnnnnnnnnnnnnnnnnnnnnnnnnnnnnnnnnnnnnnnnnnnnnnnnnnnnnnnnnnnnnnnnnnnnnnnnnnnnnnnnnnnnnnnnnnnnnnnnnnnnnnnnnnnnnnnnnnnnnnnnnnnnnnnnnnnnnnnnnnnnnnnnnnnnnnnnnnnnnnnnnnnnnnnnnnnnnnnnnnnnnnnnnnnnnnnnnnnnnnnnnnnnnnnnnnnnnnnnnnnnnnnnnnnnnnnnnnnnnnnnnnnnnnnnnnnnnnnnnnnnnnnnnnnnnnnnnnnnnnnnnnnnnnnnnnnnnnnnnnnnnnnnnnnnnnnnnnnnnnnnnnnnnnnnnnnnnnnnnnnnnnnnnnnnnnnnnnnnnnnnnnnnnnnnnnnnnnnnnnnnnnnnnnnnnnnnnnnnnnnnnnnnnnnnnnnnnnnnnnnnnnnnnnnnnnnnnnnnnnnnnnnnnnnnnnnnnnnnnnnnnnnnnnnnnnnnnnnnnnnnnnnnnnnnnnnnnnnnnnnnnnnnnnnnnnnnnnnnnnnnnnnnnnnnnnnnnnnnnnnnnnnnnnnnnnnnnnnnnnnnnnnnnnnnnnnnnnnnnnnnnnnnnnnnnnnnnnnnnnnnnnnnnnnnnnnnnnnnnnnnnnnnnnnnnnnnnnnnnnnnnnnnnnnnnnnnnnnnnnnnnnnnnnnnnnnnnnnnnnnnnnnnnnnnnnnnnnnnnnnnnnnnnnnnnnnnnnnnnnnnnnnnnnnnnnnnnnnnnnnnnnnnnnnnnnnnnnnnnnnnnnnnnnnnnnnnnnnnnnnnnnnnnnnnnnnnnnnnnnnnnnnnnnnnnnnnnnnnnnnnnnnnnnnnnnnnnnnnnnnnnnnnnnnnnnnnnnnnnnnnnnnnnnnnnnnnnnnnnnnnnnnnnnnnnnnnnnnnnnnnnnnnnnnnnnnnnnnnnnnnnnnnnnnnnnnnnnnnnnnnnnnnnnnnnnnnnnnnnnnnnnnnnnnnnnnnnnnnnnnnnnnnnnnnnnnnnnnnnnnnnnnnnnnnnnnnnnnnnnngactttctggctgatcaagctgcatgttatgttcaggcaatacagtggattttgcactattactatcatggagttcagtcctggagctggtnnnnnnnnnnnnnnnnnnnnnnnnnnnnnnnnnnnnnnnnnnnnnnnnnnnnnnnnnnnnnnnnnnnnnnnnnnnnnnnnnnnnnnnnnnnnnnnnnnnnnnnnnnnnnnnnnnnnnnnnnnnnnnnnnnnnnnnnnnnnnnnnnnnnnnnnnnnnnnnnnnnnnnnnnnnnnnnnnnnnnnnnnnnnnnnnnnnnnnnnnnnnnnnnnnnnnnnnnnnnnnnnnnnnnnnnnnnnnnnnnnnnnnnnnnnnnnnnnnnnnnnnnnnnnnnnnnnnnnnnnnnnnnnnnnnnnnnnnnnnnnnnnnnnnnnnnnnnnnnnnnnnnnnnnnnnnnnnnnnnnnnnnnnnnnnnnnnnnnnnnnnnnnnnnnnnnnnnnnnnnnnnnnnnnnnnnnnnnnnnnnnnnnnnnnnnnnnnnnnnnnnnnnnnnnnnnnnnnnnnnnnnnnnnnnnnnnnnnnnnnnnnnnnnnnnnnnnnnnnnnnnnnnnnnnnnnnnnnnnnnnnnnnnnnnnnnnnnnnnnnnnnnnnnnnnnnnnnnnnnnnnnnnnnnnnnnnnnnnnnnnnnnnnnnnnnnnnnnnnnnnnnnnnnnnnnnnnnnnnnnnnnnnnnnnnnnnnnnnnnnnnnnnnnnnnnnnnnnnnnnnnnnnnnnnnnnnnnnnnnnnnnnnnnnnnnnnnnnnnnnnnnnnnnnnnnnnnnnnnnnnnnnnnnnnnnnnnnnnnnnnnnnnnnnnnnnnnnnnnnnnnnnnnnnnnnnnnnnnnnnnnnnnnnnnnnnnnnnnnnnnnnnnnnnnnnnnnnnnnnnnnnnnnnnnnnnnnnnnnnnnnnnnnnnnnnnnnnnnnnnnnnnnnnnnnnnnnnnnnnnnnnnnnnnnnnnnnnnnnnnnnnnnnnnnnnnnnnnnnnnnnnnnnnnnnnnnnnnnnnnnnnnnnnnnnnnnnnnnnnnnnnnnnnnnnnnnnnnnnnnnnnnnnnnnnnnnnnnnnnnnnnnnnnnnnnnnnnnnnnnnnnnnnnnnnnnnnnnnnnnnnnnnnnnnnnnnnnnnnnnnnnnnnnnnnnnnnnnnnnnnnnnnnnnnnnnnnnnnnnnnnnnnnnnnnnnnnnnnnnnnnnnnnnnnnnnnnnnnnnnnnnnnnnnnnnnnnnnnnnnnnnnnnnnnnnnnnnnnnnnnnnnnnnnnnnnnnnnnnnnnnnnnnnnnnnnnnnnnnnnnnnnnnnnnnnnnnnnnnnnnnnnnnnnnnnnnnnnnnnnnnnnnnnnnnnnnnnnnnnnnnnnnnnnnnnnnnnnnnnnnnnnnnnnnnnnnnnnnnnnnnnnnnnnnnnnnnnnnnnnnnnnnnnnnnnnnnnnnnnnnnnnnnnnnnnnnnnnnnnnnnnnnnnnnnnnnnnnnnnnnnnnnnnnnnnnnnnnnnnnnnnnnnnnnnnnnnnnnnnnnnnnnnnnnnnnnnnnnnnnnnnnnnnnnnnnnnnnnnnnnnnnnnnnnnnnnnnnnnnnnnnnnnnnnnnnnnnnnnnnnnnnnnnnnnnnnnnnnnnnnnnnnnnnnnnnnnnnnnnnnnnnnnnnnnnnnnnnnnnnnnnnnnnnnnnnnnnnnnnnnnnnnnnnnnnnnnnnnnnnnnnnnnnnnnnnnnnnnnnnnnnnnnnnnnnnnnnnnnnnnnnnnnnnnnnnnnnnnnnnnnnnnnnnnnnnnnnnnnnnnnnnnnnnnnnnnnnnnnnnnnnnnnnnnnnnnnnnnnnnnnnnnnnnnnnnnnnnnnnnnnnnnnnnnnnnnnnnnnnnnnnnnnnnnnnnnnnnnnnnnnnnnnnnnnnnnnnnnnnnnnnnnnnnnnnnnnnnnnnnnnnnnnnnnnnnnnnnnnnnnnnnnnnnnnnnnnnnnnnnnnnnnnnnnnnnnnnnnnnnnnnnnnnnnnnnnnnnnnnnnnnnnnnnnnnnnnnnnnnnnnnnnnnnnnnnnnnnnnnnnnnnnnnnnnnnnnnnnnnnnnnnnnnnnnnnnnnnnnnnnnnnnnnnnnnnnnnnnnnnnnnnnnnnnnnnnnnnnnnnnnnnnnnnnnnnnnnnnnnnnnnnnnnnnnnnnnnnnnnnnnnnnnnnnnnnnnnnnnnnnnnnnnnnnnnnnnnnnnnnnnnnnnnnnnnnnnnnnnnnnnnnnnnnnnnnnnnnnnnnnnnnnnnnnnnnnnnnnnnnnnnnnnnnnnnnnnnnnnnnnnnnnnnnnnnnnnnnnnnnnnnnnnnnnnnnnnnnnnnnnnnnnnnnnnnnnnnnnnnnnnnnnnnnnnnnnnnnnnnnnnnnnnnnnnnnnnnnnnnnnnnnnnnnnnnnnnnnnnnnnnnnnnnnnnnnnnnnnnnnnnnnnnnnnnnnnnnnnnnnnnnnnnnnnnnnnnnnnnnnnnnnnnnnnnnnnnnnnnnnnnnnnnnnnnnnnnnnnnnnnnnnnnnnnnnnnnnnnnnnnnnnnnnnnnnnnnnnnnnnnnnnnnnnnnnnnnnnnnnnnnnnnnnnnnnnnnnnnnnnnnnnnnnnnnnnnnnnnnnnnnnnnnnnnnnnnnnnnnnnnnnnnnnnnnnnnnnnnnnnnnnnnnnnnnnnnnnnnnnnnnnnnnnnnnnnnnnnnnnnnnnnnnnnnnnnnnnnnnnnnnnnnnnnnnnnnnnnnnnnnnnnnnnnnnnnnnnnnnnnnnnnnnnnnnnnnnnnnnnnnnnnnnnnnnnnnnnnnnnnnnnnnnnnnnnnnnnnnnnnnnnnnnnnnnnnnnnnnnnnnnnnnnnnnnnnnnnnnnnnnnnnnnnnnnnnnnnnnnnnnnnnnnnnnnnnnnnnnagcatcttatgtgaacaagcctcacagtgctcatgagtaccataatgttcagtctatggacaatgtgtgttggcctgcccccagccagatccctcctgtatccacaccagtaactgaactttctcgaatttgttcccttgttggaatgccacaacctgatttctcctttcttagga

SEQ ID NO: 27724 - DNA, 2891 bp, Macaca Mulatta
  misc_feature (1)...(2891): n = A,T,C or G
aggaagtaatttcttacctggtcattatttagcctacaataatttcatccttcttcagcatgaccagtatgttcttcccatactcttgaacagagcataattggaatggagaggtgnnnnnnnnnnnnnnnnnnnnnnnnnnnnnnnnnnnnnnnnnnnnnnnnnnnnnnnnnnnnnnnnnnnnnnnnnnnnnnnnnnnnnnnnnnnnnnnnnnnnnnnnnnnnnnnnnnnnnnnnnnnnnnnnnnnnnnnnnnnnnnnnnnnnnnnnnnnnnnnnnnnnnnnnnnngaactccagaaatcaggagacggagacattttgtcacttttgcaacattggaccaaatacaatgaagtattcttgctgtgctctggttttggctgtcctgggcacagaattgctgggaagcctctgttcgactgtcagatccccgaggttcagaggacggatacagcaggaacgaaaaaacattcgacccaacattattcttgtgcttaccgatgatcaagatgtggagctggngggtccctgcaagtcatgaacaaaacgagaaagattatggaacatggtggggccaccttcatcaatgcctttgtgacaacacccatgtgctgcccgtcacggtcctccatgctcaccgggaagtatgagcacaatcacaatgtctacaccaacaatgagaactgctcttcaccctcgtggcaggccatgcatgagcctcggacttttgctgtatatcttaacaacactggctacagaacannnnnnnnnnnnnnnnnnnnnnnnnnnnnnnnnnnnnnnnnnnnnnnnnnnnnnnnnnnnnnnnnnnnnnnnnnnnnnnnnnnnnnnnnnnnnnnnnnnnnnnnnnnnnnnnnnnnnnnnnnnnnnnnnnnnnnnnnnnnnnnnnnnnnnnnnnnnnnnnnnnnnnnnnnnnnnnnnnnnnnnnnnnnnnnnnnnnnnnnnnnnnnnnnnnnnnnnnnnnnnnnnnnnnnnnnnnnnnnnnnnnnnnnnnnnnnnnnnnnnnnnnnnnnnnnnnnnnnnnnnnnnnnnnnnnnnnnnnnnnnnnnnnnnnnnnnnnnnnnnnnnnnnnnnnnnnnnnnnnnnnnnnnnnnnnnnnnnnnnnnnnnnnnnnnnnnnnnnnnnnnnnnnnnnnnnnnnnnnnnnnnnnnnnnnnnnnnnnnnnnnnnnnnnnnnnnnnnnnnnnnnnnnnnnnnnnnnnnnnnnnnnnnnnnnngctgtataacatgctcgtggagacgggagagctggagaacacttacatcatttacaccgctgaccatggttaccacattggacagtttggactggtcaaggggaaatccatgccatatgactttgatattcgtgtgcctttttttattcgtggtccaagtgtagaaccaggatcaannnnnnnnnnnnnnnnnnnnnnnnnnnnnnnnnnnnnnnnnnnnnnnnnnnnnnnnnnnnnnnnnnnnnnnnnnnnnnnnnnnnnnnnnnnnnnnnnnnnnnnnnnnnnnnnnnnnnnnnnnnnnnnnnnnnnnnnnnnnnnnnnnnnnnnnnnnnnnnnnnnnnnnnnnnnnnnnnnnnnnnnnnnnnnnnnnnnnnnnnnnnnnnnnnnnnnnnnnnnnnnnnnnnnnnnnnnnnnnnnnnnnnnnnnnnnnnnnnnnnnnnnnnnnnnnnnnnnnnnnnnnnnnnnnnnnnnnnnnnnnnnnnnnnnnnnnnnnnnnnnnnnnnnnnnnnnnnnnnnnnnnnnnnnnnnnnnnnnnnnnnnnnnnnnnnnnnnnnnncctgctcacagtccggcagagcacgcggaacctctacgctcgcggcttccatgacagagacaaagagtgcagttgtagggagtccggttaccgtgccagcggaagccaaagaaagagtcaacggcaattcttgagaaaccaggggactccaannnnnnnnnnnnnnnnnnnnnnnnnnnnnnnnnnnnnnnnnnnnnnnnnnnnnnnnnnnnnnnnnnnnnnnnnnnnnnnnnnnnnnnnnnnnnnnnnnnnnnnnnnnnnnnnnnnnnnnnnnnnnnnnnnnnnnnnnnnnnnnnnnnnnnnnnnnnnnnnnnnnnnnnnnnnnnnnnnnnnnnnnnnnnnnnnnnnnnnnnnnnnnnnnnnnnnnnnnnnnnnnnnnnnnnnnnnnnnnnnnnnnnnnnnnnnnnnnnnnnnnnnnnnnnnnnnnnnnnnnnnnnnnnnnnnnnnnnnnnnnnnnnnnnnnnnnnnnnnnnnnnnnnnnnnnnnnnnnnnnnnnnnnnnnngattgaagctctgcaagataaaattaagaatttaagagaagtgagaggacatctgaagagaaggaagcctgaggaatgcagctgcagtaaacaaagnagctattacaataaagagaaaggtgtaaaanagcaagagaaaataaagagccatcttcacccattcaagnnnnnnnnnnnnnnnnnnnnnnnnnnnnnnnnnnnnnnnnnnnnnnnnnnnnnnnnnnnnnnnnnnnnnnnnnnnnnnnnnnnnnnnnnnnnnnnnnngggaagagtgcagcctgcctggccttacttgtttcacgcacgacaacaaccactggcagacagccccgttctggaacnnnnnnnnnnnnnnnnnnnnnnnnnnnnnnnnnnnnnnnnnnnnnnnnnnnnnnnnnnnnnnnnnnnnnnnnnnnnnnnnnnnnnnnnnnnnnnnnnnnnnnnnnnnnnnnnnnnnnnnnnnnnnnnnnnnnnnnnnnnnnnnnnnnnnnnnnnnnnnnnnnnnnnnnnnnnnnnnnnnnngaatcagctacacgtacaattaatggagctcagaagctgtcaaggatataagcagtgcaacccaagacctaagaatc

SEQ ID NO: 27725 - DNA, 399 bp, Macaca Mulatta
cttcggagacagctgcaaattcctccatgaccgttcagattacaagcatgggtggcagatcgaacgtgagcttgatgagggtcgctatggtgtctatgaggatgaaaactatgaagtgggaagcgatgatgaggaaataccattcaagtgtttcatctgtcgccagagcttccaaaacccagttgtcaccaagtgcaggcattatttctgcgagagctgtgcactgcagcatttccgcaccaccccgcgctgctatgtctgtgaccagcagaccaatggcgtcttcaatccagcgaaagaattgattgctaaactagagaagcatcgagctacaggagagggtggtggtgcttccgacttgccagaagaccccgatgaggatccaattcccgttactta

SEQ ID NO: 27726 - DNA, 862 bp, Macaca Mulatta
  misc_feature (1)...(862): n = A,T,C or G
ggaacacatcccagaacaattactgaaaagctgaaatgagtggtgaggtagcccaatgagggcgaatgacatcacagcttgacctctccagaacactaatatcttaaaatagagaacatgctgcgttaagtgcattagtgcttcaagcagaaaatgctgaaaaacagcctgtaaagtactgaatctgagtaggctgaccctgagaagggacaattaaagagacaaccaagggaacacattgagactacaaaaatatgaataatctcaattatattcatcacacttttttcataccatttcaagaaaagactagataagagtaaccacatgaatattttactttcttcagtataccttgagaagcaaactttgtaggaagccactcttctcccttaaacttctgccaaacaataataaagtcaactggaaactaattggagccgttttaactggggcctgacatgctttaaattatctggctctattctaaatcaacacctaaacccccaaggaaactgcagaatcaatatacagggtaatagctttggttcagagctccaataatgtgcttcagatctgtccatgtggaaatgctttcatccaaattttaaaattggtggttaccaaagagttcaacagtgagacactctgagctcaaccataacctgattatacctcagggtgcgtgtgtaaacctaannnnnnnnnnncanaaaaagcgggggttttggtaatacacccctctccttttcccgggcgaggggcattagaaaaaacactcttttttttaaaacacctcccccggctataatttaaaagaaattgggcaccccccccttcccccaattaaaaattacccccc

SEQ ID NO: 27727 - DNA, 575 bp, Macaca Mulatta
  misc_feature (1)...(575): n = A,T,C or G
gcgcctgattaatctctctgagctgaccccatacatcttgtgttccatttgcaaaggctacttaatagatgcaactaccattacagaatgtcttcatacctntttgtaaaagctgcattgtaagacatttttactacagcaacagatgtccaaaatgcaatatagtagtacatcagacacaacctctttataacataaggtnnnnnnnnnnnnnnnnnnnnnnnnnnnnnnnnnnnnnnnnnnnnnnnnnnnnnnnnnnnnnnnnnnnnnnnnnnnnnnnnnnnnnnnnnnnnnnnnnnnnnnnnnnnnnnnnnnnnnnnnnnnnnnnnnnnnnnnnnnnnnnnnnnnnnnnnnnnnnnnnnnnnnnnnnnnnnnnnnnnnnnnnnnnnnnnnnnnnnnnnnnnnnnnnnnnnnnnnnnnnnnnnnnnnnnnnnnnnnnnnnnnnnnnnnnnnnnnnnnnnnnnnnnnnnnngccattggaaaagaagtttgttcgagtttcaggagaagcaactattggacatgtagaaaaattcctcagaagaaaaatgggtcttgatccagcttgtcaggta

SEQ ID NO: 27728 - DNA, 727 bp, Macaca Mulatta
  misc_feature (1)...(727): n = A,T,C or G
cgcccgtctcagcctcccaaatgtgctgggatacaagcttgagccaccgcgcccggctttttttacatcttaaaagtattttattcataataaaaggccagtgagaatgatgaggcaactcctcttattaggggtacacaagtataactgaatgttaaaaacaatcttctttaaaaccaatgattatgattccctaagattggagggggttagtttgaagtacagaagtagaagaggttggaaaagggtttggatgtttttaaattcagcactggagttcttggcaatgagttcctgttaaagaagtgggtttacttaaagacaagataacctgggctagaaaataacatattcatctgcctttgggatatnnnnnnnnnnnnnnnnnnnnnnnnacacaaacttttgaaagagaaggaatatcactgtcttgatgaaggagacagctgtatgttacagagcacacgtgaatgctgcactgtgcccacattccaccactattgccatcagaaaaagaactacattagtatcaccagaccagctcagataggggaggtcttcctaaagttgacaccacataatgaaccatgagttaatgactacctttcaagctaatgtacggttaacgaacaatggatcaggagtgagaatctgtaaatacaaagtaccaaagatcttcattaagaaacattcgcagaatcagtgctgctgttgcgaacccagtcac

SEQ ID NO: 27729 - DNA, 473 bp, Macaca Mulatta
gaagcctggagaggggagtgacctactcggagtcattgcagagccggaatggggaccaggtctcccatctcctactttatgatgttctcttccctcttgatgatgtcttttcaaagcaaatgaagtgccttttcccgaggctggggctgggggtggctgggaggggaagagaagggagaggcaagctggctgtgaactatcataaaatagggccggagctgctcccacctccctgacttacccctgctgcaccattcccccagctgggctggaaggttccataactggtcagctgcccccattctggcagcattcccagacccggggtactctcataggggcagctcaggaactgagactaccgttcaacgccagtggtgctggttttcaggagcatgaggtagccttcaatccttggactccatgaccttccccttcatgctgactggaccttccttccagggcttttcctt

SEQ ID NO: 27730 - DNA, 1638 bp, Macaca Mulatta
  misc_feature (1)...(1638): n = A,T,C or G
actatgtcttcagcagtggtgcagttatatgcagcagatcggaactgtatgtggtcaaagaagtgcagtggtgttgcttgtcttgttaaggacaatccacagagatcttattttttaagaatatttgacattaaggnaggatgggaaactattgtgggaacaagagctatacaataactttgtatataatagtcctagaggatattttcatacctttgctggagatnnnnnnnnnnnnnnnnnnnnnnnnnnnnnnnnnnnnnnnnnnnnnnnnnnnnnnnnnnnnnnnnnnnnnnnnnnnnnnnnnnnnnnnnnnnnnnnnnnnnnnnnnnnnnnnnnnnnnnnnnnnnnnnnnnnnnnnnnnnnnnnnnnnnnnnnnnnnnnnnnnnnnnnnnnnnnnnnnnnnnnnnnnnnnnnnnnnnnnnnnnnnnnnnnnnnnnnnnnnnnnnnnnnnnnnnnnnnnnnnnnnnnnnnnnnnnnnnnnnnnnnnnnnnnnnnnnnnnnnnnnnnnnnnnnnnnnnnnnnnnnnnnnnnnnnnnnnnnnnnnnnnnnnnnnnnnctgaataatttggatccagaattgaagaatctttttgatatgtgtggaatctcagaggcacagcttaaagacagagaaacatcaaaagttatatatgactttattgaaaaaacaggaggtgttgaagctgttaaaaatgaactgcgaaggcaannnnnnnnnnnnnnnnnnnnnnnnnnnnnnnnnnnnnnnnnnnnnnnnnnnnnnnnnnnnnnnnnnnnnnnnnnnnnnnctcctgccaggggaagaggcgctcctcccccaccaccttcaagagctcccacagctgcacctccaccaccgcctccttccaggccaagtgtagcagtccctccaccaccgccaaataggatgtaccctcctccacctccagcccttccctcctcagcaccttcagggcctccaccaccacctccatctgtgttgggggtagggccagtggcaccacccccaccgcctccacctccgcctccacctgggccaccgccccccactggcttgccttctgacggggaccatcaggttccaactactgcaggaaacaaagcagctcttttagatcaaattagagagggtgctcagctaaaaaaagtggagcagaacagtcggccagtgtcctgctctggacgagatgcactgttagaccagatacgacagggtatccaactaaagtctgnnnnnnnnnnnnnnnnnnnnnnnnnnnnnnnnnnnnnnnnnnnnnnnnnnnnnnnnnnnnnnnnnnnnnnnnnnnnnnnnnnnnnnnnnnnnnnnnnnnnnnnnnnnnnnnnnnnnnnnnnnnnnnnnnnnnnnnnnnnnnnnnnnnnnnnnnnnnnnnnnnnnnnnnnnnnnnnnnnnnnnnnnnnnnnnnnnnttttaaggtgaaatactaaactctactttctgtctgtggattctgtaaaattatcatgtaaatgttctaccaatttgctgtatatttttgttgcnnnnnnnnnnnnnnnnaatctgtgcaatacctcatttaatctgtaaaggtttgtcgtaatcctctacaaagctactccctgttattgtgtgcaagtgtacaccaggatgctcac

SEQ ID NO: 27731 - DNA, 104 bp, Macaca Mulatta
gtctcctgcagctgaaagccttgaagccaggagttattcaaatcttgggagtcaagacatccagattcctgtgccagaagccagatggggccctgtatggatcg

SEQ ID NO: 27732 - DNA, 1741 bp, Macaca Mulatta
  misc_feature (1)...(1741): n = A,T,C or G
atggtgtccaagactgagaaatggatggaacgaatacacctcaatgtctnnnnnnnnnnnnnnnnnnnnnnnnnnnnnnnnnnnnnnnnnnnnnnnnnnnnnnnnnnnnnnnnnnnnnnnnnnnnnnnnnnnnnnnnnnnnnnnnnnnnnnnnnnnnnnnnnnnnnnnnnnnnnnnnnnnnnnnnnnnnnnnnnnnnnnnnnnnnnnnnnnnnnnnnnnnnnnnnnnnnnnnnnnnnnnnnnnnnnnnnnnnnnnnnnnnnnnnnnnnnnnnnnnnnnnnnnnnnnnnnnnnnnnnnnnnnnnnnnnnnnnnnnnnnnnnnnnnnnnnnnnnnnnnnnnnnnnnnnnnnnnnnnnnnnnnnnnnnnnnnnnnnnnnnnnnnnnnnnnnnnnnnnnnnnnnnnnnnnnnnnnnnnnnnnnnnnnnnnnnnnnnnnnnnnnnnnnnnnnnnnnnnnnnnnnnnnnnnnnnnnnnnnnnnnnnnnnnnnnnnnnnnnnnnnnnnnnnnnnnnnnnnnnnnnnnnnnnnnnnnnnnnnnnnnnnnnnnnnnnnnnnnnnnnnnnnnnnnnnnnnnnnnnnnnnnnnnnnnnnnnnnnnnnnnnnnnnnnnnnnnnnnnnnnnnnnnnnnnnnnnnnnnnnnnnnnnnnnnnnnnnnnnnnnnnnnnnnnnnnnnnnnnnnnnnnnnnnnnnnnnnnnnnnnnnnnnnnnnnnnnnnnnnnnnnnnnnnnnnnnnnnnnnnnnnnnnnnnnnnnnnnnnnnnnnnnnnnnnnnnnnnnnnnnnnnnnnnnnnnnnnnnnnnnnnnnnnnnnnnnnnnnnnnnnnnnnnnnnnnnnnnnnnnnnnnnnnnnnnnnnnnnnnnnnnnnnnnnnnnnnnnnnnnnnnnnnnnnnnnnnnnnnnnnnnnnnnnnnnnnnnnnnnnnnnnnnnnnnnnnnnnnnnnnnnnnnnnnnnnnnnnnnnnnnnnnnnnnnnnnnnnnnnnnnnnnnnnnnnnnnnnnnnnnnnnnnnnnnnnnnnnnnnnnnnnnnnnnnnnnnnnnnnnnnnnnnnnnnnnnnnnnnnnnnnnnnnnnnnnnnnnnnnnnnnnnnnnnnnnnnnnnnnnnnnnnnnnnnnnnnnnnnnnnnnnnnnnnnnnnnnnnnnnnnnnnnnnnntgccccccgaggcgtgagggtccggaaaatcaagcccctttctgagattcactctgggaactcggtcagcctccaatgtgacttctcaagcagccaccccaaagaagtccagttcttctgggagaaaaatggcagccttctggggaaagaaagccagctgaattttgactccatctccccagaagatgctgggagttacagctgctgggtgaacaactccataggacagacggcgtccaaggcctggacactcgaagtgctgtnatgcacccaggaggctgcgtgtgtccatgagccaggggaaccaagtgatggaggggaagacggcaaccctgatctgtgagagtgacgccaaccctcccgtctacagctacgcctggtttgactggaataaccaaagccttccctactccggccggatgctgagattggagccggtgaaggtccagcactccggtgcttactggtgccaggggaccaacagagtgggcaagggccactcgcctctcatcaccctcaccgtctacttagcccgcagaccattggcaggcgagtggctgtgggactcgcgtcctgcctggccatcctcatcctg

SEQ ID NO: 27733 - DNA, 807 bp, Macaca Mulatta
gggccatccttcacggtgacacccacggctacggagagcactggaacaaccagccacaggactaccaagagccacaaaaccaccactcacaggacaaccaccacaggcaccaccagccacagacccacaactgccacgcacaaccccaccaccaccagccacagaaacgccacggttcatccaacaagcaacagcactgccaccagccagggaccctcaactgccactcacaggcctgccaccactagtcatggaaatgccacagttcatccaacaagcaacagcactgccaccagcccaggactcaccagttctgcccacccaggaccacctccgccctctccgagtcctagcccggcctccaaggagaccattggagactacatgtggaccaatggttcccagccctgtgtccacctccaagcccagattcagattcgagtcatgtacacaacccagggtggaggagaggcctggggcatctctgtactgaaccccaaacaaaaccaaggtccaggggaactgtgaaggggcccaaccccacctgcttccttcattcccctaaggaaaacctcagcctttggaattcatggcaggaacctccaaccaggagggtttggtctaaccttgaactatactggagaagattggaaataccaaatgtaggtcgtttccccgccaatgccgaactccatttgggaaaattttcttccggactctacgaaataggcctatcccccagtcagaaagaaagtttaccacaaagaccacacaccacttggggagggccacagaaaatatcttctt

SEQ ID NO: 27734 - DNA, 710 bp, Macaca Mulatta
  misc_feature (1)...(710): n = A,T,C or G
gggagctggaggctacttccgccttcttagcatctggtcagagagctgatggataccccatttggtcccgacaagatgacatagatttgcaaaaagatgatgaggataccagggaggcattggtcaaaaaatttggtgctcagaatgtagctcggaggattgaatttcgaaagaaataattggcaagataatgagaaaaaaaagtcatggtagatgaggtggttaaaaaaaattgtgaccaatgaactttggagagttcttgcattggaactggcacttactttttgaccattgctgctgttgctctgtgagtcctagattttgtagccaagcagagttgtagagggggataaaaagaaaagaaattggatgtattttacaactctccttgaaaccaagtatccatggtgtttatgaaaaaggaagatctaaacccaaacagccagtttgggtctaccttagtaagtaaatccttttggttggaaatgggaaaaccccttggcctataatttaagtgaaccaaaattggaaaagggaaaatttttagggaaaggccataaggccccaatttttccagggcccccccctaaaggaaaaaccccccccggggtccccttttggggacnnnnnnnnnnnnnnnnnnnnnnnnnnnnnnnnnnnnnnnnnnnnncccccccaatttaaaggggaaaatttctttggagaaaaat

SEQ ID NO: 27735 - DNA, 153 bp, Macaca Mulatta
aatttccagcaggccaggcagtggccgctttgactgcttgcttcggagatccgagacaacggagaaggcactcttatttaccgacctagaaagccctttccccgccctccgttagctaattaaaacatttttcagggacatagccatccagag

SEQ ID NO: 27736 - DNA, 382 bp, Macaca Mulatta
tcagataccgtggatgtggatgacttcccctaatgcctatcgggaagcctctaaaatggggtgtacggtctggccagaaacactgtagaagtagtaggcagatgtcctccttcccctggacatctcctacagagaggaatggacccaggctgtcattcgaggaagaactgcagagccttcagcctctccaaacatgtaggaaatgaggaaatccctgtgttgttaatgcagagaacaaactctgtttagttgcagggatatatcccaaagtcctctacccccttacttttatggccctttccctagatatactgcaggatctctccttaggataaagagttgttgttgaagttgtatatttttgatcaatatatttggaaat

SEQ ID NO: 27737 - DNA, 187 bp, Macaca Mulatta
  misc_feature (1)...(187): n = A,T,C or G
ngaactagtggcgggctgaggacgccgtacccctcggaaggcagccctacggtccctttgccgcccgttccctcccggacatggaggacgtggaggcgcgcttcgctcacctcttgcagcccatccgcgatctcaccaagaactgggaggtggacgtggcggcccagctgggcgagtatctggagga

SEQ ID NO: 27738 - DNA, 1064 bp, Macaca Mulatta
gggggtgagcggccatcttgctcctgccctgacagattctcctgtcggggtcacagggactctaagattgctacctgcaccttcgctgaccatgctgtcccgggtggtactttccgccgccgccacagcggccccgtctctgaagaatgcagccttcctgggtccaggagtattgcaggcaacaaggaccttccatacagggcagccacaccttgcccctataccgcctcttcctgaatatggaggaaaagttcgttatggactgatccctgaggaattcttccagtttctttatcctaaaactggtgtaacaggaccctatgtgctcggaactgggcttatcttgtatgctttatccaaagaaatatatgtgattaccgcagagaccttcactgccatgtcattaatagggataatggtctatggaattaaaaaatatggtccgactgttgcagcatatgctgataaaatcaatgagcaaaaacttgcccaactagaagaggcgaagcagtcttccatccagcaaatgcagaatgcaattgatacggagaagtcacagcaggcactgactcagaagcgccattacctttttgatgtgcaaaggaataacattgctatggctttggaggttacttaccgggaacgactatatagagtatataaggaagtaaagagtcgcctggactatcatatagctgtgcagaacatgacgcgtcgaaaggaacaagagcacatgataaattgggtggaaaagcacgtggtgcaaagcatctccgcagagcaggaaaaggagacagttgccaagtgcattgcggacctaaagctgctggcaaagaaggctcaagcacccctggttatgtaaatgaatctatcccaattgagacagctagaaacagttgacagactaaatggatactagtctatttgacgaaatctttctgtattgatgtctactgaagttataatttacccttcctaaaaatgaaaagtttgtttcatatagtaagagaacaaaatctctatcggccagtcaaatgtttctcatccttcttactctggctttg

SEQ ID NO: 27739 - DNA, 416 bp, Macaca Mulatta
tgagacagctaccctgtgtgggactgaatggcaagatttgttaactctttccctttgtgacttcaagaaccctgacttctgtttctgcaaaggcatctgaatgtgtctgtgttcctgtaggcataatgtgaggaggtggggagaccagcccaaccccatgtccaccatgaccctcttccccacgctgacctgcattccttccccaatcacctttcctgttccagaaatggggctgggatgtctccatctctgtctcaactttatggtgcactgagctataacttcttacttccctattaaaattagaatctgagtataaatttactttttcaaatgatttccaagagaggttgatgggttaattaaaggagaagattcctgaaatttgagagacaaaataaatggaagacatgaga

SEQ ID NO: 27740 - DNA, 113 bp, Macaca Mulatta
gaacagcctcgcacagagtctgagtgcgtgaacagcttcaccctgaaaatgtttctttttcagttcgtcaatctgaacagctccacattttacatcgcattcttcctcggaag

SEQ ID NO: 27741 - DNA, 814 bp, Macaca Mulatta
tgcacgtgctcacgcacaacctgcgccacaagtgcggcgtgtgtggcaaggccttctcgcggccctggctgctgcagggccacatgcgctcgcacactggcgagaagccgttcggctgcgcgcactgcggcaaggccttcgccgaccgctccaacctgcgcgcgcacatgcagacgcactcggccttcaagcactaccgctgccgccagtgcgacaagagcttcgcgctcaagtcctacctccacaagcactgcgaggcagcctgcgtcaagggggccgagccgcccccgccgacccctgctggcccggccagctgagccttccgcctcgcccgcgcgcctggaactcgctctccacgcgccccgggtccgctacctgcgcccgcagcgccctcgcccaccccccgctgcgtttccctgcccatgcccctctcgtgaggacccctgaccagccctgaactattctctccagcccccaagcctacgactcacttccagcaccgtcttccccagcgtccccctacccactgcttcctttccggccacccctcggaccttgaccccctgtccgcgccttcaaggctcccaactcaggcaccaggtccgcacctctcccgcgccaagagccggaaatttctcccgcccagaccccgcgctgctcttctaacttctagatgatttctgtcgcttctcagctgaatctctctgaccattcctctgttggagcccccaatgaaagccgcatacaaaggcccttgacgcccatgcctgcctcagtttccccatccatacctggacgcaggccctgccgccct

SEQ ID NO: 27742 - DNA, 256 bp, Macaca Mulatta
gcctcggtgatgtcgtgggttcaaggagcgtccttggtccggggccctggagacaaaggggacgtgtttgacgaggaggcagacgagtcgctcctggcgcagcgggaatggcagagccacatgcagagacgagtcaaaaaggttatagagatggaatagatgctggaaaagcagttactcttcaacagggcttcaatcaaggttataaggaaggcgcagaagtcattttaaactatggacgactccgaggaacatt

SEQ ID NO: 27743 - DNA, 409 bp, Macaca Mulatta
ggagagctgtccgaccaagcccgtggtccccgggccctgcttcgggggccgcaccctggaggagatctggagggcggccaccccgacgctgaccaccttccccaccatccgcgtcggcagcgacgtgtggggcgagcgcagcctggcggcggcgcggcgtagggcacgccaggtcttgcgagtgaacctggaacccatggtgaggctccgccgcttcccggtgccccgggcgtgaggcgcggcctccagggcgcctcctgccggccccgaccgtgggacagagcttccgcccggaggaatgaacagtgtcagtcgagtgtttacagatccgggccggaacccgggccccagtgcactttacgcgcgaaaaagtcaccggatggttgtccctgtcccgggtcccggcgcc

SEQ ID NO: 27744 - DNA, 979 bp, Macaca Mulatta
attattaccaattataaagcttattttaagaacaagttttaactatttttcttactgtttggtttgttcagagtaagattgtttgggcatctttgttctggatttatgtgttgccctgtcatgaagatcccagaggtgtaaatgagtccagagaaacatcctctcacccatggtcagtgactaatttagacacagctcaggagtttccggctgagataagacccttggcctttttaaggctaaattgagagagggaccaagtggagtgtcgtggggtggggagagagggagacagagatggagggaaggatattgattgtgggttttatgaacttgcatactaggtttatcttagtaaaaatgttgatcagtacaactgaggtcatatcgtcttctgtttttcctgtggtggaattaaccatgcttttgttcttcatctcgattgcaggtgtgttcatcctcgaggtggtgtgattcagagtgtttcttcatggaagcatggctcgggcacgcagtatgttagcaccaggcaaacacagtcatggactgctgtgactccccagcagacttgggcttcaccagcagaagttgttgaccttaccttggatgaggatagcaggcgtaaatacctactgtaatacaatgtcactgtgtttcctctgcactgttcccttccacttcctcatcctttgtgacatggaagttcattgtcatagcttcagcttcagaagctgtttgtggcatttgtaggattcaaactcatggaaaattccctcctcttcccctttttttaattaaaagaagtcacgtaggaaaataacttatcacagagaaaagaatttcttccttcactcagtaggaatatgagaatgatgaattttattagacagctttattttacttggtgacttttaatcttaggaaactctgccttccttttagaaatatattttaattgccagggcaaatgggtttcagt

SEQ ID NO: 27745 - DNA, 296 bp, Macaca Mulatta
agggccccttaaagggctttctggaggcactgggtaggctgcagaagaagttctactccaaaggcctacggctggagtgcccaattcgtacttacttggtgacagcacgcagtgcagccagttctggggcccgggctctcaagaccctgcgcagctggggcctggagacagatgaagccttgttcctcgctggagcacccaagggccccctcctagagaagatccgcccacacatcttctttgatgaccagatgttccatgtggttggtggggaggagatgggcactgtggccgcc

SEQ ID NO: 27746 - DNA, 654 bp, Macaca Mulatta
ccgacacttagcttctgatgccatcattaatgagaactatgactacctgaaggggtcttggaagacctggcacctccagagcgcagcagcctcattcaggattgggaaacatctgggcttgtttaccctggactatattagagtaattgaaatgctccaccatatacagcaggtggattgctcaggttatgacctggaacagttacacatcaaagtgacttcactgtgcagtcgcatagagcagattcagtgttacaatgctaaagatcgcctagctcagtcagacatggccaaacgtgtagccaacctgctgcgggtggtgctgagtctgcatcatgctcctgatagaacctccgactcaacaccagaccctcagcgagtccctttgcgcctcttggttccccacattggccggctccccatgcctgaggactatgccatggacgaactgcgcagccttacccagtcctatctgcgagaactcgctgttgggagcctgtgagccccagactctttgcatcacactcacatgcccgttcacactcaccacacagaggttccctgccttgattggattggcactgtatgccattctctgggttggctatgggatctgccctccttccctgctgccacaagcagcatcctccagtt

SEQ ID NO: 27747 - DNA, 849 bp, Macaca Mulatta
  misc_feature (1)...(849): n = A,T,C or G
cacgtcgggggcgggcccggcgagcgcgggaaggctctgcggagcggccggcagtcctcagccttctcgcgtcatggccctatcggttccctgctactcacccaggtaccgaaagccgcccgaggtnnnnnnnncgacagaaaagggcccggagccgtggagctgccgcctccccgccccgtgagctgccggagccggcggcccgccgagccgccctggcggcggggttgcaccttcgccctttccctgccgcggggggcagaggcggtggcggcggcccggccgctgcccagaggaaccctttcgcccgcctggacaaccgaccgcgggtcgccgcggagctccccgacgggccggcccgcgagcagccggaggcgccgggcccgtttttagattctaatcaagaaaatgatttgctatggcaagagaagttccctgaaagaacaactgttactgaattaccccagacttcacatgtatcgttctccgagtctgatattccatcctcagaaaaaactgagttacctgtggactggagtattaaaacccgactccttttcatctcttctcaaccctttacctgggcagatcatttgaaagcacaggaagaggctcaaggtcttgtccagcattgtagggcaacagaagttactttgcctaaaagtatacaggatcccaaactctccactgagctccgttgtgccttctagcagagccttatctattggctccagcctgctttgtcttggctaccactggaccctcgtattggagctgatagaaaaatggctggaaagacaagtccttggtcaaatgatgcaaccctgcagcatgttttaatgagtgact

SEQ ID NO: 27748 - DNA, 606 bp, Macaca Mulatta
  misc_feature (1)...(606): n = A,T,C or G
ggggaacggaggcaggtcggagccgctgccgtcgccatgacccgcggtaaccagcgtgagctcgcccgccagaagaatatgaaaaagcagagcgactcggttaagggaaagcgccgagatgacgggctttctgctgccgcccgcaagcagagggactcggagatcatgcagcagaagcagaaaaaggcaaacgagaagaaggaggaacccaagtagctttgtggcttcgtgtccaaccctcttgcccttcgcctgtgtgcctggagccagtcccaccacgctcgcgtttcctcctgtagtgctcacaggtcccagcaccgatggcattccctttgccctgagtctgcagcgggtcccttttgtgcttccttcccctcaggtagcctctctccccctgggccactcccgggggtgagggggtntntnnttcttactctcttttttgattttaactcatcctcatcatcctccctcgtttttatgcactcttcgagatactcttctctcatcctattttctcttcacgtgtactatctcttcccattttattctttctgctttctattatctttgttcctttttcattacctctttttttctcttcct

SEQ ID NO: 27749 - DNA, 1761 bp, Macaca Mulatta
  misc_feature (1)...(1761): n = A,T,C or G
caggatctttaatgaaaaaacactttggccacttcgagacgataaacactcactgggcaaaacaacttcactgaaaagagacctcatattatgcnnnnnnnnnnnnnnnnnnnnnnnnnnnnnnnnnnnnnnnnnnnnnnnnnnnnnnnnnnnnnnnnnnnnnnnnnnnnnnnnnnnnnnnnnnnnnnnnnnnnnnnnnnnnnnnnnnnnnnnnnnnnnnnnnnnnnnnnnnnnnnnnnnnnnnnnnnnnnnnnnnnnnnnnnnnnnnnnnnnnnnnnnnnnnnnnnnnnnnnnnnnnnnnnnnnnnnnnnnnnnnnnnnnnnnnnnnnnnnnnnnnnnnnnnnnnnnnnnnnnnnnnnnnnnnnnnnnnnnnnnnnnnnnnnnnnnnnnnnnnnnnnnnnnnnnnnnnnnnnnnnnnnnnnnnnnnnnnnnnnnnnnnnnnnnnnnnnnnnnnnnnnnnnnnnnnnnnnnnnnnnnnnnnnnnnnnnnnnnnnnnnnnnnnnnnnnnnnnnnnnnnnnnnnnnnnnnnnnnnnnnnnnnnnnnnnnnnnnnnnnnnnnnnnnnnnnnnnnnnnnnnnnnnnnnnnnnnnnnnnnnnnnnnnnnnnnnnnnnnnnnnnnnnnnnnnnnnnnnnnnnnnnnnnnnnnnnnnnnnnnnnnnnnnnnnnnnnnnnnnnnnnnnnnnnnnnnnnnnnnnnnnnnnnnnnnnnnnnnnnnnnnnnnnnnnnnnnnnnnnnnnnnnnnnnnnnnnnnnnnnnnnnnnnnnnnnnnnnnnnnnnnnnnnnnnnnnnnnnnnnnnnnnnnnnnnnnnnnnnnnnnnnnnnnnnnnnnnnnnnnnnnnnnnnnnnnnnnnnnnnnnnnnnnnnnnnnnnnnnnnnnnnnnnnnnnnnnnnnnnnnnnnnnnnnnnnnnnnnnnnnnnnnnnnnnnnnnnnnnnnnnnnnnnnnnnnnnnnnnnnnnnnnnnnnnnnnnnnnnnnnnnnnnnnnnnnnnnnnnnnnnnnnnnnnnnnnnnnnnnnnnnnnnnnnnnnnnnnnnnnnnnnnnnnnnnnnnnnnnnnnnnnnnnnnnnnnnnnnnnnnnnnnnnnnnnnnnnnnnnnnnnnnnnnnnnnnnnnnnnnnnnnnnnnnnnnnnnnnnnnnnnnnnnnnnnnnnnnnnnnnnnnnnnnnnnnnnnnnnnnnnnnnnnnnnnnnnnnnnnnnnnnnnnnnnnnnnnnnnnnnnnnnnnnnnnnnnnnnnnnnnnnnnnnnnnnnnnnnnnnnnnnnnnnnnnnnnnnnnnnnnnnnnnnnnnnnnnnnnnnnnnnnnnnnnnnnnnnnnnnnnntcaaagagaacacatccattcgtaatttctctaatactgacctttctattctctattaataaaaaattaatacacacaattattcaattctattatattaaaataagtttaagtttataaccactagtctggtcagttaatgtagaaatttatatagtaaataaaacaggacataatcaaagacaactcactcaggcatcttctttctctaaacaccagaatctagtatgtaattcttttcaacactgtgcttaaagactaacttgaaagcaggcacagtttgatgaagggctagagggctatttgcaataaaaagtcaactttttttcctgatttgaagaagcaggataagcacacacccagaaaatcacctaagaaacccctcattgatttacttcatggcactgcaaaggaaaaggaatattaattgtatacttagcaag

SEQ ID NO: 27750 - DNA, 142 bp, Macaca Mulatta
aaccaccgtgactcgaggctgacaatcttcgagcaagagaacttcctgggcaagaaaggagagctgagcgatgactatccttccctccaggccatggggtgggaaggcaatgaagtagggtccttccatgtccactctgggg

SEQ ID NO: 27751 - DNA, 91 bp, Macaca Mulatta
tgtgtcctgaagctttgtcacatatctggataccaggtttgacctccagagatggctgctgtacactttttgcaactggtttgatatcaca

SEQ ID NO: 27752 - DNA, 648 bp, Macaca Mulatta
  misc_feature (1)...(648): n = A,T,C or G
tttcttttttccggcgttcaagagtcgaagcgaggacgtggtgggtcctctggtgcgaaattccggatttcgttgggtcttccggtaggagctgtgatcaattgtgctgacaacacaggagccaaaaacctgtatatcatctccgtgaaggggatcaagggacggctgaacagacttcccgctgctggtgtgggtgacatggtgatggccacagtcaagaaaggcaaaccagagctcagaaaaaaggtacatccagcagtggtcattcgacaacgaaagtcataccgtagaaaagatggcgtgtttctttattttgaagataatgcaggggtcatagtgaacaataaaggcgagatgaaaggttccgccattacaggaccagtagcaaaggagtgtgcagacttgtggccccggattgcatccaatgctggcagcattgcatgattctccagtatatttgtaaaaaataaaaattttaaaccnnnnnnnnnnnnnnnnnnnnnnnnnnnnnnnactagttctctcccaaatggctggtggagtatgtgatggtcaggaatgagatcacaggacatacctacaagttcccttgtggccggtggttagggaagggcatggatgatggaagcctggagcggatcctagttg

SEQ ID NO: 27753 - DNA, 466 bp, Macaca Mulatta
gctactgggagcttttgtctattgggtgccatgactctttgcttctgattgcaggtggtaacaccagatggacatgggaggaaccgagctaagtggggcctgctgaagaatatccagtctgccctccagaagcacttctgagccccttcagagcaggaagcaacctcagactcatcacaaagtagacatatatacacacacatatgtatgtatatttttctcaccacattcttcaaggaggttgtagacaaatgtttccgtgacctctcagctttccaacagtaatcttgtaagagctaataaaaggaaatacctgacatggcttgctgtttgttcagtgacagctattcgttatgatggcagtaataagcaagacagtcagtaagtctgtatgtttccatctgctcaggtctagtcctaggctcagaattctgtggtgttttgtaggagcaccacccagcttctg

SEQ ID NO: 27754 - DNA, 143 bp, Macaca Mulatta
gcacacctgtttaactttgaaccgctatagcagaagcagacaggccacagatggctcactgttctccattctctccagcctatctcatgatgagacaaaggggggttctgggctaatccccatccagttccgaaacatggtga

SEQ ID NO: 27755 - DNA, 735 bp, Macaca Mulatta
  misc_feature (1)...(735): n = A,T,C or G
tgtgggtactcacgcctgctgcttttgctgggaagctcctgagtgtgttcaggcaacctctgagctctctgtggaggagccttgtcccgctgttctgctggctgagggcaacctggctgctagcttccaagaggacaaagcagcagctggtctggagagagccagatgagaccaaagaggaggaagaggaccctcctctgtccaccaccccaaccagcgtcaactatcacttcactcgccagtgcaactacaaatgcggcttctgtttccacacagccaaaacatcctttgtgctgccccttgaggaagcaaagagaggattgcttttgcttaaggaagctggtnnnnnnnnnnnnnnnnnnnnnnnnnnnnnnnnnnnnnnnnnnnnnnnnnnnnnnnnnnnnnnnnnnnnnnnnnnnnnnnnnnnnnnnnnnnnnnnnnnnnnnnnnnnnnnnnnnnnnnnnnnnnnnnnnnnnnnnnnnnnnnnnnnnnnnnnnnnnnnngtgaatatttggacattctcgctgtctcctgtgacagctttgatgaggaagtcaatgtccttattggccgtggccaaggaaagaagaaccatgtggaaaaccttcaaaagctgaggacgtggtgtagggattatagagtcgctttcaagataaattctgtcattaatcgtttcaacgtggaagaggacatgacggaacagatcaaagcactaaaccccgtccgctggaaagt

SEQ ID NO: 27756 - DNA, 82 bp, Macaca Mulatta
catttatcagctgcctcttattcattgccttgattttcttcaaaagacagctataatcattcaaacattccaagttgagtcc

SEQ ID NO: 27757 - DNA, 587 bp, Macaca Mulatta
  misc_feature (1)...(587): n = A,T,C or G
gggcataagcagaggaaggaggtcaccaagcaagccggacttcctctacaaaaagtctgccctctgagagcaacctccaagtcgtctgtgcctgagatgtgaaacatcccattttatgatgtaacccaacaacttacagaccagtttatcaatgccagctgataactccgtttcatatgattttgttgtagtttttgtgtatatatgtgtttattagacacagcatgctaagaaannnnnnnnnnnnnnnnnnnnnnntgcatctgtctgatttgggttggaacattatgtcggggagcatttttaagacaagcaggcggcactttttatttccccttacaatggatggaatttttttgcccttggacatttattttccccggattgattttaaacccgaaggttaaactttttgccccctttaaagggcgggttttccaacctttttggattttccctttcccccccaaaccccgggggttggaatgcccacaaaaaatatttttcccacgaaaaannnnnnnnnnnnnnnnnnnntaaaaattctcaaaaacacccgcggaaaacgccccccctttcaaaatatg

SEQ ID NO: 27758 - DNA, 167 bp, Macaca Mulatta
atgcttcgggtcctgatgggggctgtcctccctgccgtgctactggctgccccaccgcccatcaacaagctggcactgttcccggataagagtgcctggtgcgaagccaagaacatcacccagattgtgggtcacagcggctgtgaggccaagtccatccagaacag

SEQ ID NO: 27759 - DNA, 728 bp, Macaca Mulatta
  misc_feature (1)...(728): n = A,T,C or G
gacaatatgcctgagccagctagtcagctcctgctcccaagaagggctccanagaaggctgtgaccaaggcgcaaaagaaggatggcaagaagcgcaagcgcagccgtaaggagagctactccgtatacgtgtacaaggtgctgaaacaggttcacccggataccggcatctcatcgaaagccatgggcatcatgaattcctttgtaaacgacatcttcgagcgcatcgcaggcgaggcttcccgcctggcgcactacaacaagcgctccaccatcacctccagggagatccagacggccgtgcgactgctgcttcctggagagctggccaagcacgcagtgtccgaaggcgccgtggctcacgccgnnnnnnnnnnnnnnnnnnnnnnnnnnnnnggacggatcacgaggtcaggggattgnnnnnnnnnnnnnnnnnnnnnnnnnnnnnnnnnnnnnnnnnnnnnnnnnnnnnnnnnnnnnnnnnnnnnnnnnnnnnnnnnnnnnnnnnnnnnnnnnnnnnnnnnnnnnnnnnnnnnnnnnnnnnnnnnnnnnnnnnnnnnnnnntnnnnnnnnnnnnngcnnnnnnnnnnnnnnnnnnnnnnnnnnnnnnnnnnnnnnnnnnnnnnaaataaacaaataaataaatttnnnnnnnnnnnnnnnnnnnnnnnnnnnnnnnnnnnnnnnnnnnnnnnnnnnnnnnnnnnnnnnnnnnnnnnnnnnnn

SEQ ID NO: 27760 - DNA, 244 bp, Macaca Mulatta
ctctccagctgtgaagggaggatgctgctgaggtcagtgcagccctgtgacccatgtgtctaatttccaggtgatcgaggctgaccaccacatggagaggatgttacaactctttgaacaaaatcgggatcgaatattaactccagagaatcggaagcttggcccataggaggcagaaggtctatggatcatgtctgaaaaatgcctgctgctgccaagttagctattatgagcaatctggaaa

SEQ ID NO: 27761 - DNA, 797 bp, Macaca Mulatta
  misc_feature (1)...(797): n = A,T,C or G
aaaatgctccacaaaaaataagtggctttaaagaagacntgaggaaagggagcaggccaacacccctctgacccacagtgaccagctgaatgaggagctccaacagaatgagctgcagccagagcaacagagtgagggacacagccggagcaacagagttaggggacacagccggagcaacagagttaggggacacagccggaacaacagagggggaggatgccaccatttcaactctctccctgagcagcgagtaatttcacggcaagcccagagacctaggatccatctgagaagtctgtagaggtctgacccagagaactcaacaacagggtacgccccatggtgatgaaaataaaatgaatctgttgtaaaaggaaaaaacaaaaaaagttacaacgtgttgctttgaaattcaacagtatattcacacgtgacatgtctggtcacagatgtctcaaaacattttgtatctccacagtacactgtttgccctgtaaaatttaaaagcaattctttaattttaaactatagcagcacagtaaattaggataagagagaaagacacaataccaggagtaaatatacttacatggtttctttaaaattacagattaagttctatgtggtactagtttacagcattctgcactattcttctacattgcaatttttgatgagtcgtctttacttttattttccattcctttccnnnnnnnnnnnnnnnnnnnnnatatggataaatagtagtttnnnnnnnnnnnnnnnnnntnnnnnnnnnnnnnnnnnnngggtcc

SEQ ID NO: 27762 - DNA, 328 bp, Macaca Mulatta
tgtttagtatgttgtgagtagatcatctaaaagaactgaagctacattatgtttttaacttcagaaggcatcatttataagacagtataagaggcagttaagtattataaattattttgatgaattgtgatactatctacatttaaaataaaaaatccttttgattatttaggatattttgtcttgtattggggcctctggtctgaggtgtgttgcatgctcttggagtcagctcatgacccagtaggcttggtagagtcctctgcctctcaagacgtgtcccagtttcttagcctgagctgtgtgaccttagatactggacatcaaa

SEQ ID NO: 27763 - DNA, 3171 bp, Macaca Mulatta
  misc_feature (1)...(3171): n = A,T,C or G
tggggttcgaaccgttaagacaagcgggccttggccgcgccagcgcgaggcgggcacggggtattgtnnnnnnnnnnnnnnnnnnnnnnnnnnnnnnnnnnnnnnnnnnnnnnnnnnnnnnnnnnnnnnnnnnnnnnnnnnnnnnnnnnnnnnnnnnnnnnnnnnnnnnnnnnnnnnnnnnnnnnnnnnnnnnnnnnnnnnnnnnnnnnnnnnnnnnnnnnnnnnnnnnnnnnnnnnnnnnnnnnnnnnagtttcctgtgggccgcattcacagacacttgaagactcgcaccacaagccatggaagggtgggtgccactgctgccgtgtacagtgctgcgattctggagtacctcactgcagaggtnctnnnnnnnnnnnnnnnnnnnnnnnnnnnnnnnnnnnnnnnnnnnnnnnnnnnnnnnnnnnnnnnnnnnnnnnnnnnnnnnnnnnnnnnnnnnnnnnnnnnnnnnnnnnnnnnnnnnnnnnnnnngagaagagaaggtgttcttagatcagaagatgtcattgtattaggtgactgcaaggttttggtgatctagtgaaacaagattctactgggatgtgtgctgagctgaaccaaggaaccgcccgaatgtgctgaacaaggacatttgcttctcagatacgtgaattcaattttaagcaagactcttgatctgcttcagagcagctttgatttaaagtaatttcagagcacttttccttgcatatgagtaattttctgaatgtataaaatgttctgtttatgtttgacctttcggataaactgtgttgctgcagtgttggtccacactaccatcctgagtgaagacttagtaagtctggggatctccaggcactggaaagggtgagaacctgggagtgaaagggttatagttagtgtccgtttttcaggttttgtttcacagggagtcctgagtggagtaacctgaaatgtgtaacagttgaacaccatcccattcctatccccagtaaaaataggcttttccacaattttctaccagttaacttagcnnnnnnnnnnnnnnnnnnnnnnnnnnnnnnnnnnnnnnnnnnnnnnnnnnnnnnnnnnnnnnnnnnnnnnnnnnnnnnnnnnnnnnnnnnnnnnnnnnnnnnnnnnnnnnnnnnnnnnnnnnnnnnnnnnnnnnnnnnnnnnnnnnnnnnnnnnnnnnnnnnnnnnnnnnnnnnnnnnnnnnnnnnnnnnnnnnnnnnnnnnnnnnnnnnnnnnnnnnnnnnnnnnnnnnnnnnnnnnnnnnnnnnnnnnnnnnnnnnnnnnnnnnnnnnnnnnnnnnnnnnnnnnnnnnnnnnnnnnnnnnnnnnnnnnnnnnnnnnnnnnnnnnnnnnnnnnnnnnnnnnnnnnnnnnnnnnnnnnnnnnnnnnnnnnnnnnnnnnnnnnnnnnnnnnnnnnnnnnnnnnnnnnnnnnnnnnnnnnnnnnnnnnnnnnnnnnnnnnnnnnnnnnnnnnnnnnnnnnnnnnnnnnnnnnnnnnnnnnnnnnnnnnnnnnnnnnnnnnnnnnnnnnnnnnnnnnnnnnnnnnnnnnnnnnnnnnnnnnnnnnnnnnnnnnnnnnnnnnnnnnnnnnnnnnnnnnnnnnnnnnnnnnnnnnnnnnnnnnnnnnnnnnnnnnnnnnnnnnnnnnnnnnnnnnnnnnnnnnnnnnnnnnnnnnnnnnnnnnnnnnnnnnnnnnnnnnnnnnnnnnnnnnnnnnnnnnnnnnnnnnnnnnnnnnnnnnnnnnnnnnnnnnnnnnnnnnnnnnnnnnnnnnnnnnnnnnnnnnnnnnnnnnnnnnnnnnnnnnnnnnnnnnnnnnnnnnnnnnnnnnnnnnnnnnnnnnnnnnnnnnnnnnnnnnnnnnnnnnnnnnnnnnnnnnnnnnnnnnnnnnnnnnnnnnnnnnnnnnnnnnnnnnnnnnnnnnnnnnnnnnnnnnnnnnnnnnnnnnnnnnnnnnnnnnnnnnnnnnnnnnnnnnnnnnnnnnnnnnnnnnnnnnnnnnnnnnnnnnnnnnnnnnnnnnnnnnnnnnnnnnnnnnnnnnnnnnnnnnnnnnnnnnnnnnnnnnnnnnnnnnnnnnnnnnnnnnnnnnnnnnnnnnnnnnnnnnnnnnnnnnnnnnnnnnnnnnnnnnnnnnnnnnnnnnnnnnnnnnnnnnnnnnnnnnnnnnnnnnnnnnnnnnnnnnnnnnnnnnnnnnnnnnnnnnnnnnnnnnnnnnnnnnnnnnnnnnnnnnnnnnnnnnnnnnnnnnnnnnnnnnnnnnnnnnnnnnnnnnnnnnnnnnnnnnnnnnnnnnnnnnnnnnnnnnnnnnnnnnnnnnnnnnnnnnnnnnnnnnnnnnnnnnnnnnnnnnnnnnnnnnnnnnnnnnnnnnnnnnnnnnnnnnnnnnnnnnnnnnnnnnnnnnnnnnnnnnnnnnnnnnnnnnntaataataagtaatgtgtgaatccattagaatgttgagaagtagacctgtgacatttcagaaaaatgtatatatcagacacagccatatatatcggtatcgccaagttggaagagcatcacagggcatagtttcatgaaagcttcaaaaaatatactaattgctggtaatatgtgaacagaaaagaatagccatgttaaaataggagtgcctgagaattagctctgttcatcttgtctcctagctgtaagcaccctagattcaaattatgcacctagaaaactaaattattgtgtatgttatagacctttgaaatggatacatgaaagttagtgaaatcggaatgaatgtttcgcctgccaaagatacgtatttttgtaagtgatacaagggccccatgagctccgtggccacatctgtacaaaacaggccctcctttcgggaactggtctcgggagagcaaaggggtcagctccctaaatggcagctgagacagccctccctggtggcatggccctgtttcctgttgatgtggtgatggttggagagtcaaatttttttttccagaatttgtgaatatcatctctgattaatgattacacaaaagcttttaaaattcttttaaattatttctttctaattctataaataaactgtagttgtacagccactgtacagctaacatttcaacactggaaatgaggctggtttattccagtttggcacagattcttcagggaagcccag

SEQ ID NO: 27764 - DNA, 672 bp, Macaca Mulatta
  misc_feature (1)...(672): n = A,T,C or G
tttgagacaggttctccctttgtcacccaggctgaagtgcagtggcataatcatggcttactgcagccttaacctcccaggctcaagtgatattcgcacctcagcctgcaaatagctgagactacagatatgtgccaccatnnnnnnnnnnnnnnnnnnnnnnctgtagacacagggtttgccatgttgttcaggctggtctcaaacttgcgagcttgagcaacccgcccatgnnnnnnnnnnnnnnnnnnnagactacaggcctgagccactgcttctggccaaatttttttcttctagctacttgaggctgccacatctggatggaactgagtggagggggaaaagaatgaaaaactcaaaagagttcccatgagggtgtcttgctttctctcctgagttacaatacttcagcaaaatcatcaggctttagagatatggtgtagtctgctaactttttaatgcccttacccacatttaccatgtttcctggccttcctctgtgtcaactcttagctcttcctaatcattatttaatacacgagtgagtttagtagtgatcatatttctcaggtccttcagaaggtggaattttaaaagaagtagaaggaagagtatatgaattctttggcgctcactccctgacttgcttatggccaggacagtctatcc

SEQ ID NO: 27765 - DNA, 282 bp, Macaca Mulatta
aaggcggagagggggccgaggcagaggcagagaagtgcagctgctgcgagtgaggaagcaccctctccatgtggagcacgtggagatagtgccaggtggctcagtgccacctatgcctgtggtgaggtgtggctggtgtccccttctcctgttgaccttaggggagtggcaataaatcccatgaacagcatgagccaaggactggtctcttcttaaaggggggaaggatgcggagcagtgggggggtctactccaagggagccacccagttgagtgaaaccc

SEQ ID NO: 27766 - DNA, 645 bp, Macaca Mulatta
  misc_feature (1)...(645): n = A,T,C or G
gggggtgctcgcttcggcagcacatatactaaaattggaacgatacagagaagattagcatggcccctgcgcaaggatgacacgcaaattcgtgaagcgttccatatttttaacttttgtaaccttttctagctctctatgtgactgagatatggaaaggcttctgtggggcatttttgcccttgtgttgttgccttttaggtcaacaaccttgacacttacacaaacagcagactgggaatcctctttgtaccagggtgttgctgggtgctgctgataaaagggactagagagtaaaggccttctggtcagcaggtcacttagtcaacagctctggtgtgtatgtcgggatgtgcttgctgccttcctgtcagcactagggtgtgttccctcctaagcctggaattaggagttccagattcctagtacttgactaagaactaaaacttggccgggcacgnnnnnnnnnnnnnnnnnnnnnnnnngnnnnnnnnnnnnnnntgggtaaattgnnnnnnnnnnnnnnnnnnnnnnnnnnnnnnnnnnnnnnnnnnnnnnnnnnnnnnnnnnnnnnnnnnnnnnnnnnnnnctagctgggtgtgatgtggggacctgtaattccnnnnnnnnnnnnnnnnnncagga

SEQ ID NO: 27767 - DNA, 749 bp, Macaca Mulatta
ggggaggtcgcagccccacaacctgcactccgtatgctcccctagaggtttgagcactggggcactgaagaagtgagccactccccgtcacatgccctgtgagagggacaagggaactttttctgtttcactactatggggacggagcccagaagcactcgtcccggcttctgcacctgtctgtccgcgtttccccctcctgcaaggggtttgaacacatggcggccaagcaaacaggccacacccttgttgcaagtcctgtgagagagtccaggaactcttccgtttcactcctgcctcaggcctcagccaccacggaagagaagagtgatcgtcagtggcaaaaggcaactgccaaaaagcaccaccaagagccggcttcatgctcaggagtgaatgctgagcctcctcctcgtggtttccgctgctccacaagttcagagaaacctctctggtggcttttactcccagggagaagatcaagaaacccaccgtaagtcttctctccagggaagttttatggccatgaatgcgatgcagagatcactcaggcctgtatgaacaagcaccatccccaactcttcatctctcatttgttcttctagaaacccgtgtattctttctataaaggcctttttcccccaccgccctctttttccctactaaagctgggacaatataaagttttcttaggcttttagcttactttaactggaagttttccttcctctttttgtaaagccttcccc

SEQ ID NO: 27768 - DNA, 803 bp, Macaca Mulatta
  misc_feature (1)...(803): n = A,T,C or G
ggtcagcagacctgaggacaccacacacaatcgccgcagcagaggcatggtccagagcagctccccagtcatgcccacagtggggccctccactgtacccccagaagaacccccaggctccagtttacccagtgatacatcagatgagatcatggaccttctggtgcagtcagtgaccaagagcagtcctcgtgccttagctgctagggaacgcaagcgttcccgcggcaaccgcaagtctttgagacggacgttaaagagtgggctcggagatgacctggtgcaggcactgggactaagcaagggtcctggcctggaggtgtgaaggtgctgcatcccggaaatctatctggaccctggactgcagtgcaagagatgatagaatgaggaaggcccaaagcagaattctggccccagaactctgtgcccagaagccatgccttaagcagtattagctgtgtgtgtgcatgttaagtgtgtgtgtgtacgtggctgaacatgtgtgtgaacttccttgaaactcccgagccaaataaaaattttcttagcccggtnctaaaaaaannnnnnnnnnnnnnnnnnnnnngttgggccggccttcgggcctttccaaaaaaccctttctaaaaaccaattcctttttggccgcgcccgggggccccttttggggtaaaggtggaaaccatgggggtccataaacctgggttttcccctaaggggaaaaataccccgtgggggcccagaggaaaaaatagagggcgcgttttggggaaattttcccccccccacccccacatataaac

SEQ ID NO: 27769 - DNA, 1376 bp, Macaca Mulatta
  misc_feature (1)...(1376): n = A,T,C or G
ctgagtcagagcgacatgcagagagtggagccgtccctgctgcnnnnnnnnnnnnnnnnnnnnnnnnnnnnnnnnnnnnnnnnnnnnnnnnnnnnnnnnnnnnnnnnnnnnnnnnnnnnnnnnnnnnnnnnnnnnnnnnnnnnnnnnnnnnnnnnnnnnnnnnnnnnnnnnnnnnnnnnnnnnnnnnnnnnnnnnnnnnnnnnnnnnnnnnnnnnnnnnnnnnnnnnnnnnnnnnnnnnnnnnnnnnnnnnnnnnnnnnnnnnnnnnnnnnnnnnnnnnnnnnnnnnnnnnnnnnnnnnnnnnnggtcactgggctagacacacgccccttccagctcacagtggagaagctggagatggccctgcgagaagctcactctgaggnnnnnnnnnnnnnnnnnnnnnnnnnnnnnnnnnnnnnnnnnnnnnnnnnnnnnnnnnnnnnnnnnnnnnnnnnnnnnnnnnnnnnnnnnnnnnnnnnnnnnnnnnnnnnnnnnnnnnnnnnnnnnnnnnnnnnnnnnnnnnnnnnnnnnnnnnnnnnnnnnnnnnnnnnnnnnnnnnnnnnnnnnnnnnnnnnnnnnnnnnnnnnnnnnnnnnnnnnnnnnnnnnnnnnnnnnnnnnnnnnnnnnnnnnnnnnnnnnnnnnnnnnnnnnnnnnnnnnnnnnnnnnnnnnnnnnnnnnnnnnnnnnnnnnnnnnnnnnnnnnnnnnnnnnnnnnnnnnnnnnnnnnnnnnnnnnnnnnnnnnnnnnnnnnnnnnnnnnnnnnnnnnnnnnnnnnnnnnnnnnnnnnnnnnnnnnnnnnnnnnnnnnnnnnnnnnnnnnnnnnnnnnnnnnnnnnnnnnnnnnnnnnnnnnnnnnnnnnnnnnnnnnnnnnnnnnnnnnnnnnnnnnnnnnnnnnnnnnnnnnnnnnnnnnnnnnnnnnnnnnnnnnnnnnnnnnnnnnnnnnnnnnnnnnnnnnnnnnnnnnnnnnnnnnnnnnnnnnnnnnnnnnnnnnnnnnnnnnnnnnnnnnnnnnnnnnnnnnnnnnnnnnnnnnnnnnnnnnnnnnnnnnnnnnnnnnngggatgcagagggtccggcaggtgcttgcaggcaaatcccaagtggctgaagaccccccttcctctcagagccaggagccaagtgaccaacgcaggtgagctggtcattgcctcgtggccagagggcccagcagccactgtggacctggggcgttccggggctgcagaagaccgactgtggatgtgccattcgccaggaaggtgtctaacttggctttgcacccaaagaactgtttcttgccttttgctgtagccgtgagaaactccttaagctatggttcagcctgggccctccctctctcctattaaacaaaacta

SEQ ID NO: 27770 - DNA, 800 bp, Macaca Mulatta
  misc_feature (1)...(800): n = A,T,C or G
gggagtatttccattttaaccggaaacaatccctgaacccacaggaatgaatccctaatggtggagtttcaggcatcagtgacagnnncaggctgaacccggactcccagggcacctgctttcacctgatgaatgatggcctgaactatgaacaaacgggactatatgaacacttcggtacaggagccccctcttgactactccttcagaagcatccacgtcattcaannnnnnnnnnnnnnnnnnnnnnnnnnnnnnnnnnnnnnnnnnnnnnnnnnnnnnnnnnnnnnnnnnnnnnnnnnnnnnnnnnnnnnnnnnnnnnnnnnnnnnnnnnnnnnnnnnnnnnnnnnnnnnnnnnnnnnnnnnnnnnnnnnnnnnnnnnnnnnnnnnnnnnnnnnnnnnnnnnnnnnnnnnnnnnnnnnnnnnnnnnnnnntcctaacaactttcttcaacctgagtgtcctctatcttcacggcaacagcatccagcacctgggggaggtgaataagctggctgtccttcctcggctccggagcctgacactccatgggaaccccatggaggaagagaaagggtataggnaggcaatatgtgctgtgcaccctgccccatatcaccacgttcgacttcagtggggtcaccaaagcagaccgcaccacagctgaagtctggaaacgcatgaacatcaagcccaagaaggcccggatcaagcagaatacactttgaggctcccacgaccctagtagtcctaaaggcctgagaatagacagcatggtttgacaataaatgatttgagct

SEQ ID NO: 27771 - DNA, 641 bp, Macaca Mulatta
cagctcagcaccattgcgacgtattgctcagcagcagtagcaggactgatgaccaccatggcagtgagtagcccaagcaggacactaatgtcaaaaaggtaaaaaggccaaagccagaatctcagggaatcaaagccaagaggaagccaagtgcatcttccaaaccttctttggttggagatggagaaggtgccatcctctccccaagtcagaaacctcatatctgtgatcactgtagtgctgctttccgaagctcctatcatctgcggagacatgtcctcattcatacaggagaaagacctttccagtgcagccagtgtagtatgggtttcattcagaaatacctactacagagacatgagaaaattcatagtagagagaagccatttggatgtgatcagtgcagcatgaagtttattcagaagtaccatatggagagacacaagaggacacatagtggagaaaagccatataagtgtgacacttgccaacagtatttttcaaggactgatagattgttgaagcacaggcgcacatgtggtgaagtcatagttaaaggagccactagtgcagaacctgggtcatcaaaccataacaatatgggtaatctggctgtgttgtctcagggaaatacaagttct

SEQ ID NO: 27772 - DNA, 562 bp, Macaca Mulatta
agtcctgattgcacctaggtaaaaatttgaaaacaaaaatccattgcgattcaatctatgaaagtttcttcaagcataaatgtgcacattgcagatgagtatgtaaagtgtaaaatacatacaggttctaaaaacatgaaaagttatatcaataaaaactctaatgtagtaaaaataaagaaatgtaaggacatggtaaaaatcgaattcaaagtagtggttatctttaagaggtttggaagaagatgtgaaaagagttgggaatatagatgacttcaccttcatttgtaattttttatttcttgaattggcttatatgtttattagtacttcatatctgtatatgtccaaaatgccctgtaaataagtttaaaataaacaatatttgctcttatttctatactttcttgtatatttctcaaatttgtaaaccatttatttgcacgaattttgcattaagtttataaagttgattagattcatggattcccaaaagatgcttggcatggaacactatttctgtttccaaatagacacattgacatatgattatgcaaatttc

SEQ ID NO: 27773 - DNA, 142 bp, Macaca Mulatta
gacgaacaccgtggtgaggaccacgctgaggaacgacctgtccccggagggcatcatccactacctgaagatcctgagccccatctactgtgccttccagaatgatctgctgacgtcctccggcttcaccccggagtggggg

SEQ ID NO: 27774 - DNA, 675 bp, Macaca Mulatta
tggttatgaatcaaaaactattttaaagctttgcgattttgggtcggcttcacatgttgcggataatgacataacaccttatcttgtcagtagattttatcgtgctcctgaaatcattataggtaaaagctatgactatggcatagatatgtggtctgtaggttgcaccttatacgaactctatactggaaaaattttattccctggcaaaaccaataaccatatgctgaagcttgcgatggatctcaaaggaaagatgccaaataagatgattcgaaaaggtgtgttcaaagatcagcattttgatcaaaatctcaacttcatgtacatagaagttgataaagtaacagagagggagaaagttactgttatgagcaccattaatccaactaaggacctgttggctgacttgattgggtgccagagacttcctgaagaccaacgtaagaaagtacaccagctaaaggacttgttggaccagattctgatgttggacccagctaaacgaattagcatcaaccaggccctacagcatgccttcatccaggaaaaaatttaaacaagatgaagaaactccaagggtttgagtaaatacaaagactgaagaaatttcacagcagtttattaatgtatataaacttataaatatttctccagcaaatttgaggaagcatg

SEQ ID NO: 27775 - DNA, 663 bp, Macaca Mulatta
caggagcgaggtctataagaaagatgctcaatttggaagtcatcagtatatataggtggctgctaaaaatgaggagatgttaatattttctcacacacaaagggagctcttgtacactcttggtgggatgtaagctggtacagccattatggaaaacagtatggcagttcctctaaaaacagaactaccatatgacccagaaattcctctgctgagtatcccaaaggaaatgaaatcagcccttcataaagatatctgcattctcatgctcattgcagcagtattcacaatagccaagatacagaaacaatctaaatgcccatcaatagatgaacagataaataaattgcagtatatatgtacattggaatatcattcagccttacaaaaggagatgctgctatatttgcaacaacatgggtgaacctggaggacgttacgctaagtaaaataacaacattgaagaaaagaaataatactgaaagaaaaatattgcttgatcttacttatatatggaacttaaaaattacacacagaaacagggtagaatggtagatatccaggttgggaggaagagaaaacggggatatgtaggtcacagggtacaaacttgaagttgtattggatgaatatctagagagctaatgtacagcatgaggacta

SEQ ID NO: 27776 - DNA, 808 bp, Macaca Mulatta
  misc_feature (1)...(808): n = A,T,C or G
ggtatgtggaggtctccatccttcacagaacagacccctccctggggctgctcctacatcagtgttgggcaacacccagcacagacccactgagtcagccacagtggcccatcctggtaaagggctgcccctacattggagacaactatcagacccagctgatccctgtccagaaagccttggatcttccatttccctctcactaccagcgcttcagcatcttcaccttcagctttgtggaccctacagcagagaaacaggccctcaggggaccggtgcatctgcactgcagtgtgtcagtctgccagcctgctgagacaccatcctgtgcggtaacctgtcctgatctcagtcgaagaaattcaggcaccatttttcagaacactactgctagtgtttctagcaaaggccccatgattctactccaagccactaaggaccctccagaaaagctccgtgctcctgtagactcaaaagttctgtgggtggcaggcctttctgggaccttaatccttggaggcttagtagtatcctacttggctatcaaacagctgaattgtccagaccaaacatgtcaataaaaccagactgtactcccnnnnannnnnnnnnnnnnnnnnnnnnnnnnnnnnnnnnnnnnnnnnnnnnnnnnnnnnnnnnnnnnnnnnnnnnnnnnnnnnnnnnnnnnnnnnnnnnnnnnnnnnnnnnnnnnnnnnnnnnnnnnaaagttttgggcgcccttggccnnnnnnnnnnnnnnnnnnnnnnnnnncttttgtggccccggggccccttatgttaaattaaa

SEQ ID NO: 27777 - DNA, 689 bp, Macaca Mulatta
  misc_feature (1)...(689): n = A,T,C or G
ggattgcattattttatttgcaaactagaaattgcagtctgaggatcatttagaagggcaagttcaagaggatatgaagatttgagaactttttaactattcattgactaaaaatgaacattaatgttaaagacttaagactttaacctgctggcagtcccacatgaaattatgcaactttgatatcatattccttgatataattggcttttgtgattgagtgaaactttataaagcatatggtcagttatttaatttaaaaaaaagggcaaaacctgaaccaccttctgcacttaaagaagtctaacagtataaatacactatctatcttagatagatnnnnnnnnnnnnnnnnnnnnnnattgtactatttatggtggtggggctttcttactaatacacaaataaatttaatcatttcaaaggcattctatttggtttagaagttgattcccaggagtgccatatttcagctactgtatttcctttttcctgtaatgtaagcacctcagataccatgtgctaccatttttgtatcaagttttttgcacaggatgtgaccactgtcagatcactgttcttttctttctttttgtgattgaaaaacctatactacaatttgaagtaaattttttgtttttcctaannnnnnnnnnnnnnnnnnnnnnnnnaannnaaacatgtcggcc

SEQ ID NO: 27778 - DNA, 646 bp, Macaca Mulatta
  misc_feature (1)...(646): n = A,T,C or G
taagctgcttctatgaatactagttgtttttttactttcggaatccgtcacctgaaatcctattcatgtatagccactctagtttgttctcctaaatttgctttgtttttcttaccaccattaccatcatgttatctatcaagatcctagcaaaaacttgtattttgcttttatctaatacatgaattaaagtataaatattttggttcttttcaatgttttcattgttattatttaacattttattttgcaactactataaaaagtttacttacgacgcagtgagatctgtggctccatagtggaatgtgatgaaaatcttcctagttcaccatgttacagaagcttgagaacaagtaagagatcatattaacaagagataaaaataacttgcccctgtctatttacttaggatgtcaacccctctcaagtgtccctcaagtgttcctggaatcacgaaggacagtgtcattctcatattctgctgtgtaacattgttgttagctgaatgtcttcttggtaccactgttctggccaggcatgtctttgctttttttccaccttcagttgaggttgtggaaaggagattgngaagtttcactcatttcctagtcagaactacactttgtatttagcgtctccctga

SEQ ID NO: 27779 - DNA, 787 bp, Macaca Mulatta
  misc_feature (1)...(787): n = A,T,C or G
tctggacccggatacttcaaggaggtggaaatagaattttaaaggtttctggccccatgttattaaattctgaacttggccttcatccaggcagggtaaagggtttcggtgccttgacttagccttcatccatgcagtgataagggtttcggtgcatcctatgaagggggaagttagtggttttcataggagaccttttagcctaatcaccaccaaggtgattatcaaaacacatggatcatcccctaactggtaacccaaaagatctgtactccggtttctcaccacggaataaatgacttcgagttgtcagttgcacagtccttgccaaagtcctacttgtgagaaatagactttgtagaactttgtctgaaaaggaattcttatgttgaataactgnnnnnnnnnnnnnnnnnnaaagcctgtgaaccttataataaaatgtgttctttttgttttggccaggcaaacgaaatttacagccaaactgtaaagatatacttctgtgtgtgtgcatcattttcatgctgctgttaaagacatacccaagactgggaagaaaaagaggtgtcattggacttacagttctaaggctaggaatgccttagaatcatggcgggaggtgaaaggnnnnnnnnnnnnnnnnnnnntatactttaagttctagggtacatgtgcacaatgtgcaggtttgttacataggtacacatgtgccatgctggtttgctgcacccatcaacttgtcatttacattaggtatttctcctaatgctatccctcccccccc

SEQ ID NO: 27780 - DNA, 1185 bp, Macaca Mulatta
  misc_feature (1)...(1185): n = A,T,C or G
atggctgcccctgatgggagggtagtctccagaccccaaagacttggtcaggggtctggccgggggccaaaggagcgtggagcctgcctgcatcccctggacagcttggagcagaaggagactcaggagcagacgccgggccagctagacatgttgaggaaggcacaggaattctttcnnnnnnnnnnnnnnnnnnnnnnnnnnnnnnnnnnnnnnnnnnnnnnnnnnnnnnnnnnnnnnnnnnnnnnnnnnnnnnnnnnnnnnnnnnnnnnnnnnnnnnnnnnnnnnnnnnnnnnnnnnnnnnnnnnnnnnnnnnnnnnnnnnnnnnnnnnnnnnnnnnnnnnnnnnnnnnnnnnnnnnnnnnnnnnnnnnnnnnnnnnnnnnnnnnnnnnnnnnnnnnnnnnnnnnnnnnnnnnnnnnnnnnnnnnnnnnnnnnnnnnnnnnnnnnnnnnnnnnnnnnnnnnnnnnnnnnnnnnnnnnnnnnnnnnnnnnnnnnnnnnnnnnnnnnnnnnnnnnnnnnnnnnnnnnnnnnnnnnnnnnnnnnnnnnnnnnnnnnnnnnnnnnnnnnnnnnnnnnnnnnnnnnnnnnnnnnnnnnnnnnnnnnnnnnnnnnnnnnnnnnnnnnnnnnnnnnnnnnnnnnnnnnnnnnnnnnnnnnnnnnnnnnnnnnnnnnnnnnnnnnnnnnnnnnnnnnnnnnnnnnnnnnnnnnnnnnnnnnnnnnnnnnnnnnnnnnnnnnnnnnnnnnnnnnnnnnnnnnnnnggacacagagaggtttcaagcccgcagtcaagagctggaacagaaactgttatgtaaggagcaggagctggagcagctcacccagaagcagaaaaggnnnnnnnnnnnnnnnnnnnnnnnnnnnnnnnnnnnnnnnnnnnnnnnnnnnnnnnnnnnnnnnnnnnnnnnnnnnnnnnnnnnnnnnnnnnnnnnnnnnnnnnnnnnnnnnnnnnnnnnnnnnnnnnnnnnnnnnnnnnnnnnnnnnnnnnnnnnnnnnnnnnnnnnnnnnnnnnnnnnnnnnnnnnnggaagtgtaccgcgtgacagagagtctacagcgcgagaaggccgggctcctcaagcagctggatttcctaaggtgcgtcggtgggcactggcctgtgctgagagcacctcccagaagcctggggtcggaaggaccagtctg

SEQ ID NO: 27781 - DNA, 1667 bp, Macaca Mulatta
  misc_feature (1)...(1667): n = A,T,C or G
tccccttcccgccgccgcctccttttccgctggctgtggcgggcgaggacacgtcaggggccataaataaataaataattccattcacccgttgacagcaaggcgaaccggctgcggcttgcggggaacagagagctgcagcgcccaccctgcgccagagaccagataaannnnnnnnnnnnnnnnnnnnnnnnnnnnnnnnnnnnnnnnnnnnnnnnnnnnnnnnnnnnnnnnnnnnnnnnnnnnnnnnnnnnnnnnnnnnnnnnnnnnnnnnnnnnnnnnnnnnnnnnnnnnnnnnnnnnnnnnnnnnnnnnnnnnnnnnnnnnnnnnnnnnnnnnnnnnnnnnnnnnnnnnnnnnnnnnnnnnnnnnnnnnnnnnnnnnnnnnnnnnnnnnnnnnnnnnnnnnnnnnnnnnnnnnnnnnnnnnnnnnnnnnnnnnnnnnnnnnnnnnnnnnnnnnnnnnnnnnnnnnnnnnnnnnnnnnnnnnnnnnnnnggtcctataagtagtgttttggtgaataaatacggcagccggccggtggtgatagcaggaggcttattatgctgtcttggaatggtgttggcctccttcagtagcagcgtgatcgagctgtacctcactgtgggattcattacaggtnnnnnnnnnnncttcaacctgcaacccgccttaacaataattggcannnnnnnnnnnnnnnnnnnnnnnnnnnnnnnnnnnnnnnnnnnnnnnnnnnnnnnnnnnnnnnnnnnnnnnnnnnnnnnnnnnnnnnnnnnnnnnnnnnnnnnnnnnnnnnnnnnnnnnnnnnnnnnnnnnnnnnnnnnnnnnnnnnnnnnnnnnnnnnnnnnnnnnnnnnnnnnnnnnnnnnnnnnnnnnnnnnnnnnnnnnnnnnnnnnnnnnnnnnnnnnnnnnnnnnnnnnnnnnnnnnnnnnnnnnnnnnnnnnnnnnnnnnnnnnnnnnnnnnnnnnnnnnnnnnnnnnnnnnnnnnnnnnnnnnnnnnnnnnnnnnnnnnnnnnnnnnnnnnnnnnnnnnnnnnnnnnnnnnnnnnnnnnnnnnnnnnnnnnnnnnnnnnnnnnnnnnnnnnnnnnnnnnnnnnnnnnnnnnnnnnnnnnnnnnnnnnnnnnnnnnnnnnnnnnnnnnnnnnnnnnnnnnnnnnnnnnnnnnnnnnnnnnnnnnnnnnnnnngcaaactccaaacatattcgacctcgaattcagtacttcttcagttttgcaatcatgttcaatggagtgtgtcatctcttgtgcccgctggcacaggactacacaagcctggtattatatgctatattttttggccttggatttgggagtgttagcagtgttctctttgaaactctcatggacctcgtgggtgcaccaagattttccagtgccgtcggacttgtcacagttgtggagtgtggcccagttcttcttggccctcctcttgctggtannnnnggtaaattggtggatataactggagattataaatacatgtacatggcctgtggggctattgtggtagcagcaagcgtgtggctgctcattggcaatgctatcaactatagattgcttgcaaaggaaaggagggagcaaagtgcaagaaagacaaccagagaatcggaacgcttgagcaaatctaaacattcggaagatgttaa

SEQ ID NO: 27782 - DNA, 2583 bp, Macaca Mulatta
  misc_feature (1)...(2583): n = A,T,C or G
gatgtctgatgatattgactggttacgcagccacaggggtgtgtgcaaggtagatctctacaacccagcaggacaacaagatcaggaccggaaagtgatatgttttgtcgatgtgtccaccctgaatgtagaagataaagattacaagnnnnnnnnnnnnnnnnnnnnnnnnnnnnnnnnnnnnnnnnnnnnnnnnnnnnnnnnnnnnnnnnnnnnnnnnnnnnnnnnnnnnnnnnnnnnnnnnnnnnnnnnnnnnnnnnnnnnnnnnnnnnnnnnnnnnnnnnnnnnnnnnnnnnnnnnnnnnnnnnnnnnnnnnnnnnnnnnnnnnnnnnnnnnnnnnnnnnnnnnnnnnnnnnnnnnnnnnnnnnnnnnnnnnnnnnnnnnnnnnnnnnnnnnnnnnnnnnnnnnnnnnnnnnnnnnnnnnnnnnnnnnnnnnnnnnnnnnnnnnnnnnnnnnnnnnnnnnnnnnnnnnnnnnnnnnnnnnnnnnnnnnnnnnnnnnnnnnnnnnnnnnnnnnnnnnnnnnnnnnnnnnnnnnnnnnnnnnnnnnnnnnnnnnnnnnnnnnnnnnnnnnnnnnnnnnnnnnnnnnnnnnnnnnnnnnnnnnnnnnnnnnnnnnnnnnnnnnnnnnnnnnnnnnnnnnnnnnnnnnnnnnnnnnnnnnnnnnnnnnnnnnnnnnnnnnnnnnnnnnnnnnnnnnnnnnnnnnnnnnnnnnnnnnnnnnnnnnnnnnnnnnnnnnnnnnnnnnnnnnnnnnnnnnnnnnnnnnnnnnnnnnnnnnnnnnnnnnnnnnnnnnnnnnnnnnnnnnnnnnnnnnnnnnnnnnnnnnnnnnnnnnnnnnnnnnnnnnnnnnnnnnnnnnnnnnnnnnnnnnnnnnnnnnnnnnnnnnnnnnnnnnnnnnnnnnnnnnnnnnnnnnnnnnnnnnnnnnnnnnnnnnnnnnnnnnnnnnnnnnnnnnnnnnnnnnnnnnnnnnnnnnnnnnnnnnnnnnnnnnnnnnnnnnnnnnnnnnnnnnnnnnnnnnnnnnnnnnnnnnnnnnnnnnnnnnnnnnnnnnnnnnnnnnnnnnnnnnnnnnnnnnnnnnnnnnnnnnnnnnnnnnnnnnnnnnnnnnnnnnnnnnnnnnnnnnnnnnnnnnnnnnnnnnnnnnnnnnnnnnnnnnnnnnnnnnnnnnnnnnnnnnnnnnnnnnnnnnnnnnnnnnnnnnnnnnnnnnnnnnnnnnnnnnnnnnnnnnnnnnnnnnnnnnnnnnnnnnnnnnnnnnnnnnnnnnnnnnnnnnnnnnnnnnnnnnnnnnnnnnnnnnnnnnnnnnnnnnnnnnnnnnnnnnnnnnnnnnnnnnnnnnnnnnnnnnnnnnnnnnnnnnnnnnnnnnnnnnnnnnnnnnnnnnnnnnnnnnnnnnnnnnnnnnnnnnnnnnnnnnnnnnnnnnnnnnnnnnnnnnnnnnnnnnnnnnnnnnnnnnnnnnnnnnnnnnnnnnnnnnnnnnnnnnnnnnnnnnnnnnnnnnnnnnnnnnnnnnnnnnnnnnnnnnnnnnnnnnnnnnnnnnnnnnnnnnnnnnnnnnnnnnnnnnnnnnnnnnnnnnnnnnnnnnnnnnnnnnnnnnnnnnnnnnnnnnnnnnnnnnnnnnnnnnnnnnnnnnnnnnnnnnnnnnnnnnnnnnnnnnnnnnnnnnnnnnnnnnnnnnnnnnnnnnnnnnnnnnnnnnnnnnnnnnnnnnnnnnnnnnnnnnnnnnnnnnnnnnnnnnnnnnnnnnnnnnnnnnnnnnnnnnnnnnnnnnnnnnnnnnnnnnnnnnnnnnnnnnnnnnnnnnnnnnnnnnnnnnnnnnnnnnnnnnnnnnnnnnnnnnnnnnnnnnnnnnnnnnnnnnnnnnnnnnnnnnnnnnnnnnnnnnnnnnnnnnnnnnnttaatgagaaccccttcaaatgtgaggatccatgcgaaggtgagaacaagcattctgagcccagggcaagcaaagcaacttacatgtccaagagatctgacaaaggggaagaacaatgccaggaccatcaagaacttgactttatcagtgggatgaagcaagtgaactggcaatttatagataaactggtagaatctgtgatgaagctctgccttatcatggctaagtatagcaacgatggggcagcccttgctgagttggaagaacaagcagcctcggcagataagcccaatttcaggggcaccagatgcattcacagcagtgcaatgccacagaactatcaagactctcttggacatgaagtaattgtcaataatcagtgctctacaaatagcttgcagaagcagctccaggctgtcctgcagtggattgcagcctcccagtttaacgtgcccatgctctacttcatgggagataaggatggacaactggaaaagnnnnnaaaaagcatcacgcagctcacactagctctgttttccccacagcttcctcaggtttcagctaaagcagcagagaaggggtacagtgtaggaggtcttcttcaagaggtcatgaagtttgccaaggaacggcaactggatgaagccgtgggaaaggtggccaggaaacagttgctggactggctgctcgctaacctg

SEQ ID NO: 27783 - DNA, 834 bp, Macaca Mulatta
ttctaactttcctgagctccaggtgcagctctttcgggttttcctagttatttatgtggtgaccctgatgggaaatgccatcattatagtcgtcatctccttaaaccggagcctccacgttcccatgtacctcttcctcctgaacccatctgtggtggaggtgagtttcagtgcagtcattacgcctgaaatgctggtggtgctctctactgggaaaactatgatttcttttgtgggctgttttgcacagatgtatttcatccttctttttggtgggactgaatgttttctcctgggagcgatggcttatgaccgatttgctgcaatttgccatcctctgaactacccagtgatgatgaacagaggtgtttttatgaaattagtaatattctcatggatctcagggatcatggtggctactgtgcagaccacttgggtatttagttttccattttgtggccccaatgaaattaatcatctcttctgtgagactcccccggtactagagcttgtgtgtgcagacaccttcttatttgaaatctatgccttcacaggcaccattttgattgttatggttcctttcttgttgatcctcttgtcttacattcgagttctgtttgccatcctgaagatgccatcaactactggtagacaaaaggccttttccacctgtgcctctcacctcacatctgtgaccctgttctatggcacagccaatatgacttatttacaaccaaaatctggctactcaccagaaaccaagaaactgatgtcattggcttacatgttgcttacccctatgctcaatccgctcatctatagcttacgacacag

SEQ ID NO: 27784 - DNA, 2939 bp, Macaca Mulatta
  misc_feature (1)...(2939): n = A,T,C or G
agtacttggaccatgagactgtttcagccacattcatcgacagcagtggacagtttatttcctcccaggtgacaggaattagccgaaatccttactgcggctatgatcagcagatcctgtccagccaggagcgcatggaggaggactccttgctggctgccttgcaccgacaggttcctgatgtggccccagttccctttgtgaaaagcactgacccttcttccagctactttgtcatcttgaactctgctgccttctttcaggtgggaagccagctggaggtgctggttcatgtacaggattttcaaagaaagcccaagaagtatggtggagactacttgcaggccagaattcnctnnnnnnnnnnnnnnnnnnnnnnnnnnnnnnnnnnnnnnnnnnnnnnnnnnnnnnnnnnnnnnnnnnnnnnnnnnnnnnnnnnnnnnnnnnnnnnnnnnnnnnnnnnnnnnnnnnnnnnnnnnnnnnnnnnnnnnnnnnnnnnnnnnnnnnnnnnnnnnnnnnnnnnnnnnnnnnnnnnnnnnnnnnnnnnnnnnnnnnnnnnnnnnnnnnnnnnnnnnnnnnnnnnnnnnnnnnnnnnnnnnnnnnnnnnnnnnnnnnnnnnnnnnnnnnnnnnnnnnnnnnnnnnnnnnnnnnnnnnnnnnnnnnnnnnnnnnnnnnnnnnnnnnnnnnnnnnnnnnnnnnnnnnnnnnnnnnnnnnnnnnnnnnnnnnnnnnnnnnnnnnnnnnnnnnnnnnnnnnnnnnnnnnnnnnnnnnnnnnnnnnnnnnnnnnnnnnnnnnnnnnnnnnnnnnnnnnnnnnnnnnnnnnnnnnnnnnnnnnnnnnnnnnnnnnnnnnnnnnnnnnnnnnnnnnnnnnnnnnnnnnnnnnnnnnnnnnnnnnnnnnnnnnnnnnnnnnnnnnnnnnnnnnnnnnnnnnnnnnnnnnnnnnnnnnnnnnnnnnnnnnnnnnnnnnnnnnnnnnnnnnnnnnnnnnnnnnnnnnnnnnnnnnnnnnnnnnnnnnnnnnnnnnnnnnnnnnnnnnnnnnnnnnnnnnnnnnnnnnnnnnnnnnnnnnnnnnnnnnnnnnnnnnnnnnnnnnnnnnnnnnnnnnnnnnnnnnnnnnnnnnnnnnnnnnnnnnnnnnnnnnnnnnnnnnnnnnnnnnnnnnnnnnnnnnnnnnnnnnnnnnnnnnnnnnnnnnnnnnnnnnnnnnnnnnnnnnnnnnnnnnnnnnnnnnnnnnnnnnnnnnnnnnnnnnnnnnnnnnnnnnnnnnnnnnnnnnnnnnnnnnnnnnnnnnnnnnnnnnnnnnnnnnnnnnnnnnnnnnnnnnnnnnnnnnnnnnnnnnnnnnnnnnnnnnnnnnnnnnnnnnnnnnnnnnnnnnnnnnnnnnnnnnnnnnnnnnnnnnnnnnnnnnnnnnnnnnnnnnnnnnnnnnnnnnnnnnnnnnnnnnnnnnnnnnnnnnnnnnnnnnnnnnnnnnnnnnnnnnnnnnnnnnnnnnnnnnnnnnnnnnnnnnnnnnnnnnnnnnnnnnnnnnnnnnnnnnnnnnnnnnnnnnnnnnnnnnnnnnnnnnnnnnnnnnnnnnnnnnnnnnnnnnnnnnnnnnnnnnnnnnnnnnnnnnnnnnnnnnnnnnnnnnnnnnnnnnnnnnnnnnnnnnnnnnnnnnnnnnnnnnnnnnnnnnnnnnnnnnnnnnnnnnnnnnnnnnnnnnnnnnnnnnnnnnnnnnnnnnnnnnnnnnnnnnnnnnnnnnnnnnnnnnnnnnnnnnnnnnnnnnnnnnnnnnnnnnnnnnnnnnnnnnnnnnnnnnnnnnnnnnnnnnnnnnnnnnnnnnnnnnnnnnnnnnnnnnnnnnnnnnnnnnnnnnnnnnnnnnnnnnnnnnnnnnnnnnnnnnnnnnnnnnnnnnnnnnnnnnnnnnnnnnnnnnnnnnnnnnnnnnnnnnnnnnnnnnnnnnnnnnnnnnnnnnnnnnnnnnnnnnnnnnnnnnnnnnnnnnnnnnnnnnnnnnnnnnnnnnnnnnnnnnnnnnnnnnnnnnnnnnnnnnnnnnnnnnnnnnnnnnnnnnnnnnnnnnnnnnnnnnnnnnnnnnnnnnnnnnnnnnnnnnnnnnnnnnnnnnnnnnnnnnnnnnnnnnnnnnnnnnnnnnnnnnnnnnnnnnnnnnnnnnnnnnnnnnnnnnnnnnnnnnnnnnnnnnnnnnnnnttcctgcttttatctagaaaagagcaaaagggaactatgaaagcagtatatataaaatctgtgctttggaatcgacatttgcatttggtgatttttatttgattcagctaaattttatgtgttgaatacttactctagaataactacttttggaactggaagggggaaatctgtaaatggaaatttatttttatgatctgaaatttgagggttttaagaattgacttttgtgtaaagaatgctattgtattataaagctgtggaagtttttcccaccagtttcaggtnnnnnnnnnttgttgctgttgttgttattttgaactacttaccacaattagaagttaaaatctaattagaaattaataagctattaaaattcatgacannnnnnnnnnnnnnnnnnnnnnnnnnnnnggtattttttgatttgggcataaaaggcacacccattctctcatgcttggaagaagctgctattcctactgcctagctaagaagaatggaattattaattttatttgacttattaattttaaatgagtttagttaatttgggatcatttagtaagtactcttttctttttgagctatgatagattatagtctagtttaagttgctcttaaatagacagatgaagaaactagggaggccttaaagagaaagacagatgcttgaagtatgaacgatattttctatggaagaatgggtcaaataatttgcatttttaatttaaaataggagggccccagatcttactttc

SEQ ID NO: 27785 - DNA, 634 bp, Macaca Mulatta
cactctaatgttttaaagaggtgacgaaagcttgtgctaccatttcagtaaccacggtgttgttttagatgcctttaaaagctcagtttcccttgttcttaagtgttgaatattgtctttaaactagaaaaatgcaaaacattgaactgatatttttgtgtgtaattgattactcttacactgagtgaatgatgaatacctgtgaggataggaaattagttctgagatctagtccctctctgattcacttagtaatctatcttcttttcagtattacatatgcttaatctcatatgaacgatttcaccatgtcagtattatctcatctctgggcttttctgggaattgaggaatctctccttaaccccaattgtcaagggcagtagctgtatactaccactttgaattattgaaacgggtcaatttacagagtctgcattggccatggaaatatggtttatagtacagcctagagagtgaaactcacagtccagataaccatgcgcgcacccagattttttccaccttggatacctgtcactagggaataataaaggccttactttttgtcttattccgactaagtagatcattatctctttccttttttatgttaatgagagaatttagcctc

SEQ ID NO: 27786 - DNA, 295 bp, Macaca Mulatta
  misc_feature (1)...(295): n = A,T,C or G
gaacctggctgctgtatttaccatgtacctggagcattggtttggcagctgaaccaggttgttttccagattggtacatgctctccctctttggcactggagctattctgatgcgtggagcaggctgtactattaatgatatgtgggaccaggactatgataaaaaggtnnnaggttacaagaacagccagtcgtccaatagccgccggagacatttcaacttttcagtcctttgtttttcttgggggacagctaaccttggcactgggtgttcttctgtgtctgaattactaca

SEQ ID NO: 27787 - DNA, 94 bp, Macaca Mulatta
agggaccttcttatgtgagacacccgtgttagcaatgcatgaagaaagcgtttatacggtggagtcaaaccgagttcaagtgcgaacctggcag

SEQ ID NO: 27788 - DNA, 518 bp, Macaca Mulatta
attagtcttttgattagtctgcatgctctcagcctagcaacactcttctgtgtctctccaccagggggcaccctcctgccagggaccgagcccacagtggacacggtgcccatgcagcccatcccagcctactggtattacgtaatggccgccgggggcgccgtgctggtgctggtctccgtcgcgctggccctggtgctccactaccaccggttccgctatgcggccaagaagactgatcactccatcacctacaaaacctcccactacaccaacggggcccctctggcggtggagcccaccctaaccattaagctagagcaagaccgtggctcgcactgctgagggccgaagcaagaacagcacccaaaacaaacgagaaagactgcaaacacgttgcctcgattttgcactttttttctcctcgcctagtttctgtgtgaactctcagacatctctctcccaggtccccaaccctgagcactcttagcaatcccaaccatcctccttgggttcat

SEQ ID NO: 27789 - DNA, 874 bp, Macaca Mulatta
  misc_feature (1)...(874): n = A,T,C or G
ggactgaagaggtgacttccgttgcataccaaagccgactacactgaacagtaccttcctttctagaaacgattttagattggcaaaagtgcaatgttttcttcactcacaaaattttatattctcaaacatgtacattctttccctttcttgttccgnnnnnnnnnnnnnnnnnnnnnnnntttctttggtgggctgagaaaggggcaggcaacatgaagctggccactgaaaactgtaagacggtcaaacgctgacagcctgtgtatgtgaaaagggaattgtaaacggactgcaatgtaatgtacaccgtaatttgaatacaattactgtatctaaaaggagctgctatgaactacctttcttatgttgttaggctactgtttctgaaagcccctggatctctttgcaccaaaaatggtccaaatagactcttttttaaggatccttggctgctttttactacaaagttgctttttagagcatatttatacctgctgaaaggaggagtggttaattttaattaactttgccccttttgttgaagaaaactaattcccaatataaaattcggggagggtgagggggggtgggggccaggcggtaccctcaatatcctggttgcggatagccgcgccagcgccaacccgtgaaaggggtgaacactcgaggcgcgtcgcttttggagcgttgacgatggggggcctaactctgggcgtaacggcgccgttgatgatggggcgcctgtgaagtacaggccctcagagttaagcccggacggggacgaggggagggcgaaaggacgagcgaggagtcgagaaattttgcgttgaaagccgggggcgccggaggggcccgaggatcgcacccgccc

SEQ ID NO: 27790 - DNA, 1113 bp, Macaca Mulatta
  misc_feature (1)...(1113): n = A,T,C or G
ggatgtgctgggtggcgtcctgatcaccgcactcctcatcgtcctcacctaccctgcctggaccttcattgaccgcctggactcagccagccccctcttccccgtgtgtgtcatagttgtgccgttcttcctgtgttacaattaccctgtttctgattactacagcccaacccgggcggacaccaccaccattctggctgctggggctggagtgaccataggattctggatcaaccactccttccagcttgtatcccagccggctgaacctctccctgtcattcagaacatcccaccgctcaccaccgacatgttcattttgggtctgaccaaataggcagtgggaattgtgttgatcctcttggttcgtcagcnnnnnnnnnnnnnnnntgcaagtgctatactcatggttcaaggtggtcaccaggaacaaggaggccagacggagactggagattgaagtgccttacaagtttgttacctacacatctgttggcatctgcgctacaacctttgtgccaatgctgcacaggtttctgggattaccctgagtctcaaacagttggaaactagcccactggacatgagagccaagacataggaaagttattggtaggcaaatcttgaccacttatttttctttaacaacaacaacaaaaaagtcatacggctgtcttgctactactagataaatgatgctgctgtgtgaaaggaaaaactatctcatagcggtcattnnnnnnnnnnnnnnnnnnnnnnnctacagctgaacccaggctaaaatccataatctagatctttaaaggcacacnnnnnnnnnnnnnnnnnnnnnccggcccctgctcctctttctgttgcatggattttggacctagtcatgggctggcaggaattgtagcctgacttaggaatagctaggagccccactgggttcaggagagccaacagggatggggtgatctgggaggctggagatacagcctttcttttccattacaaccttgcctagcacggtgtcttatttccaaaataggaaccttggtccaggagaaggggtggcaccgtataaaagtgcatttcttggacagggtgacttccttatcgtttatttgg

SEQ ID NO: 27791 - DNA, 1453 bp, Macaca Mulatta
  misc_feature (1)...(1453): n = A,T,C or G
tttattcctgttgaagagtgcctgctcttctaatttccacattccttgaggttttaggagtctggtaggtgaaattctctacctctaaggagaaacagtacctgctccttccttcctcaagggcaagccctccattgctatggataccgaatccacttattctggatattcttactattcaagtcattcgaaaaaatctcacagacaagggnnnnnnnnnnnnnnnnnnnnnnnnnnnnnnnnnnnnnnnnnnnnnnnnnnnnnnnnnnnnnnnnnnnnnnnnnnnnnnnnnnnnnnnnnnnnnnnnnnnnnnnnnnnnnnnnnnnnnnnnnnnnnnnnnnnnnnnnnnnnnnnnnnnnnnnnnnnnnnnnnnnnnnnnnnnnnnnnnnnnnnnnnnnnnnnnnnnnnnnnnnnnnnnnnnnnnnnnnnnnnnnnnnnnnnnnnnnnnnnnnnnnnnnnnnnnnnnnnnnnnnnnnnnnnnnnnnnnnnnnnnnnnnnnnnnnnnnnnnnnnnnnnnnnnnnnnnnnnnnnnnnnnnnnnnnnnnnnnnnnnnnnnnnnnnnnnnnnnnnnnnnnnnnnnnnnnnnnnnnnnnnnnnnnnnnnnnnnnnnnnnnnnnnnnnnnnnnnnnnnnnnnnnnnnnnnnnnnnnnnnnnnnnnnnnnnnnnnnnnnnnnnnnnnnnnnnnnnnnnnnnnnnnnnnnnnnnnnnnnnnnnnnnnnnnnnnnnnnnnnnnnnnnnnnnnnnnnnnnnnnnnnnnnnnnnnnnnnnnnnnnnnnnnnnnnnnnnnnnnnnnnnnnnnnnnnnnnnnnnnnnnnnnnnnnnnnnnnnnnnnnnnnnnnnnnnnnnnnnnnnnnnnnnnnnnnnnnnnnnnnnnnnnnnnnnnnnnnnnnnnnnnnnnnnnnnnnnnnnnnnnnnnnnnnnnnnnnnnnnnnnnnnnnnnnnnnnnnnnnnnnnnnnnnnnnnnnnnnnnnnnnnnnnnnnnnnnnnnnnnnnnnnnnnnnnnnnnnnnnnnnnnnnnnnnnnnnnnnnnnnnnnnnnnnnnnnnnnnnnnnnnnnnnnnnnnnnnnnnnnnnnnnnnnnnnnnnnnnnnnnnnnnnnnnnnnnnnnnnnnnnnnnnnnnnnnnnnnnnnnnnnnnnnnnnnnnnnnnnnnnnnnnnnnnnnnnnnnnnnnnnnnnnnnnnnnnnnnnnnnnnnnnnnnnnnnnnnnnnnnnnnnnggctggtggttgcagtggaagaggccttcatccacattcagcgtctccaggtcgaggagcagcagaaagccccaggggaggtgatggaccctagggaggccgcccaggccattttcccctccatggccagggctctccagaagtacctgcgcaccacccggcagcagcactaccacagcatggagagcatcctgcagcacctggccttctgcatcaccaacggcatgacccccaagg

SEQ ID NO: 27792 - DNA, 787 bp, Macaca Mulatta
ggcggccaagaggtgcgagaaggccgaggagaaggccaaggagatcgcgaagatggcagagatgctggtggagctggtccggcggatagagaagagcgagtcgtcgtgagcgcggtcggcggttgacagccaatggattctggtcaactggtggagattggctgacaccctggagaaaccgaaaccagagagccttttgttttctcttttttcctctgtctattgctctgtctcacttaacactacgttttctgctatggtctgtggttgatgacctcaatatgagtttcgattgttacgtgtttttgtttggaaagtgattttgtttgaaaatgctctcacatacaggaattagggcctagattgtaagctcttgcagcagtcacatttgttcccgggctttggtggttatttctaaagttttgaggtgctttgctctttcttgtgtgacctgatagctccctggaactttgggtctctgtgtgtgacacatgagactcacagttggagttctccagctctggaggtgctgaaagagctgcattaattctggaagacgactccgtgcagcaactactgaaggaaaggaccagactttcaacggggagtgcggatgggcccgacctggctgggactcgtgaatctgggagaagagcttggagaatggatagtaatggtccggtgatcgggagacttaattttctgtgtgaaacccaagggaggagaagatgtattttggttcaaagttttaaatttttatggtggtacccctatcttatggtaaccc

SEQ ID NO: 27793 - DNA, 793 bp, Macaca Mulatta
ggggggcttcctgtctgtgccagggtggcgcgtggtcttccgtgagcgacagagacgctgaggctgtgttctgaggatgaccgagtgggagacagcggcaccagctgtggcagagaccccagacatcaagctctttgggaagtggagcaccgatgatgtgcagatcaatgacatttccctacaggattacatagcagtgaaggagaagtatgccaagtacctgcctcacagtgcagggcggtatgccgccaaacgcttccgcaaagctcagtgtcccattgtggagcgcctcacgaactccatgatgatgcacggccgcaacaacggcaagaagctgatgactgtgcgcatcgtcaagcatgccttcgagatcatacacctgctcacaggcgagaaccctctgcaggtcctggtgaacgccatcatcaacagtggtccccgggaggactccacccgcattggacgtgccgggactgtgagacgacaggctgtggacgtgtccccactgcgccgtgtgaatcaggccatctggctgctctgcacaggcgctcgtgaggctgccttcaggaacattaagaccattgctgagtgcctggcagatgagctcatcaatgctgccaagggctcctccaactcctatgccatttagaagaaggacgagctggagcgtgtgggccaagtccaaccgcctgatttttcccggctgctgttccattaaacctgttctgcccttttgggggcagccccccctctttatttaagaattttcaaatttaaaatgtgaggagttgta

SEQ ID NO: 27794 - DNA, 605 bp, Macaca Mulatta
  misc_feature (1)...(605): n = A,T,C or G
nnnnnnnnnnnnnnnnnnnnnccaaaaggttcttttcacattaaaaaacccctgctttaaaatacccttatttttttctattgaagaaatggaagacaaagatttagggactcaactgaagtacattaccttagaatatagtgaaatctagtaatagattctgtgtttaacatacaatcttgtctttactgtcctggtattacatgtgctttttgcagaataccattagttttcatttagttcttgccttcagtgggatgaagccctcttgactatgagtaaaggagaaaaggctcgactggagattgaaccagaatgggcttatggaaagaaaggacagcctgatgccaaaattccaccaaatgcaaaactcatttttgaagtggaattagtggatattgactgacatagttcagctctaaggatattagcaacaatgataaaacttggccttgaagaaacttacataactcgttagaacttgttactatggtacaggaagagtcaactggaaaattcaaggagttattaacattggtttacttgatcccagctcccgagagatgtaatcccttatgaattcctgaagtctagaatactttcct

SEQ ID NO: 27795 - DNA, 902 bp, Macaca Mulatta
  misc_feature (1)...(902): n = A,T,C or G
aggctttgaatttctttttgggataccttattttctttattcaggtcaaaaaaatgactctgagctaaatacaaaattgagccagttgcctgacttgcttctgcaggcttgtccgtttggcactttattagatgccaacttaaagaattcattagataataccaattttgcatctgtgactcagccacaaaaacagccagcttggaaaactggaacgtacaaaggaaaaccacaagtttctatttctatcactgaaaaggtaaaatccatgcaatatgataaacagggtatagcggatacatggcaagttgttggaacagtgacttgcaaggngtgtgatttggaaggaatcatgccaaatgttaccatcagcttgaatctccccaccaatggatctccacttcaagatattctagttcatccttgtgtaacttctcttgactctgcaattctgacttctagtagtattgatgcaatggatgactctgcatttagtgggccttacaaatttccattgactccacctttagagtcattcaacttatgctactacacttcccaggtnnnnnnnnnnnnnnnnnnnnnnnnnnnnnnnnnnnnnnnnnnnnnnnnnnnnnnnnnnnnnnnnnnnnnnnnnnnnnnnnnnnnnnnnnnnnnnnnnnnnnnnnnnnnnnnnnnnnnnnnnnnnnnnnnnnnnnnnnnnnnnnnnnnnnnnnnnnnnnnnnnnnnnnnnnnnnnnnnnnnnnnnnnnnnnnnnnnnnnnnnnnnnnnnnnnnnnnnnnnnnnnggccagaagttcccaaaatcaatggaaattagtctttctggaactgtaacttttggagccaagagccatgagaagcagccatttgacccaatttgtatggagaaacagcatattt

SEQ ID NO: 27796 - DNA, 592 bp, Macaca Mulatta
tctgagtgattgtttggggttaatgtcctgtgccctagggttagggaaaaaatggcagactggtgacttccaccctctttgtttcctagatttagcttaaaaaatgattaagtaagtgtagccatggaaggaatctaatgtatatctgtataggtcttcttaacacaaataatgagacagtttcagtatggtaggtaataaatgtgtttctatgattgttcaatttgcagggaaagtggtcaaaatattaaaatcctccgacgtggaccctgctgatggagcagtttacagaacagaagatggagagaccaccttcactggcagactagataaattgcgtttcccctttttctcttttcctgtatttctttacataaaatttgttaacacacatcttctgagagcaggtatggaagacagccatgtgtagtgatggataatttaaagaaaaaaagaatccttgtttcttggcttttgctcctagagttaagcttgctgcccagataacttgtgcattgctttatttagttgaaataaaatcagcattgaatttagttcctactgtgctctgttgaaaatatcattctcattg

SEQ ID NO: 27797 - DNA, 715 bp, Macaca Mulatta
  misc_feature (1)...(715): n = A,T,C or G
ccccctcacctccacaacctccccctttccaatctggcaatcccagnnnnnnnnnnnnnnnnnnnnnnnnnnnnnnnnnnnnnnnnnnnnnnnnnnnnnnnnnnnnnnnnnnnnnnnnnnnnnnnnnnnnnnnnnnnnnnnnnnnnnnnnnnnnnnnnnnnnnnnnnnnnnnnnnnnnnnnnnnnnnnnnnnnnnnnnnnnnnnnnnnnnnnnnnnnnnnnnnnnnnnnnnnnnnnnnnnnnnnnnnnnnnnnnnnnnnnnnnnnnnnnnnnnnnnnnnnnnnnnnnnnnnnnnnnnnnnnnnnnnnnnnnnnnnnnnnnnnnnnnnnnnnnnnnnnnnnnnnnnnnnnnnnnnnnnnnnnnnnnnnnnnnnnnnnnnnnnnnnnnnnnnnnnnnnnnnnnnnnnnnnnnnnnnnnnnnnnnnnnnnnnnnnnnnnnnnnnnnnnnnnnnnnnnnnnnnnnnnnnnnnnnnnnnnnnnnnnnnnnnnnnnnnnnnnnnnnnnncaggttcttactttctaccattgtcccttctacaagcagtatcccttcctgtggccaggaaagaagattccagcgccctgggcaaacaccacaagtgtgcgcaaactaatcctcttcttggagaccactgtgagtgagcgggccccacgaggctccttccacgtctcccaagcgatcctcacccccggagaaagaccatcgcccggggcttg

SEQ ID NO: 27798 - DNA, 1275 bp, Macaca Mulatta
  misc_feature (1)...(1275): n = A,T,C or G
gattagtggaaaaagctgattaaccatatactcataggctgctaattcattcatgccaatgttttggtttttcagttttgcctccgtgatgaattaaagaatggggaggggtgaaggaaggggaggattgctttagaacaagtggcatgaaattaccatcttcatagaaaccacagctaacagtgggagttatctaagcaatcagatgttatagggccagccctttagttgctgtggtgtattctgttgggtagtgaggtagtaggtactttatagacttttaattttggaaattgatgacatccctcaggcatgtattctggaaatggaattcctgtaacttcctgtgtcttcagtttgccctacaattagtaggcagcgtgtaaaaacactagtgtagattataaagatatatattaaaagaggaccagaaatacttggtattcagtggcacagaaagcaggttaaacaaaaagcacagtgttatgcttgcaagtttccatttgttttaataccacgcaatcttttacactggtgcgtgtgcacgcacacagagcttacctgactttgctctgcttgagtcatgcannnnnnnnnnnnnnnnnntcttgacacccacacaatattctaatcaaaacctttcagtttcaatctggatatttaaaaacattggcagaagcttctgtgagtttagttccactaagatgtttcacctgccttatcaagaccattctcagtctacttttttaagctaccgtatcttaaattattgaaaatttattaattgctgaatatataataacctttgcttgtatgtaaccgaaaatggtttaagagccaacatttagagtatgacaatggagctgaacagtttttaatgcgcaagcagttctattcttgtgtatgacttgtaaccttaattaactgtgtaaagatggttacattatttccttagctttgtttgttggagacaaatagagaatgcttgttaaatatgtcaaaacaatcctatcctgtgaatttttgttaatgtattatacaagctatatttttcatttgcccaaaaaagacagctttgaataaacgcttttggaaattttcggctctgaaaatgtcctttaaagctgaacagtccgttagggtttggtttccattttcctccagctaaaaatggtccatttggtggtttttggtaaaacggggtccaaaaattccccagggtccttaaaatgttttttgggggaaaattttataatttggaacacctggcttctt

SEQ ID NO: 27799 - DNA, 649 bp, Macaca Mulatta
aggcatgcttccgcctttacagaacttctgtgccactgtagatagctcaggcaaaactattacctgggtattatccactaatgagtcacaagaaaaggagtggatttggtaagaatagagagttgttttattttaaccacttcccattactgaccattaaaacaaaagctcaccactagagttcctgaaaacaggggaaacctgtatgacagcccttccactttggggagccacacttttgatgtgacagtaccgcagagtgatccaccatgggggatgtaatcaccaaactgttctttggtgtgtgaattattagtggaaaagacccagctgtaattagacctccactgtgtacttagctggaagaacatgttaattctgcaatatgtctcttggttaaacattgcacagttcttacctcatttctgtaaataaagtttcgtgaatctgtttcgtattgtgaaaaattcataagataacattgatattttgatttgtaatatttctaattggtagatttaattgaaaagtaaaattaatttatttttatatgttcaggggaattttaaagtcaagtattttgtagatcactttacaaaatcagtgtggtttattttacttatttaacccactggttgttattctgtac

SEQ ID NO: 27800 - DNA, 565 bp, Macaca Mulatta
ctcccccagagaggggggagctgcttcccgctccccaggcagtcttgctgtccccaggaggccctcgctccactctggacaccacttgttgattattttcctgtttgagcccctcccccaataaagaatttttattgggttttcctgaaacctccaactgttcacccatctaggaccctgaaaatattctacttaagacagccagaaaggctggttcaaaggaacaggatcccaggaggccctgggtatgaagaagggcgactgtctgtccaggcaacccatttctctttgcccaagtcctggccggaacagggaatctttgcaaagttgtctggcagccggtttcagtgtgttgctggggttggaggtgggttgctcgtgggtgctatctgccccatcttcatgtcccttaccctagtccccccagacctcccagactaactcttccctgcatttcaatctccttctatgagcctgagggaaatacaagaatcctaggctcagacttcagttctaccaaagctatccacacatctataacctgtgtcctcagcattctctcaat

SEQ ID NO: 27801 - DNA, 419 bp, Macaca Mulatta
gcagcctcctccaactcacctccatgacagcggtaaaagttggtgacggttgggagcctctggggctgttgaagtcaccttgtgtgttccaagtttccaaacaacagaaagtcactccttcttttttaaaatggtgcttaagttccagcagatgccacgtaaggggtttgccatttgatacccctggggaacatttctgtaaataccattgacacatccgccttttgtatacgtcctgggtaatgagaggtggcttttgcggccagtattagactggaagttcatacctaagtactgtaataatacctcaatgtttgaggagcatgttttgtatacaaatatattgttaatctctgttctgtactgtactaattcttacaatgcctgtatactttagtatgacgctgatacataactaa

SEQ ID NO: 27802 - DNA, 1681 bp, Macaca Mulatta
  misc_feature (1)...(1681): n = A,T,C or G
aggaatggaaggactttcatatagaagcacttgcagtgatagccaattgccttgaagacatggatactatggtgcagattcagcagacagggggtcttaaaaaagctcctgtcatttgcagaaaactctacaattcctgatattcagaagaatgcagcaaaagccattactaaagcagcttatgatcnctgaaaatagaaaactttttcacgaacaagaggttgaaaagtgccttgtagcccttttgggttcggaaaacgatggaactaaaattgctgcttcccaagctatttcagcaatgtgtgagaattcaggcagcaaagattttttcaataatcagggnnnnnnnnnnnnnnnnnnnnnnnnnnnnnnnnnnnnnnnnnnnnnnnnnnnnnnnnnnnnnnnnnnnnnnnnnnnnnnnnnnnnnnnnnnnnnnnnnnnnnnnnnnnnnnnnnnnnnnnnnnnnnnnnnnnnnnnnnnnnnnnnnnnnnnnnnnnnnnnnnnnnnnnnnnnnnnnnnnnnnnnnnnnnnnnnnnnnnnnnnnnnnnnnnnnnnnnnnnnnnnnnnnnnnnnnnnnnnnnnnnnnnnnnnnnnnnnnnnnnnnnnnnnnnnnnnnnnnnnnnnnnnnnnnnnnnnnnnnnnnnnnnnnnnnnnnnnnnnnnnnnnnnnnnnnnnnnnnnnnnnnnnnnnnnnnnnnnnnnnnnnnnnnnnnnnnnnnnnnnnnnnnnnnnnnnnnnnnnnnnnnnnnnnnnnnnnnnnnnnnnnnnnnnnnnnnnnnnnnnnnnnnnnnnnnnnnnnnnnnnnnnnnnnnnnnnnnnnnnnnnnnnnnnnnnnnnnnnnnnnnnnnnnnnnnnnnnnnnnnnnnnnnnnnnnnnnnnnnnnnnnnnnnnnnnnnnnnnnnnnnnnnnnnnnnnnnnnnnnnnnnnnnnnnnnnnnnnnnnnnnnnnnnnnnnnnnnnnnnnnnnnnnnnnnnnnnnnnnnnnnnnnnnnnnnnnnnnnnnnnnnnnnnnnnnnnnnnnnnnnnnnnnnnnnnnnnnnnnnnnnnnnnnnnnnnnnnnnnnnnnnnnnnnnnnnnnnnnnnnnnnnnnnnnnnnnnnnnnnnnnnnnnnnnnnnnnnnnnnnnnnnnnnnnnnnnnnnnnnnnnnnnnnnnnnnnnnnnnnnnnnnnnnnnnnnnnnnnnnnnnnnnnnnnnnnnnnnnnnnnnnnnnnnnnnnnnnnnnnnnnnnnnnnnnnnnnnnnnnnnnnnnnnnnnnnnnnnnnnnnnnnnnnnnnnnnnnnnnnnnnnnnnnnnnnnnnnnnnnnnnnnnnnnnnnnnnnnnnnnnnnnnnnnnnnnnnnnnnnnnnnnnnnnnnnnnnnnnnnnnnnnnnnnnnnnnnnnnnnnnnnnnnnnnnnnnnnnnnnnnnnnnnnnnnnnnnnnnnnnnnnnnnnnnnnnnnnnnnnnnnnnnnnnnnnnnnnnnnnnnnnnnnnnnnnnnnnnnnnnnnnnnnnnnnnnnnnnnnnnnnnnnnnnnnnnnnnntatgtggcagaaaaaatgggtggtaagattacaaaagagaaaatacctgatttcagctgggaacttcacataagtgaactaaaatttcaacttaaatccaatgtcataccgattggacatgtcaaaaaaggaatcttctaccatcgagctttgcttttcaagg

SEQ ID NO: 27803 - DNA, 470 bp, Macaca Mulatta
  misc_feature (1)...(470): n = A,T,C or G
tgaggttcttctgtgcacgttgctgcagctttgggtccgagatgccagctgtccagctgctgcttctggcctgcctggtgtgggatgtgggggccaggacagctcagctccggaaggccaatgaccggagtggccgatgccagtatacgttcagtgtggccagtcccaatgaatccagctgcccagagcaaagccaggccatgtcagtcatccataacctacagaaagacagcagcacccagcgcttagacctggaggccaccaaagctcggctcagctccctggagagcctcncaacctcctccgagacaagtcagttctggaggaagagaagaagagactgaggcaagagaatgagaatctggccaggaggttggaaagcagcagccaggaggtagcaaggctgagaaggggccagtgtccccagacccgagacactgctcgggatgtgccaccaggctccagagaag

SEQ ID NO: 27804 - DNA, 753 bp, Macaca Mulatta
  misc_feature (1)...(753): n = A,T,C or G
agctccagagcactgattccttggaatgccttgaacgtctcatagatttaaacaatggtgaagggcagatttttactattgatggccccctgtacgtgaagaatgtacagtctatgtttgnnnnnnnnnnnnnnnnnnnnnnnnnnnnnnnnnnnnnnnnnnnnnnnnnnnnnnnnnnnnnnnnnnnnnnnnnnnnnnnnnnnnnnnnnnnnnnnnnnnnnnnnnnnnnnnnnnnnnnnnnnnnnnnnnnnnnnnnnnnnnnnnnnnnnnnnnnnnnnnnnnnnnnnnnnnnnnnnnnnnnnnnnnnnnnnnnnnnnnnnnnnnnnnnnnnnnnnnnnnnnnnnnnnnnnnnnnnnnnnnnnnnnnnnnnnnnnnnnnnnnnnnnnnnnnnnnnnnnnnnnnnnnnnnnnnnnnnnnnnnnnnnnnnnnnnnnnnnnnnnnnnnnnnnnnnnnnnnnnnnnnnnnnnnnnnnnnnnnnnnnnnnnnnnnnnnnnnnnnnnnnnnnnnnnnnnnnnnnnnnnnnnnnnnnnnnnnnnnnnnnnnnnnnnnnnnnnnnnnnnnnnnnnnnnnnnnnnnnnnnnnnnnnnnnnnnnnnnnnnnnnnnnnnnnnnnnnnnnnnnnnnnnnnnnnnnngatgctaaagaaaacccttatggcgaggatgacaataagagcccattccccctgcagcccaaaaacaaacgcagttatgcccagaatgtgaccgtctggatcaaacccagcggcctgcag

SEQ ID NO: 27805 - DNA, 584 bp, Macaca Mulatta
  misc_feature (1)...(584): n = A,T,C or G
aggttccatggactgcagaacgccagctgcatggaaagggccagctgcagactttgagccagaaannnnnnnnnnnnnnnnnnnnnnnnnnnnnnnnnnnnnnnnnnnnnnnnnnnnnnnnnnnnnnnnnnnnnnnnnnnnnnnnnnnnnnnnnnnnnnnnnnnnnnnnnnnnnnnnnnnnnnnnnnnnnnnnnnnnnnnnnnnnnnnnnnnnnnnnnnnnnnnnnnnnnnnnnnnnnnnnnnnnnnnnnnnnnnnnnnnnnnnnnnnnnnnnnnnnnnnnnnnnnnnnnnnnnnnnnnnnnnnnnnnnnnnnnnnnnnnnnnnnnnnnnnnnnnnnnnnnnnnnnnnnnnnnnnnnnnnnnnnnnnnnnnnnnnnnnnnnnnnnnnnnnnnnnnnnnnnnnnnnnnnnnnnnnnnnnnnnnnnnnnnnntgccagctttgtgtgtgggcattctgctcccatggacatccctaacaacagcagggaccaatccatgtcactgtcaaaaggcagctgagaagggcctgagccccagggacccctcacctgatgggaatgagagtatggggagcttgcttcttgg

SEQ ID NO: 27806 - DNA, 257 bp, Macaca Mulatta
  misc_feature (1)...(257): n = A,T,C or G
cagtttcaagactgctctgtccctgtcatgtacacatacatgcctaagacaaatcatgtggttcagtatttatcttcacagttttacagcaaatatgctgcagggtgggtggagacagggtaggtctgcagcaccataatgctgttcataaactggatgtgagctgggtgctggcttctcaggataaacacctttgggagtgtcatttttacttaaggtaggacatcttttcaaacanaaaactaccatggatctat

SEQ ID NO: 27807 - DNA, 242 bp, Macaca Mulatta
tgtaatgaatgtggtaaagccttctctcgaatctcatccctcactcttcatgtgagaagtcacacaggggagaaaccctatgaatgtaataaatgtgggaaagccttttctcagtgctcattacttattatacatatgagaagtcatactggtgagaaaccctttgaatgtaatgaatgtgggaaagcattctctcaaagagcatccctttctatacataagagaggtcatacaggtgagag

SEQ ID NO: 27808 - DNA, 541 bp, Macaca Mulatta
tacactgttcatgacaacaacatgaaattgtaaccaatttgcattgtgcaagggcaacttttccaagtaactaattccaaaagaaaaccagatgtctttcagagtccttgaatatgagaatagttccaggctaaaggtaggaatttttaagggcccataaagacaagttctcctgctgggtcctaaccaattcccgctaactcaatgggaacctctcatgcagatccctgcaaattggacatgaatgttggaagctgctatgaagttcactttagatatttctacaacagaacctccaaaagatgtgaatcttttgtcttctctggctgtgatggcaaccttaacaacttcaagcttaaattagaatgtgatgtaacctgtgttacaaaatacaaaccaccggaaggaacctaatcctgtccttggtccttggggtgagtaaaagaagaggttttgacatcctaagatagggaaaatttatcaggggctaaccttgcttggagtgggaagagggaggattgctctaataaaaagttttaaa

SEQ ID NO: 27809 - DNA, 1521 bp, Macaca Mulatta
  misc_feature (1)...(1521): n = A,T,C or G
agtgcccccatctctccctctcccggaagtccatgtaagcagagaatccctcgggaagatttcnnnnnnnnnnnnnnnnnnnnnnnnnnnnnnnnnnnnnnnnnnnnnnnnnnnnnnnnnnnnnnnnnnnnnnnnnnnnnnnnnnnnnnnnnnnnnnnnnnnnnnnnnnnnnnnnnnnnnnnnnnnnnnnnnnnnnnnnnnnnnnnnnnnnnnnnnnnnnnnnnnnnnnnnnnnnnnnnnnnnnnnnnnnnnnnnnnnnnnnnnnnnnnnnnnnnnnnnnnnnnnnnnnnnnnnnnnnnnnnnnnnnnnnnnnnnnnnnnnnnnnnnnnnnnnnnnnnnnnnnnnnnnnnnnnnnnnnnnnnnnnnnnnnnnnnnnnnnnnnnnnnnnnnnnnnnnnnnnnnnnnnnnnnnnnnnnnnnnnnnnnnnnnnnnnnnnnnnnnnnnnnnnnnnnnnnnnnnnnnnnnnnnnnnnnnnnnnnnnnnnnnnnnnnnnnnnnnnnnnnnnnnnnnnnnnnnnnnnnnnnnnnnnnnnnnnnnnnnnnnnnnnnnnnnnnnnnnnnnnnnnnnnnnnnnnnnnnnnnnnnnnnnnnnnnnnnnnnnnnnnnnnnnnnnnnnnnnnnnnnnnnnnnnnnnnnnnnnnnnnnnnnnnnnnnnnnnnnnnnnnnnnnnnnnnnnnnnnnnnnnnnnnnnnnnnnnnnnnnnnnnnnnnnnnnnnnnnnnnnnnnnnnnnnnnnnnnnnnnnnnnnnnnnnnnnnnnnnnnnnnnnnnnnnnnnnnnnnnnnnnnnnnnnnnnnnnnnnnnnnnnnnnnnnnnnnnnnnnnnnnnnnnnnnnnnnnnnnnnnnnnnnnnnnnnnnnnnnnnnnnnnnnnnnnnnnnnnnnnnnnnnnnnnnnnnnnnnnnnnnnnnnnnnnnnnnnnnnnnnnnnnnnnnnnnnnnnnnnnnnnnngccccgaagctgagcctggaatgcagggtcgaccttctcttcctgctggacagctctgcgggcaccgctctggacggcttcctgcgggccaaagccttcgtgaagcagtttgtgcaggccgtgctgagtgaggactctcgggcccgagtgggtgtggccacgtacagcagggagctgctggtggcggtgcctgttggggagtaccaggatgtgcctgacctggtcaggagccttgatggcattcccttccgtggtggccccaccctgatgggcagtgccttgcggcaggcggcagaccgtggctttgggagcgccaccaggacgggccaggaccggccacgcagagtggtggttttgctcactgagtcacgctccgaggatgaggtcgcgggcccagcgcgtcacgcaagggcgcgagagctgctcnnnnnnnnnnnnnnnnnnnnnnnnnnnnnnnnnnnnnnnnnnnnnnnnnnnggcagcccaaagcatgtgatggtctactcagaccctcaggatctgctcaaccaaatccctgagctgcaggggaagctgtgcagccggcagcggccagg

SEQ ID NO: 27810 - DNA, 271 bp, Macaca Mulatta
tgcccaagccctacatcaccagcaattatttcaaccccatggtgaacaagaatgatgtatccttaacttgtgtacctaagactcagggctacacctacgtgtggtgggtaaatggtcagagcgtcctggtcagttcccaggttaaagcaacccggtaaaaacagtatcctcattctagcaaatgtcacaagaaatgacacaagaccctatgaatgtaaaatacgggatcgagttggtagcatccccagtgacccagtcatcctggatgtcc

SEQ ID NO: 27811 - DNA, 507 bp, Macaca Mulatta
gattaaatatatcaatatagtggtcttctttttccaggatggcatcatgaaaaaggagggaaaagataatgtccctgagcattttagtggaagagcagaagatgcagactcttcgtccggggccctcgcttcctcctcactcttggctaaaatgagagctagaaaccacctgattctgccagagcgtttagaaagtgaaagcgggcacctgcaggaagcttctgccctgcttcccaccacagaacatgatgaccttctggtggagatgagaaacttcattgctttccaggcccacactgatggccaggccagcaccagggagatactacaggagtttgaatccaagttatctgcatcgcagtcttgtgtcttccgagaactattgagaaatctgtgcacttttcatagaacttctggtggtgaaggaatttggaaacttaagccagaatactgctaaacaacattgcttcctaaactttcaagtcactttttctaatgggcatttct

SEQ ID NO: 27812 - DNA, 875 bp, Macaca Mulatta
  misc_feature (1)...(875): n = A,T,C or G
cgactgactagtcaggcgacaacctcagagagcatagagcagaggaacaagcgcaacgtccaagagggaagggccagcacgtcgggggcctctctggccctacccgggccgtgttctcgatagttttccggaagaaagggatctaggagcgagatgtgtggagctagcacgacgcgtcgcgctgtgacgctctggcccgacgccgacggcctctcagtggctcgcggaggacccggcgggccgagtgttggannnnnnnnnnnnnnnnnnnnnnnnnnnnnnnnnnnnnnnnnnnnnnnnnnnnnnnnnnnnnnnnnnnnnnnnnnnnnnnnnnnnnnnnnnnnnnnnnnnnnnnnnnnnnnnnnnnnnnnnnnnnnnnnnnnnnnnnnnnnnnnnnnnnncagaggccggaacaggagctgaccaggagctggggccacaggcctaggagcacnctggtcagggctaagaccatggccccgcccccaccgccactggctgccagcaccccgctcctccatggcgagtttggctcctacccagcccgaggcccacgctttgccctcaccctcacgtcgcaggccctgcacatacagcggctgcgccccaaacccgaagccaggccccggggtggcctggtcccgttggccgaggtctcaggctgctgcaccctgcgaagccgtagcccctcagactcagcagcctacttctgcatctacacctaccctcggagccggcgcgggagccggcgcagaaccacccgcaccttccggacagatggggctaccacctacgaagagaaccgtgccgaggcccagcgctgggccaccgccctcacctgtctgctccgaggactgccgctgcccggggatggg

SEQ ID NO: 27813 - DNA, 111 bp, Macaca Mulatta
gaaacagcccgagaacattctaaaggccaatctgcctgtgtccacttcagacccaatgaaggcagtgatggaaacaggcatccaggagctccctctgttgagaagtccaga

SEQ ID NO: 27814 - DNA, 663 bp, Macaca Mulatta
  misc_feature (1)...(663): n = A,T,C or G
gggggaaaaaggcaaatttagagaagcactctttcttggactgcttcgtggcatttggaagcgggaagttccagtgtcctggaaggtggtttgctctgttagaggttcagatgtgtgttattttaatactatataaatatgactgtagtcttctggacccattacccaaacagagttctctccatttggtgggtgtcccccagccagaagggcaatgccgaattgaatataaacaaagaatatgacatctgttgggcctcacaagggccagggccttctgcgggagtggcaccaccccacctggcagcacctagacctgagctctacaaaaaaacactgcttcactttgttttgggacttagttcaagaacacattcaaatggcgcatgtctttggtatcttcaacaatagaccaagaatctatcatcgctctcagtaatatagagaccagaatacatggtttagaggaaatgatcaaatgatccaaaaaaaccccacatttttaaagaagttggaatctgatttcatgcataactgtattaaaacattaaatagatataatgtcatttgaatganaaatctatcacattaaattcactgtgaaggtagcatacttaaatctctnatttgaaagactataaggcttagatttttnnaattata

SEQ ID NO: 27815 - DNA, 145 bp, Macaca Mulatta
taccactgtttgttgcaatgacaaaaacccatgtgatagcagcctcgaaagaagcattttatacctggcaatatcgtgtggcaaagaagctcacagcattggaaattaatcagatcacacggtctcgaaaagaagggagagaaag

SEQ ID NO: 27816 - DNA, 770 bp, Macaca Mulatta
  misc_feature (1)...(770): n = A,T,C or G
gtaccgctaaggccttaatcccgggtcccgagagccctaagtcttctctttgcttgctgatctcgtaccttaatgtgcaaaagaatcacattgggaactgtgaaaattcagaatcctgggcctcactcccagaggatctgatctacatgtgtggagatgcccaggaacctgctttattctcatttgtcgtcccacctctcccccnnnnnnnnncctcggtaacctctgccaaagtgcctgtgaatggcgttcaactgcattatcagcagactggagagggaggtcatgcagtcctactacttcctgggatgttnnnnnnnnnnnnnnnnnnnnnnnnnnnnnnnnnnnnnnnnnnnnnnnnnnnnnnnnnnnnnnnnnnnnnnnnnnnnnnnnnnnnnnnnnnnnnnnnnnnnnnnnnnnnnnnnnnnnnnnnnnnnnnnnnnnnnnnnnnnnnnnnnnnnnnnnnnnnnnnnnnnnnnnnnnnnnnnnnnnnnnnnnnnnnnnnnnnnnnnnnnnnnnnnnnnnnnnnnnnnnnnnnnnnnnnnnnnnnnnnnnnnnnnnnnnnnnnnnnnnnnnnnnnnnnnnnnnnnnnnnnnnnnnnnnnnnnnnnnnnnnnnnnnnnnnnnnnnnnnnnnggcatccgagatgtttctaaatggagtgagagaacaagaaagcctctagaagccctctatgggtatgactactttgccagaacctgtgaaaagtgggtggatggcataagacagtttaaacatctcccagatggt

SEQ ID NO: 27817 - DNA, 1240 bp, Macaca Mulatta
  misc_feature (1)...(1240): n = A,T,C or G
agtggagacggctatttcgaaaacagcccactgatgtcccagccagtgtgggagaagtatcgccctgatagattcctgaattccagctcagnnnnnnnnnnnnnnnnnnnnnnnnnnnnnnnnnnnnnnnnnnnnnnnnnnnnnnnnnnnnnnnnnnnnnnnnnnnnnnnnnnnnnnnnnnnnnnnnnnnnnnnnnnnnnnnnnnnnnnnnnnnnnnnnnnnnnnnnnnnnnnnnnnnnnnnnnnnnnnnnnnnnnnnnnnnnnnnnnnnnnnnnnnnnnnnnnnnnnnnnnnnnnnnnnnnnnnnnnnnnnnnnnnnnnnnnnnnnnnnnnnnnnnnnnnnnnnnnnnnnnnnnnnnnnnnnnnnnnnnnnnnnnnnnnnnnnnnnnnnnnnnnnnnnnnnnnnnnnnnnnnnnnnnnnnnnnnnnnnnnnnnnnnnnnnnnnnnnnnnnnnnnnnnnnnnnnnnnnnnnnnnnnnnnnnnnnnnnnnnnnnnnnnnnnnnnnnnnnnnnnnnnnnnnnnnnnnnnnnnnnnnnnnnnnnnnnnnnnnnnnnnnnnnnnnnnnnnnnnnnnnnnnnnnnnnnnnnnnnnnnnnnnnnnnnnnnnnnnnnnnnnnnnnnnnnnnnnnnnnnnnnnnnnnnnnnnnnnnnnnnnnnnnnnnnnnnnnnnnnnnnnnnnnnnnnnnnnnggctcagtaccgctctggcagcctgggccccgtgacggtnggtccaatggctccttgagcctcatgatggaatccatgtcctgctggataaccagactgtgacatttgagcctggacatggagacggcggaggnnnnnnnnnnnnnnnnnnnnnnnnnnnnnnnnnnnnnnnnnnnnnnnnnnnnnnnnnnnnnnnnnnnnnnnnnnnnnnnnnnnnnnnnnnnnnnnnnnnnnnnnnnnnnnnnnnnnnnnnnnnnnnnnnnnnnnnnnnnnnnnnnnnnnnnnnnnnnnnnnnnnnnnnnnnnnnnnnnnnnnnnnnnnnnnnnnnnnnnnnnnnnnnnnnnnnnnnnnnnnnnnnnnnnnnnnnnnnnnnnnnnnnnnnnnnnnnnnnnnnnnnnnnnnggcagatcaacgggacaggccttcttggcaagaggaatgaccagctgccttccaacttcacccctgttttctactcacaactgcaaaacagctcctgggctgaagatgtgatctccagctgtaatggagacagctcatgcatctatgacac

SEQ ID NO: 27818 - DNA, 455 bp, Macaca Mulatta
ccacttgtctatggtgcaaagaccacgcagattcgcattcatgtggtaaaaatgttctgttcataaaatccaccttaattaatgcccacatgcttccttcttttgcaatagtaaccatatcaaaacaaaacaacaatacgtattatttgagatgcttggtttgtgaaatctgccagcataatagctggttttagatcatcatagcatatcaatcaatggggttgtaaattctacctgactaatgaaattgggaagtgtgaagagtaaagtagtgaatacatactgtttgttttttctcctttattctttagcccctggttgagttattcctctaagaatatttctcaaggaggatttataaattatgcctttgtcactgaatttaaatgcacctaagtctcgttctgaaacgtccaggtactcaacgaaaacaagttgttgactttcattttctc

SEQ ID NO: 27819 - DNA, 523 bp, Macaca Mulatta
ctttactgtatcagtggaggtaacttctgaagtttaaatttttcctactgatttttttgttactgctaattgtatctgtgataagaaaacctagattataaaaatagtgtatattttcctgtactgcaatatcctacagcttaaatttcagtctttttattctagttgtccctggcaaacctggtgagactcaaccaagccctttttcccccaagcaagaggaaaatggaatctctgtatcaatgtggttttgatgacactattaagtttttacttaaagaaaattggtttgaataaaatgcttaaaagcttataatgcaaaacatgtttcagacagtttttgatggaagtttctaatcaaatcctttttagaaaatctatcaagactctcaattgtattattactccttgtaatatttgtgtttatttttaatatttgaattattacctagtgcaaggatgtaagaggcactttattagaatttgacaatgtcatttagaaggatacacttaggtgataaga

SEQ ID NO: 27820 - DNA, 108 bp, Macaca Mulatta
agacaagtggctaccagtccggatatcactccgacgacacagacaccactgtgtactccagtgaggaagcagaacttttaaagctgatagagatcggagtgcaaaccg

SEQ ID NO: 27821 - DNA, 3565 bp, Macaca Mulatta
  misc_feature (1)...(3565): n = A,T,C or G
ggtgctctgccaatggatttatgacccagactgccaacaactctagccaaggtttttgtggcaccgtgggatcaggaatgaaaaatggaggacaggaaaccattgaaatgaagaaaggaggacatcagaccttggaatcctgccgggggnnnnnnnnnnnnnnnnnnnnnnnnnnnnnnnnnnnnnnnnnnnnnnnnnnnnnnnnnnnnnnnnnnnnnnnnnnnnnnnnnnnnnnnnnnnnnnnnnnnnnnnnnnnnnnnnnnnnnnnnnnnnnnnnnnnnnnnnnnnnnnnnnnnnnnnnnnnnnnnnnnnnnnnnnnnnnnnnnnnnnnnnnnnnnnnnnnnnnnnnnnnnnnnnnnnnnnnnnnnnnnnnnnnnnnnnnnnnnnnnnnnnnnnnnnnnnnnnnnnnnnnnnnnnnnnnnnnnnnnnnnnnnnnnnnnnnnnnnnnnnnnnnnnnnnnnnnnnnnnnnnnnnnnnnnnnnnnnnnnnnnnnnnnnnnnnnnnnnnnnnnnnnnnnnnnnnnnnnnnnnnnnnnnnnnnnnnnnnnnnnnnnnnnnnnnnnnnnnnnnnnnnnnnnnnnnnnnnnnnnnnnnnnnnnnnnnnnnnnnnnnnnnnnnnnnnnnnnnnnnnnnnnnnnnnnnnnnnnnnnnnnnnnnnnnnnnnnnnnnnnnnnnnnnnnnnnnnnnnnnnnnnnnnnnnnnnnnnnnnnnnnnnnnnnnnnnnnnnnnnnnnnnnnnnnnnnnnnnnnnnnnnnnnnnnnnnnnnnnnnnnnnnnnnnnnnnnnnnnnnnnnnnnnnnnnnnnnnnnnnnnnnnnnnnnnnnnnnnnnnnnnnnnnnnnnnnnnnnnnnnnnnnnnnnnnnnnnnnnnnnnnnnnnnnnnnnnnnnnnnnnnnnnnnnnnnnnnnnnnnnnnnnnnnnnnnnnnnnnnnnnnnnnnnnnnnnnnnnnnnnnnnnnnnnnnnnnnnnnnnnnnnnnnnnnnnnnnnnnnnnnnnnnnnnnnnnnnnnnnnnnnnnnnnnnnnnnnnnnnnnnnnnnnnnnnnnnnnnnnnnnnnnnnnnnnnnnnnnnnnnnnnnnnnnnnnnnnnnnnnnnnnnnnnnnnnnnnnnnnnnnnnnnnnnnnnnnnnnnnnnnnnnnnnnnnnnnnnnnnnnnnnnnnnnnnnnnnnnnnnnnnnnnnnnnnnnnnnnnnnnnnnnnnnnnnnnnnnnnnnnnnnnnnnnnnnnnnnnnnnnnnnnnnnnnnnnnnnnnnnnnnnnnnnnnnnnnnnnnnnnnnnnnnnnnnnnnnnnnnnnnnnnnnnnnnnnnnnnnnnnnnnnnnnnnnnnnnnnnnnnnnnnnnnnnnnnnnnnnnnnnnnnnnnnnnnnnnnnnnnnnnnnnnnnnnnnnnnnnnnnnnnnnnnnnnnnnnnnnnnnnnnnnnnnnnnnnnnnnnnnnnnnnnnnnnnnnnnnnnnnnnnnnnnnnnnnnnnnnnnnnnnnnnnnnnnnnnnnnnnnnnnnnnnnnnnnnnnnnnnnnnnnnnnnnnnnnnnnnnnnnnnnnnnnnnnnnnnnnnnnnnnnnnnnnnnnnnnnnnnnnnnnnnnnnnnnnnnnnnnnnnnnnnnnnnnnnnnnnnnnnnnnnnnnnnnnnnnnnnnnnnnnnnnnnnnnnnnnnnnnnnnnnnnnnnnnnnnnnnnnnnnnnnnnnnnnnnnnnnnnnnnnnnnnnnnnnnnnnnnnnnnnnnnnnnnnnnnnnnnnnnnnnnnnnnnnnnnnnnnnnnnnnnnnnnnnnnnnnnnnnnnnnnnnnnnnnnnnnnnnnnnnnnnnnnnnnnnnnnnnnnnnnnnnnnnnnnnnnnnnnnnnnnnnnnnnnnnnnnnnnnnnnnnnnnnnnnnnnnnnnnnnnnnnnnnnnnnnnnnnnnnnnnnnnnnnnnnnnnnnnnnnnnnnnnnnnnnnnnnnnnnnnnnnnnnnnnnnnnnnnnnnnnnnnnnnnnnnnnnnnnnnnnnnnnnnnnnnnnnnnnnnnnnnnnnnnnnnnnnnnnnnnnnnnnnnnnnnnnnnnnnnnnnnnnnnnnnnnnnnnnnnnnnnnnnnnnnnnnnnnnnnnnnnnnnnnnnnnnnnnnnnnnnnnnnnnnnnnnnnnnnnnnnnnnnnnnnnnnnnnnnnnnnnnnnnnnnnnnnnnnnnnnnnnnnnnnnnnnnnnnnnnnnnnnnnnnnnnnnnnnnnnnnnnnnnnnnnnnnnnnnnnnnnnnnnnnnnnnnnnnnnnnnnnnnnnnnnnnnnnnnnnnnnnnnnnnnnnnnnnnnnnnnnnnnnnnnnnnnnnnnnnnnnnnnnnnnnnnnnnnnnnnnnnnnnnnnnnnnnnnnnnnnnnnnnnnnnnnnnnnnnnnnnnnnnnnnnnnnnnnnnnnnnnnnnnnnnnnnnnnnnnnnnnnnnnnnnnnnnnnnnnnnnnnnnnnnnnnnnnnnnnnnnnnnnnnnnnnnnnnnnnnnnnnnnnnnnnnnnnnnnnnnnnnnnnnnnnnnnnnnnnnnnnnnnnnnnnnnnnnnnnnnnnnnnnnnnnnnnnnnnnnnnnnnnnnnnnnnnnnnnnnnnnnnnnnnnnnnnnnnnnnnnnnnnnnnnnnnnnnnnnnnnnnnnnnnnnnnnnnnnnnnnnnnnnnnnnnnnnnnnnnnnnnnnnnnnnnnnnnnnnnnnnnnnnnnnnnnnnnnnnnnnnnnnnnnnnnnnnnnnnnnnnnnnnnnnnnnnnnnnnnnnnnnnnnnnnnnnnnnnnnnnnnnnnnnnnnnnnnnnnnnnnnnnnnnnnnnnnnnnnnnnnnnnnnnnnnnnnnnnnnnnnnnnnnnnnnnnnnnnnnnnnnnnnnnnnnnnnnnnnnnnnnnnnnnnnnnnnnnnnnnnnnnnnnnnnnnnnnnnnnnnnnnnnnnnnnnnnnnnnnnnnnnnnnnnnnnnnnnnnnnnnnnnnnnnnnnnnnnnnnnnnnnnnnnnnnnnnnnnnnnnnnnnnnnnnnnnnnnnnnnnnnnnnnnnnnnnnnnnnnnnnnnnnnnnnnnnnnnnnnnnnnnnnnnnnnnnnnnnnnnnnnnnnnnnnnnnnnnnnnnnnnnnnnnnnnnnnnnnnnnnnnnnnnnnnnnnnnnnnnnnnnnnnnnnnnnnnnnnnnnnnnnnnnnnnnnnnnnnnnnnnnnnnnnnnnnnnnnnnnnnnnnnnnnnnnnnnnnnnnnnnnnnnnnnnnnnnnnnnnnnnnnnnnnnnnnnnnnnnnnnnnnnnnnnnnnnnnnnnnnnnnnnnnnnnnnnnnnnnnnnnaaggtgaaatttatggtatttcagtgtgcaagaaaatattttttaaagctttcatttctcccccagtgaatgatttggaatttttatgtaaatgtacagattggttttttcttatttttataaggaagcagctgtctaaaatgcagtggggtttgttttgcaacgttttaaacagagctttaatattgctgttaaaagaagttcctttgcttttaaagaaacgtggctgcttaaaataagcagaaattggatgtggaaagtaatatttacagatatggggggatgtaataaaacaacattaacttg

SEQ ID NO: 27822 - DNA, 629 bp, Macaca Mulatta
gggcaatatagtgatcgggctctgacttggtagcacagtaagacagacttgccttaaactcctaattccaccacttacaaagtcattgtttgaacttgactcttgtttaacctgtgtagcctcagttttcttgtatattcagtggggctaatgatacttgcttgagttattgtaaacattaaatgggatgacgtatgtgaagtacttagcttggtgcctagcacagagtaagtgctcaatatgtggcagttgccattattactattttagatgatcttattacacttacacatctaattatagaaatatgtacatattgaaagaaatttactttcaggcatgaggaaatatttcttcggaaaagctaaaatttttggcgactgaaatataaagatttacttgctcacatacactaaaaactatattactctccaatattattgtgtcctaacatttttccctgaaaacggattcttttctgctattatcgaagaaacttgattcctgcaatgaaaccgtctttggcatctctggaatctcaatctctatcccttttcttcccaaggtctgactaattctaattgactcccatccgacgacatctatatagaaattcctcttctctaata

SEQ ID NO: 27823 - DNA, 110 bp, Macaca Mulatta
aatcagtgcgtacacctattactgggactattaatgatttgaatcagcaagtgtggacccttcagggtcagatccttgtggcagttccacgaagtgacagtgtgacccca

SEQ ID NO: 27824 - DNA, 93 bp, Macaca Mulatta
  misc_feature (1)...(93): n = A,T,C or G
ngatccaggtggagcttgacctgaagtaccagcccccagagggtgctactggagcctggtcagaagaggactttggggcacccatccaggaca

SEQ ID NO: 27825 - DNA, 186 bp, Macaca Mulatta
gatttcattcccattcatcatcaccaataaaatgaggacgaatcctgggctggctgaggccctgtggtccttggctccttgccctgtgccttctcagcctcaaggcaggcagtctgtgtcagaggtagagatggtacccacagagggtaccagagctgcgcagatacatgagcccagaggcagaat

SEQ ID NO: 27826 - DNA, 4152 bp, Macaca Mulatta
  misc_feature (1)...(4152): n = A,T,C or G
ggaggctctagatggcggctgtgccttagagagagcgcgctctgctccctgcctttgcctcactttacgcaactttcnnnnnnnnnnnnnnnnnnnnnnnnnnnnnnnnnnnnnnnnnnnnnnnnnnnnnnnnnnnnnnnnnnnnnnnnnnnnnnnnnnnnnnnnnnnnnnnnnnnnnnnnnnnnnnnnnnnnnnnnnnnnnnnnnnnnnnnnnnnnnnnnnnnnnnnnnnnnnnnnnnnnnnnnnnnnnnnnnnnnnnnnnnnnnnnnnnnnnnnnnnnnnnnnnnnnnnnnnnnnnnnnnnnnnnnnnnnnnnnnnnnnnnnnnnnnnnnnnnnnnnnnnnnnnnnnnnnnnnnnnnnnnnnnnnnnnnnnnnnnnnnnnnnnnnnnnnnnnnnnnnnnnnnnnnnnnnnnnnnnnnnnnnnnnnnnnnnnnnnnnnnnnnnnnnnnnnnnnnnnnnnnnnnnnnnnnnnnnnnnnnnnnnnnnnnnnnnnnnnnnnnnnnnnnnnnnnnnnnnnnnnnnnnnnnnnnnnnnnnnnnnnnnnnnnnnnnnnnnnnnnnnnnnnnnnnnnnnnnnnnnnnnnnnnnnnnnnnnnnnnnnnnnnnnnnnnnnnnnnnnnnnnnnnnnnnnnnnnnnnnnnnnnnnnnnnnnnnnnnnnnnnnnnnnnnnnnnnnnnnnnnnnnnnnnnnnnnnnnnnnnnnnnnnnnnnnnnnnnnnnnnnnnnnnnnnnnnnnnnnnnnnnnnnnnnnnnnnnnnnnnnnnnnnnnnnnnnnnnnnnnnnnnnnnnnnnnnnnnnnnnnnnnnnnnnnnnnnnnnnnnnnnnnnnnnnnnnnnnnnnnnnnnnnnnnnnnnnnnnnnnnnnnnnnnnnnnnnnnnnnnnnnnnnnnnnnnnnnnnnnnnnnnnnnnnnnnnnnnnnnnnnnnnnnnnnnnnnnnnnnnnnnnnnnnnnnnnnnnnnnnnnnnnnnnnnnnnnnnnnnnnnnnnnnnnnnnnnnnnnnnnnnnnnnnnnnnnnnnnnnnnnnnnnnnnnnnnnnnnnnnnnnnnnnnnnnnnnnnnnnnnnnnnnnnnnnnnnnnnnnnnnnnnnnnnnnnnnnnnnnnnnnnnnnnnnnnnnnnnnnnnnnnnnnnnnnnnnnnnnnnnnnnnnnnnnnnnnnnnnnnnnnnnnnnnnnnnnnnnnnnnnnnnnnnnnnnnnnnnnnnnnnnnnnnnnnnnnnnnnnnnnnnnnnnnnnnnnnnnnnnnnnnnnnnnnnnnnnnnnnnnnnnnnnnnnnnnnnnnnnnnnnnnnnnnnnnnnnnnnnnnnnnnnnnnnnnnnnnnnnnnnnnnnnnnnnnnnnnnnnnnnnnnnnnnnnnnnnnnnnnnnnnnnnnnnnnnnnnnnnnnnnnngccactggagcttctactactgtatatgcgattgaagctaatggagaccctagtggtgactttgacactgaaaaggatgaaggtgaaatccagtacctcatcaagtggaagggttggtcttacatccacagcacatgggagagtgaagaatccttacagcaacagaaagtgaagggcctaaaaaagctagagaacttcaagaaaaaagaggatgaaatcaaacaatggtnnnnnnnnnnnnnnnnnnnnnnnnnnnnnnnnnnnnnnnnnnnnnnnnnnnnnnnnnnnnnnnnnnnnnnnnnnnnnnnnnnnnnnnnnnnnnnnnnnnnnnnnnnnnnnnnnnnnnnnnnnnnnnnnnnnnnnnnnnnnnnnnnnnnnnnnnnnnnnnnnnnnnnnnnnnnnnnnnnnnnnnnnnnnnnnnnnnnnnnnnnnnnnnnnnnnnnnnnnnnnnnnnnnnnnnnnnnnnnnnnnnnnnnnnnnnnnnnnnnnnnnnnnnnnnnnnnnnnnnnnnnnnnnnnnnnnnnnnnnnnnnnnnnnnnnnnnnnnnnnnnnnnnnnnnnnnnnnnnnnnnnnnnnnnnnnnnnnnnnnnnnnnnnnnnnnnnnnnnnnnnnnnnnnnnnnnnnnnnnnnnnnnnnnnnnnnnnnnnnnnnnnnnnnnnnnnnnnnnnnnnntgcagaaataacagtgtaatccttgctgatgaaatgggcctaggaaagaccatccagaccatatcattcctctcctacctgttccaccaacaccagctgtatggcccctttcttatagtcgtccctttatccaccctcacctcatggcagagagagtttgaaatctgggcaccagagattaacgtagtggtttacatagatgacctgatgagcagaaatacnnnnnnnnnnnnnnnnnnnnnnnnnnnnnnnnnnnnnnnnnnnnnnnnnnnnnnnnnnnnnnnnnnnnnnnnnnnnnnnnnnnnnnnnnnnnnnnnnnnnnnnnnnnnnnnnnnnnnnnnnnnnnnnnnnnnnnnnnnnnnnnnnnnnnnnnnnnnnnnnnnnnnnnnnnnnnnnnnnnnnnnnnnnnnnnnnnnnnnnnnnnnnnnnnnnnnnnnnnnnnnnnnnnnnnnnnnnnnnnnnnnnnnnnnnnnnnnnnnnnnnnnnnnnnnnnnnnnnnnnnnnnnnnnnnnnnnnnnnnnnnnnnnnnnnnnnnnnnnnnnnnnnnnnnnnnnnnnnnnnnnnnnnnnnnnnnnnnnnnnnnnnnnnnnnnnnnnnnnnnnnnnnnnnnnnnnnnnnnnnnnnnnnnnnnnnnnnnnnnnnnnnnnnnnnnnnnnnnnnnnnnnnnnnnnnnnnnnnnnnnnnnnnnnnnnnnnnnnnnnnnnnnnnnnnnnnnnnnnnnnnnnnnnnnnnnnnnnnnnnnnnnnnnnnnnnnnnnnnnnnnnnnnnnnnnnnnnnnnnnnnnnnnnnnnnnnnnnnnnnnnnnnnnnnnnnnnnnnnnnnnnnnnnnnnnnnnnnnnnnnnnnnnnnnnnnnnnnnnnnnnnnnnnnnnnnnnnnnnnnnnnnnnnnnnnnnnnnnnnnnnnnnnnnnnnnnnnnnnnnnnnnnnnnnnnnnnnnnnnnnnnnnnnnnnnnnnnnnnnnnnnnnnnnnnnnnnnnnnnnnnnnnnnnnnnnnnnnnnnnnnnnnnnnnnnnnnnnnnnnnnnnnnnnnnnnnnnnnnnnnnnnnnnnnnnnnnnnnnnnnnnnnnnnnnnnnnnnnnnnnnnnnnnnnnnnnnnnnnnnnnnnnnnnnnnnnnnnnnnnnnnnnnnnnnnnnnnnnnnnnnnnnnnnnnnnnnnnnnnnnnnnnnnnnnnnnnnnnnnnnnnnnnnnnnnnnnnnnnnnnnnnnnnnnnnnnnnnnnnnnnnnnaggtaaatatttaccgcttagttacaaaggggactgtggaggaggagatcatagaacgggccaaaaagaagatggtattggatcatctggtgattcagcgcatggacaccactggccggacgatcctggaaaacaactcgggaaggtccaannnnnnnnnnnnnnnnnnnnnnnnnnnnnnnnnnnnnnnnnnnnnnnnnnnnnnnnnnnnnnnnnnnnnnnnnnnnnnnnnnnnnnnnnnnnnnnnnnnnnnnnnnnnnnnnnnnnnnnnnnnnnnnnnnnnnnnnnnnnnnnnnnnnnnnnnnnnnnnnnnnnnnnnnnnnnnnnnnnnnnnnnnnnnnnnnnnnnnnnnnnnnnnnnnnnnnnnnnnnnnnnnnnnnnnnnnnnnnnnnnnnnnnnnnnnnnnnnnnnnnnnnnnnnnnnnnnnnnnnnnnnnnnnnnnnnnnnnnnnnnnnnnnnnnnnnnnnnnnnnnnnnnnnnnnnnnnnnnnnnnnnnnnnnnnnnnnnnnnnnnnnnnnnnnnnnnnnnnnnnnnnnnnnnnnnnnnnnnnnnnnnnnnnnnnnnnnnnnnnnnnnnnnnnnnnnnnnnnnnnnnnnnnnnnnnnnnnnnnnnnnnnnnnnnnnnnnnnnnnnnnnnnnnnnnnnnnnnnnnnnnnnnnnnnnnnnnnnnnnnnnnnnnnnnnnnnnnnnnnnnnnnnnnnnnnnnnnnnnnnnnnnnnnnnnnnnnnnngctggagtgcatagcacgtgatgctgagctggtagataagtcggtggcagatctgaagcgcctgggtgaactgatccacaacagttgtgtgtcagcaatgcaggaatatgaagagcagctgaaagaaaatgccagcgaggg

SEQ ID NO: 27827 - DNA, 877 bp, Macaca Mulatta
tcgacgtctttgatgggtacttggagtagggtctcgactgccgttcccctcttccctcgagccgcaacccacgtcctggaccagccgcccagatcatgccgccgcagctggttgggggcaccatctggacggggatggttccccaggaggagatcctcccctgcctccgaggcctgtaagtgccatctccgaacaggatgagggcggtttggggcgctggcaagggagagggaggcatccccaggccggatacacacccctccctcaggcttctcccttcacctcctccaggtttaactggatgccaggaatggccagacccctcttaagtccttcgtttgggctagaaagcttccctcagcaaaggggacagttggtgaaaaggaaggggaccccgagactaagttacatttggggtcaccctgtgacttaccccccaaagcttatggaaaaagccttcgcttccaaatctatttgaggaagagctgttcgctcctcccccaatcctcatcctggcttgatgatgaccttggcttttgggggattctcggtcatcctagaaggataaagatttagaggtgtcagaaggcacagggagccaggcacgaatcatatttgtactgtggcccttgggtggctgggtggggattaagtgcaggggctccaggccaaggctgtgagaggagaaatctcaagcaaagaagcctgtacttccttttggccttgggtttgctgctattttggagtcagatttcagggtgccccagctcatcagttctgcagctcagaactgcaggggctgccagttttgtaggctcccttcacagaacaggcaggcagggagctggtgctagggctcgctttgtctgcagtgttt

SEQ ID NO: 27828 - DNA, 633 bp, Macaca Mulatta
gattgcccccttgtggagagaatgctgcatggcacctgagtgtctccgactacagattcttccttaaggggatgaaatttgtcacatttctttaaagtcacacctttaaaactggactaagccttttagacactgtaccaggatacaaggtcacaggcctgttgatattgagatgtaaacccagaatattctcgcattacacagaaacaccattgcaacaccagctacactccacatcctacagaaaagcattacccattttgtggccaagttcccgatgagaggctggacctcttcatcacattgacttacgccgttgcctttccagaccgggcagaggggctgactccgcagtgtgtgccaaacagccagtgtctgatgatcccgttttcctgcttatcacctgagccgtgtcagtatcactttcgggtttgttggttggttagttgtttcaatatgccctgttttctacttctgttgggaaatatttagagttgaaataaaccagtgggagcttgggagccagtttggtggttgacaaactaacagtgatagaaaacaaatgacaggttttctgtgagcatatgtcacagcggctcgggcccacaaggagatagaggggtacgtttcagg

SEQ ID NO: 27829 - DNA, 430 bp, Macaca Mulatta
cttatgaggaagccgtgagcttcccagtggccgaggggcccccaacaccacctgcataccctatggaggaagccctggagccaagtgcaccaaaggatgccctgctcagcacccagcccccctggcctccacccagctacgagagcatcatccttgctcttgatgccgtttctgcagagacgacactgagcaccacgtgctcctgctcaggcctggttcagactgcacggggaggaagctaaaggctcatagcgggccctgaatccagagacaaaaatgctgtatcttttccagagtctcatgcagtgcctgggccacagtaggcactcaacagatgttcattgtcgaaggctgttctatttatctattgctgtatagcaaaccaccccaaatttagtggcttaaaataaatcccattttattatatctc

SEQ ID NO: 27830 - DNA, 427 bp, Macaca Mulatta
ccctgctcttttactggggaggtggttgttagagaaatcattactgagaataggggcacatgaggtagtgtggggtctcaaaggatggttctagaataagagtttgccgcaaagccaaggaaaaaagacattcctgccaatggcaatacccgagcaggcaaggagtccccaaacagcatttggtatgacttaagtgtgaggaggggggcttgttagacaagcctggagagaaggaagcagaggacagattgtggctctgtttgtatgcagggctcaggagcttttttcctgttggaattggggagcatctgcagtcatttaacacatgctagctttgtgactcaattaagtatcttatgcaaaagtgactggctccactctccagcacagggctcaacagatgttgacttctccaccccgagttctt

SEQ ID NO: 27831 - DNA, 151 bp, Macaca Mulatta
gcagcctccaaacatgcaacccaggctttctttgactgtctgcgcgccgaaatggaacagtatgaaattgaggtgaccgtcatcagccccggctacatccacaccaacctctctgtcaatgccatcaccgcggatggatctaggtatggag

SEQ ID NO: 27832 - DNA, 401 bp, Macaca Mulatta
  misc_feature (1)...(401): n = A,T,C or G
agggaattccaacctgtggaaccttggggggtccctggggtcggcgccttcccattgactgtgggcggtgcaagggacggaggctctggnnnnnnnnnnnnnnnnnnnnnnnnnnnnnnnnnnnnnnnnnnnnnnnnnnnnnnnnnnnnnnacgggtattccaagtttgccggcctcccggtctgacgccggggagggagagctcaggccgccatgcgggacaggacccacgagctgaggcaggncagggggatgacagctcggacgaagaggacaaggagcgagtcgcgctggtggtgcacccgggcacggcacggctggggagcccggacgaggagttcttccagaaggtnaggtccggacaattcggcagactattgtcaagctggggaataaagtcc

SEQ ID NO: 27833 - DNA, 15929 bp, Macaca Mulatta
  misc_feature (1)...(15929): n = A,T,C or G
aggtgtggacatatcaagatcgccagtgtgtcctgagtaccttagcacagttgctcttggataaggactgtactgtgctggttggtcgccaccttcgccctctccttttggatttgctggaaaggaatgccgaagccattaaagctggaggccaaatcaaccatgatctgcatgaacggctctgtgtgtcgatgagcaaactcatcggtaaccatcctgatgtcctcccgtnnnnnnnnnnnnnnnnnnnnnnnnnnnnnnnnnnnnnnnnnnnnnnnnnnnnnnnnnnnnnnnnnnnnnnnnnnnnnnnnnnnnnnnnnnnnnnnnnnnnnnnnnnnnnnnnnnnnnnnnnnnnnnnnnnnnnnnnnnnnnnnnnnnnnnnnnnnnnnnnnnnnnnnnnnnnnnnnnnnnnnnnnnnnnnnnnnnnnnnnnnnnnnnnnnnnnnnnnnnnnnnnnnnnnnnnnnnnnnnnnnnnnnnnnnnnnnnnnnnnnnnnnnnnnnnnnnnnnnnnnnnnnnnnnnnnnnnnnnnnnnnnnnnnnnnnnnnnnnnnnnnnnnnnnnnnnnnnnnnnnnnnnnnnnnnnnnnnnnnnnnnnnnnnnnnnnnnnnnnnnnnnnnnnnnnnnnnnnnnnnnnnnnnnnnnnnnnnnnnnnnnnnnnnnnnnnnnnnnnnnnnnnnnnnnnnnnnnnnnnnnnnnnnnnnnnnnnnnnnnnnnnnnnnnnnnnnnnnnnnnnnnnnnnnnnnnnnnnnnnnnnnnnnnnnnnnnnnnnnnnnnnnnnnnnnnnnnnnnnnnnnnnnnnnnnnnnnnnnnnnnnnnnnnnnnnnnnnnnnnnnnnnnnnnnnnnnnnnnnnnnnnnnnnnnnnnnnnnnnnnnnnnnnnnnnnnnnnnnnnnnnnnnnnnnnnnnnnnnnnnnnnnnnnnnnnnnnnnnnnnnnnnnnnnnnnnnnnnnnnnnnnnnnnnnnnnnnnnnnnnnnnnnnnnnnnnnnnnnnnnnnnnnnnnnnnnnnnnnnnnnnnnnnnnnnnnnnnnnnnnnnnnnnnnnnnnnnnnnnnnnnnnnnnnnnnnnnnnnnnnnnnnnnnnnnnnnnnnnnnnnnnnnnnnnnnnnnnnnnnnnnnnnnnnnnnnnnnnnnnnnnnnnnnnnnnnnnnnnnnnnnnnnnnnnnnnnnnnnnnnnnnnnnnnnnnnnnnnnnnnnnnnnnnnnnnnnnnnnnnnnnnnnnnnnnnnnnnnnnnnnnnnnnnnnnnnnnnnnnnnnnnnnnnnnnnnnnnnnnnnnnnnnnnnnnnnnnnnnnnnnnnnnnnnnnnnnnnnnnnnnnnnnnnnnnnnnnnnnnnnnnnnnnnnnnnnnnnnnnnnnnnnnnnnnnnnnnnnnnnnnnnnnnnnnnnnnnnnnnnnnnnnnnnnnnnnnnnnnnnnnnnnnnnnnnnnnnnnnnnnnnnnnnnnnnnnnnnnnnnnnnnnnnnnnnnnnnnnnnnnnnnnnnnnnnnnnnnnnnnnnnnnnnnnnnnnnnnnnnnnnnnnnnnnnnnnnnnnnnnnnnnnnnnnnnnnnnnnnnnnnnnnnnnnnnnnnnnnnnnnnnnnnnnnnnnnnnnnnnnnnnnnnnnnnnnnnnnnnnnnnnnnnnnnnnnnnnnnnnnnnnnnnnnnnnnnnnnnnnnnnnnnnnnnnnnnnnnnnnnnnnnnnnnnnnnnnnnnnnnnnnnnnnnnnnnnnnnnnnnnnnnnnnnnnnnnnnnnnnnnnnnnnnnnnnnnnnnnnnnnnnnnnnnnnnnnnnnnnnnnnnnnnnnnnnnnnnnnnnnnnnnnnnnnnnnnnnnnnnnnnnnnnnnnnnnnnnnnnnnnnnnnnnnnnnnnnnnnnnnnnnnnnnnnnnnnnnnnnnnnnnnnnnnnnnnnnnnnnnnnnnnnnnnnnnnnnnnnnnnnnnnnnnnnnnnnnnnnnnnnnnnnnnnnnnnnnnnnnnnnnnnnnnnnnnnnnnnnnnnnnnnnnnnnnnnnnnnnnnnnnnnnnnnnnnnnnnnnnnnnnnnnnnnnnnnnnnnnnnnnnnnnnnnnnnnnnnnnnnnnnnnnnnnnnnnnnnnnnnnnnnnnnnnnnnnnnnnnnnnnnnnnnnnnnnnnnnnnnnnnnnnnnnnnnnnnnnnnnnnnnnnnnnnnnnnnnnnnnnnnnnnnnnnnnnnnnnnnnnnnnnnnnnnnnnnnnnnnnnnnnnnnnnnnnnnnnnnnnnnnnnnnnnnnnnnnnnnnnnnnnnnnnnnnnnnnnnnnnnnnnnnnnnnnnnnnnnnnnnnnnnnnnnnnnnnnnnnnnnnnnnnnnnnnnnnnnnnnnnnnnnnnnnnnnnnnnnnnnnnnnnnnnnnnnnnnnnnnnnnnnnnnnnnnnnnnnnnnnnnnnnnnnnnnnnnnnnnnnnnnnnnnnnnnnnnnnnnnnnnnnnnnnnnnnnnnnnnnnnnnnnnnnnnnnnnnnnnnnnnnnnnnnnnnnnnnnnnnnnnnnnnnnnnnnnnnnnnnnnnnnnnnnnnnnnnnnnnnnnnnnnnnnnnnnnnnnnnnnnnnnnnnnnnnnnnnnnnnnnnnnnnnnnnnnnnnnnnnnnnnnnnnnnnnnnnnnnnnnnnnnnnnnnnnnnnnnnnnnnnnnnnnnnnnnnnnnnnnnnnnnnnnnnnnnnnnnnnnnnnnnnnnnnnnnnnnnnnnnnnnnnnnnnnnnnnnnnnnnnnnnnnnnnnnnnnnnnnnnnnnnnnnnnnnnnnnnnnnnnnnnnnnnnnnnnnnnnnnnnnnnnnnnnnnnnnnnnnnnnnnnnnnnnnnnnnnnnnnnnnnnnnnnnnnnnnnnnnnnnnnnnnnnnnnnnnnnnnnnnnnnnnnnnnnnnnnnnnnnnnnnnnnnnnnnnnnnnnnnnnnnnnnnnnnnnnnnnnnnnnnnnnnnnnnnnnnnnnnnnnnnnnnnnnnnnnnnnnnnnnnnnnnnnnnnnnnnnnnnnnnnnnnnnnnnnnnnnnnnnnncagcctgttccagaggcaaaaggaggtcggcttatccaggttgaaggtggctggattgcggtgggagacaaggagcctgcaatagatgagacatacattctcacataatctgagaagctgaacctgagagatatagtccgagttgtctctgcagnnnnnnnnnnnnnnnnnnnnnnnnnnnnnnnnnnnnnnnnnnnnnnnnnnnnnnnnnnnnnnnnnnnnnnnnnnnnnnnnnnnnnnnnnnnnnnnnnnnnnnnnnnnnnnnnnnnnnnnnnnnnnnnnnnnnnnnnnnnnnnnnnnnnnnnnnnnnnnnnnnnnnnnnnnnnnnnnnggtgttcttattgatgctatgagaaaaggctattggattattttagatgaattaaatttggcccctactgatgtgttagaggcactgaatagactgttggatgacaaccgtgaattgctcgtaacagaaacacaggaagttgttaaagcacaccctcggtttatgctttttgccacccaaaatcccccaggactttatggaggcagaaaggtnnnnnnnnnnnnnnnnnnnnnnnnnnnnnnnnnnnnnnnnnnnnnnnnnnnnnnnnnnnnnnnnnnnnnnnnnnnnnnnnnnnnnnnnnnnnnnnnnnnnnnnnnnnnnnnnnnnnnnnnnnnnnnnnnnnnnnnnnnnnnnnnnnnnnnnnnnnnnnnnnnnnnnnnnnnnnnnnnnnnnnnnnnnnnnnnnnnnnnnnnnnnnnnnnnnnnnnnnnnnnnnnnnnnnnnnnnnnnnnnnnnnnnnnnnnnnnnnnnnnnnnnnnnnnnnnnnnnnnnnnnnnnnnnnnnnnnnnnnnnnnnnnnnnnnnnnnnnnnnnnnnnnnnnnnnnnnnnnnnnnnnnnnnnnnnnnnnnnnnnnnnnnnnnnnnnnnnnnnnnnnnnnnnnnnnnnnnnnnnnnnnnnnnnnnnnnnnnnnnnnnnnnnnnnnnnnnnnnnnnnnnnnnnnnnnnnnnnnnnnnnnnnnnnnnnnnnnnnnnnnnnnnnnnnnnnnnnnnnnnnnnnnnnnnnnnnnnnnnnnnnnnnnnnnnnnnnnnnnnnnnnnnnnnnnnnnnnnnnnnnnnnnnnnnnnnnnnnnnnnnnnnnnnnnnnnnnnnnnnnnnnnnnnnnnnnnnnnnnnnnnnnnnnnnnnnnnnnnnnnnnnnnnnnnnnnnnnnnnnnnnnnnnnnnnnnnnnnnnnnnnnnnnnnnnnnnnnnnnnnnnnnnnnnnnnnnnnnnnnnnnnnnnnnnnnnnnnnnnnnnnnnnnnnnnnnnnnnnnnnnnnnnnnnnnnnnnnnnnnnnnnnnnnnnnnnnnnnnnnnnnnnnnnnnnnnnnnnnnnnnnnnnnnnnnnnnnnnnnnnnnnnnnnnnnnnnnnnnnnnnnnnnnnnnnnnnnnnnnnnnnnnnnnnnnnnnnnnnnnnnnnnnnnnnnnnnnnnnnnnnnnnnnnnnnnnnnnnnnnnnnnnnnnnnnnnnnnnnnnnnnnnnnnnnnnnnnnnnnnnnnnnnnnnnnnnnnnnnnnnnnnnnnnnnnnnnnnnnnnnnnnnnnnnnnnnnnnnnnnnnnnnnnnnnnnnnnnnnnnnnnnnnnnnnnnnnnnnnnnnnnnnnnnnnnnnnnnnnnnnnnnnnnnnnnnnnnnnnnnnnnnnnnnnnnnnnnnnnnnnnnnnnnnnnnnnnnnnnnnnnnnnnnnnnnnnnnnnnnnnnnnnnnnnnnnnnnnnnnnnnnnnnnnnnnnnnnnnnnnnnnnnnnnnnnnnnnnnnnnnnnnnnnnnnnnnnnnnnnnnnnnnnnnnnnnnnnnnnnnnnnnnnnnnnnnnnnnnnnnnnnnnnnnnnnnnnnnnnnnnnnnnnnnnnnnnnnnnnnnnnnnnnnnnnnnnnnnnnnnnnnnnnnnnnnnnnnnnnnnnnnnnnnnnnnnnnnnnnnnnnnnnnnnnnnnnnnnnnnnnnnnnnnnnnnnnnnnnnnnnnnnnnnnnnnnnnnnnnnnnnnnnnnnnnnnnnnnnnnnnnnnnnnnnnnnnnnnnnnnnnnnnnnnnnnnnnnnnnnnnnngacctgtcctacacaggaataatattgcagactatgcactcagtgcagggaccactggtatgaatgcacagaggctcttaagagctaccaaactgaagaaacccattctcctggagggttcccctggtgttggcaagacaagtttggtgggnnnnnnnnnnnnnnnnnnnnnnnnnnnnnnnnnnnnnnnnnnnnnnnnnnnnnnnnnnggacatcacagacctgtttggagcagatctccctgttgaaggtggcaagggaggagagtttgcctggcgtgatggccccttactggcagctttgaaggcaggccattgggtggtgttggatgannnnnnnnnnnnnnnnnnnnnnnnnnnnnnnnnnnnnnnnnnnnnnnnnnnnnnnnnnnnnnnnnnnnnnnnnnnnngttaggaatgagctttcaagtgcagcatgaaaagacgaagatttttgggtgtcagaatccctttagacaaggaggtgggagaaaaggcttgcncaggtctttccttaacagattcactcaggnnnnnnnnnnnnnnnnnnnnnnnnnnnnnnnnnnnnnnnnnnnnnnnnnnnnnnnnnnnnnnnnnnnnnnnnnnnnnnnnnnnnnnnnnnnnnnnnnnnnnnnnnnnnnnnnnnnnnnnnnnnnnnnnnnnnnnnnnnnnnnnnnnnnnnnnnnnnnnnnnnnnnnnnnnnnnnnnnnnnnnnnnnnnnnnnnnnnnnnnnnnnnnnnnnnnnnnnnnnnnnnnnnnnnnnnnnnnnnnnnnnnnnnnnnnnnnnnnnnnnnnnnnnnnnnnnnnnnnnnnnnnnnnnnnnnnnnnnnnnnnnnnnnnnnnnnnnnnnnnnnnnnnnnnnnnnnnnnnnnnnnnnnnnnnnnnnnnnnnnnnnnnnnnnnnnnnnnnnnnnnnnnnnnnnnnnnnnnnnnnnnnnnnnnnnnnnnnnnnnnnnnnnnnnnnnnnnnnnnnnnnnnnnnnnnnnnnnnnnnnnnnnnnnnnnnnnnnnnnnnnnnnnnnnnnnnnnnnnnnnnnnnnnnnnnnnnnnnnnnnnnnnnnnnnnnnnnnnnnnnnnnnnnnnnnnnnnnnnnnnnnnnnnnnnnnnnnnnnnnnnnnnnnnnnnnnnnnnnnnnnnnnnnnnnnnnnnnnnnnnnnnnnnnnnnnnnnnnnnnnnnnnnnnnnnnnnnnnnnnnnnnnnnnnnnnnnnnnnnnnnnnnnnnnnnnnnnnnnnnnnnnnnnnnnnnnnnnnnnnnnnnnnnnnnnnnnnnnnnnnnnnnnnnnnnnnnnnnnnnnnnnnnnnnnnnnnnnnnnnnnnnnnnnnnnnnnnnnnnnnnnnnnnnnnnnnnnnnnnnnnnnnnnnnnnnnnnnnnnnnnnnnnnnnnnnnnnnnnnnnnnnnnnnnnnnnnnnnnnnnnnnnnnnnnnnnnnnnnnnnnnnnnnnnnnnnnnnnnnnnnnnnnnnnnnnnnnnnnnnnnnnnnnnnnnnnnnnnnnnnnnnnnnnnnnnnnnnnnnnnnnnnnnnnnnnnnnnnnnnnnnnnnnnnnnnnnnnnnnnnnnnnnnnnnnnnnnnnnnnnnnnnnnnnnnnnnnnnnnnnnnnnnnnnnnnnnnnnnnnnnnnnnnnnnnnnnnnnnnnnnnnnnnnnnnnnnnnnnnnnnnnnnnnnnnnnnnnnnnnnnnnnnnnnnnnnnnnnnnnnnnnnnnnnnnnnnnnnnnnnnnnnnnnnnnnnnnnnnnnnnnnnnnnnnnnnnnnnnnnnnnnnnnnnnnnnnnnnnnnnnnnnnnnnnnnnnnnnnnnnnnnnnnnnnnnnnnnnnnnnnnnnnnnnnnnnnnnnnnnnnnnnnnnnnnnnnnnnnnnnnnnnnnnnnnnnnnnnnnnnnnnnnnnnnnnnnnnnnnnnnnnnnnnnnnnnnnnnnnnnnnnnnnnnnnnnnaggttctccaacatcttctgtatcaactctaatccggacagccatactaattgtccagtacctgcagcgagggctgagtttagacagagccttttctgaagcatgctgggaagtatatgtctgttcccagcattcaccagcaaaccggaagnnnnnnnnnnnnnnnnnnnnnnnnnnnnnnnnnnnnnnnnnnnnnnnnnnnnnnnnnnnnnnnnnnnnnnnnnnnnnnnnnnnnnnnnnnnnnnnnnnnnnnnnnnnnnnnnnnnnnnnnnnnnnnnnnnnnnnnnnnnnnnnnnnnnnnnnnnnnnnnnnnnnnnnnnnnnnnnnnnnnnnnnnnnnnnnnnnnnnnnnnnnnnnnnnnaggagtcagcctcttaccttgcaagacttagagaaaattatgcagtcctccagccctgagaacctgaaattcaatgcagtcgaagtgaatacttactggatcgatgaaccagatgttttggccatggctgttaaattgctcatagaaagagcaaccaaccaggattggatgctcagagttaaatggctttatcatttagccaagaatataccgcaggggcttnnnnnnnnnnnnnnnnnnnnnnnnnnnnnnnnnnnnnnnnnnnnnnnnnnnnnnnnnnnnnnnnnnnnnnnnnnnnnnnnnnnnnnnnnnnnnnnnnnnnnnnnnnnnnnnnnnnnnnnnnnnnnnnnnnnnnnnnnnnnnnnnnnnnnnnnnnnnnnnnnnnnnnnnnnnnnnnnnnnnnnnnnnnnnnnnnnnnnnnnnnnnnnnnnnnnnnnnnnnnnnnnnnnnnnnnnnnnnnnnnnnnnnnnnnnnnnnnnnnnnnnnnnnnnnnnnnnnnnnnnnnnnnnnnnnnnnnnnnnnnnnnnnnnnnnnnnnnnnnnnnnnnnnnnnnnnnnnnnnnnnnnnnnnnnnnnnnnnnnnnnnnnnnnnnnnnnnnnnnnnnnnnnnnnnnnnnnnnnnnnnnnnnnnnnnnnnnnnnnnnnnnnnnnnnnnnnnnnnnnnnnnnnnnnnnnnnnnnnnnnnnnnnnnnnnnnnnnnnnnnnnnnnnnnnnnnnnnnnnnnnnnnnnnnnnnnnnnnnnnnnnnnnnnnnnnnnnnnnnnnnnnnnnnnnnnnnnnnnnnnnnnnnnnnnnnnnnnnnnnnnnnnnnnnnnnnnnnnnnnnnnnnnnnnnnnnnnnnnnnnnnnnnnnnnnnnnnnnnnnnnnnnnnnnnnnnnnnnnnnnnnnnnnnnnnnnnnnnnnnnnnnnnnnnnnnnnnnnnnnnnnnnnnnnnnnnnnnnnnnnnnnnnnnnnnnnnnnnnnnnnnnnnnnnnnnnnnnnnnnnnnnnnnnnnnnnnnnnnnnnnnnnnnnnnnnnnnnnnnnnnnnnnnnnnnnnnnnnnnnnnnnnnnnnnnnnnnnnnnnnnnnnnnnnnnnnnnnnnnnnnnnnnnnnnnnnnnnnnnnnnnnnnnnnnnnnnnnnnnnnnnnnnnnnnnnnnnnnnnnnnnnnnnnnnnnnnnnnnnnnnnnnnnnnnnnnnnnnnnnnnnnnnnnnnnnnnnnnnnnnnnnnnnnnnnnnnnnnnnnnnnnnnnnnnnnnnnnnnnnnnnnnnnnnnnnnnnnnnnnnnnnnnnnnnnnnnnnnnnnnnnnnnnnnnnnnnnnnnnnnnnnnnnnnnnnnnnnnnnnnnnnnnnnnnnnnnnnnnnnnnnnnnnnnnnnnnnnnnnnnnnnnnnnnnnnnnnnnnnnnnnnnnnnnnnnnnnnnnnnnnnnnnnnnnnnnnnnnnnnnnnnnnnnnnnnnnnnnnnnnnnnnnnnnnnnnnnnnnnnnnnnnnnnnnnnnnnnnnnnnnnnnnnnnnnnnnnnnnnnnnnnnnnnnnnnnnnnnnnnnnnnnnnnnnnnnnnnnnnnnnnnnnnnnnnnnnnnnnnnnnnnnnnnnnnnnnnnnnnnnnnnnnnnnnnnnnnnnnnnnnnnnnnnnnnnnnnnnnnnnnnnnnnnnnnnnnnnnnnnnnnnnnnnnnnnnnnnnnnnnnnnnnnnnnnnnnnnnnnnnnnnnnnnnnnnnnnnnnnnnnnnnnnnnnnnnnnnnnnnnnnnnnnnnnnnnnngggccctggcaatctcaatagacccatattctctaagtgctgctttgaagtcttaaccagcagctggagagcaagtccctgggatgtgagtggcctccccatcctgtcctcctctcatgtgaccctaggagagtgggttgagagaacccagcagctccaggacatcagttcgatgctttggactaacatggctatctcttcagtagnnnnnnnnnnnnnnnnnnnnnnnnnnnnnnnnnnnnnnnnnnnnnnnnnnnnnnnnnnnnnnnnnnnnnnnnnnnnnnnnnnnnnnnnnnnnnnnnnnnnnnnnnnnnnnnnnnnnnnnnnnnnnnnnnnnnnnnnnnnnnnnnnnnnnnnnnnnnnnnnnnnnnnnnnnnnnnnnnnnnnnnnnnnnnnnnnnnnnnnnnnnnnnnnnnnnnnnnnnnnnnnnnnnnnnnnnnnnnnnnnnnnnnnnnnnnnnnnnnnnnnnnnnnnnnnnnnnnnnnnnnnnnnnnnnnnnnnnnnnnnnnnnnnnnnnnnnnnnnnnnnnnnnnnnnnnnnnnnnnnnnnnnnnnnnnnnnnnnnnnnnnnnnnnnnnnnnnnnnnnnnnnnnnnnnnnnnnnagttacaccaactgcagtgtgaatggaagccccggatcctgtcatcccagctgcagactggaagagacctggaagatgatgtcgttgtcagctactctcatcctcacgtcagnnnnnnnnnnnnnnnnnnnnnnnnnnnnnnnnnnnnnnnnnnnnnnnnnnnnnnnnnnnnnnnnnnnnnnnnnnnnnnnnnnnnnnnnnnnnnnnnnnnnnnnnnnnnnnnnnnnnnnnnnnnnnnnnnnnnnnnnnnnnnnnnnnnnnnnnnnnnnnnnnnnnnnnnnnnnnnnnnnnnnnnnnnnnnnnnnnnnnnnnnnnnnnnnnnnnnnnnnnnnnnnnnnnnnnnnnnnnnnnnnnnnnnnnnnnnnnnnnnnnnnnnnnnnnnnnnnnnnnnnnnnnnnnnnnnnnnnnnnnnnnnnnnnnnnnnnnnnnnnnnnnnnnnnnnnnnnnnnnnnnnnnnnnnnnnnnnnnnnnnnnnnnnnnnnnnnnnnnnnnnnnnnnnnnnnnnnnnnnnnnnnnnnnnnnnnnnnnnnnnnnnnnnnnnnnnnnnnnnnnnnnnnnnnnnnnnnnnnnnnnnnnnnnnnnnnnnnnnnncatgcagacactttgtgctctgtgaaatctgaggaggttctacgaggccttgggaagctactcatcaagtgctcaggaggaaaggagctggaaggcaagggccagaaagcctgtcccactcgggagcagctgctgatgaatgctctcctttacctgcgctcccatgtgttatgcaagggagagttggaccagagggccctgcagctcttcagacatgtgtgtcaggnnnnnnnnnnnnnnnnnnnnnnnnnnnnnnnnnnnnnnnnnnnnnnnnnnnnnnnnnnnnnnnnnnnnnnnnnnnnnnnnnnnnnnnnnnnnnnnnnnnnnnnnnnnnnnnnnnnnnnnnnnnnnnnnnnnnnnnnnnnnnnnnnnnnnnnnnnnnnnnaggactttgcagatattttggtacagccaacgttagaggagaacaaaggaacttcagatgggcaagaagaggaagcagccacaaatccagctctcctctcacagaagtcaatgcaggcggtaatgctgatacaccagcagttatgtctcaactttgctcgatccctctggtatcaacagactctgccgccacatgaagcagagcattacctcagcctgtttctgtcttgctatcagactggggcatcgcttgtgacacacttctaccccctgatgggngagttgaactgaatgaccgactcttgggaagccaacttttggcctgcaccctctcccataacacactctttggggaggtaccttcagacctgatggtgaaacctgatgggccctatgacttctaccagcatcccaatgttccagaagcccggcagtgtcaacctgtgcttcaaggtttctcagaggctgtcagtcacttgctgcgggactggccagaacacccagcgcttgaacagnnnnnnnnnnnnnnnnnnnnnnnnnnnnnnnnnnnnnnnnnnnnnnnnnnnnnnnnnnnnnnnnnnnnnnnnnnnnnnnnnnnnnnnnnnnnnnnnnnnnnnnnnnnnnnnnnnnnnnnnnnnnnnnnnnnnnnnnnnnnnnnnnnnnnnnnnnnnnnnnnnnnnnnnnnnnnnnnnnnnnnnnnnnnnnnctgctggtccatgagtttggataatactatgaagcgccacactgagaaatcgaccaagcactggttctccatctatcaaatgcttgagaagcacatgcaggaacaaacagaagaacaggaagnnnnnnnnnnnnnnnnnnnnnnnnnnnnnnnnnnnnnnnnnnnnnnnnnnnnnnnnnnnnnnnnnnnnnnnnnnnnnnnnnnnnnnnnnnnnnnnnnnnnnnnnnnnnnnnnnnnnnnnnnnnnnnnnnnnnnnnnnnnnnnnnnnnnntcactatgcagtgttatatggaatatgtaacaatattaacaagcaattctttgaccgggtacagaccaaaattgtggaacttcgttcacccctagaaaaagaacttaaannnnnnnnnnnnnnnnnnnnnnnnnnnnnnnnnnnnnnnnnnnnnnnnnnnnnnnnnnnnnnnnnnnnnnnnnnnnnnnnnnnnnnnnnnnnnnnnnnnnnnnnnnnnnnnnnnnnnnnnnnnnnnnnnnnnnnnnnnnnnnnnnnnnnnnnnnnnnnnnnnnnnnnnnnnnnnnnnnnnnnnnnnnnnnnnnnnnnnnnnnnnnnnnnnnnnnnnnnnnnnnnnnnnnnnnnnnnnnnnnnnnnnnnnnnnnnnnnnnnnnnnnnnnnnnnnnnnnnnnnnnnnnnnnnnnnnnnnnnnnnnnnnnnnnnnnnnnnnnnnnnnnnnnnnnnnnnnnnnnnnnnnnnnnnnnnnnnnnnnnnnnnnnnnnnnnnnnnnnnnnnnnnnnnnnnnnnnnnnnnnnnnnnnnnnnnnnnnnnnnnnnnnnnnnnnnnnnnnnnnnnnnnnnnnnnnnnnnnnnnnnnnnnnnnnnnnnnnnnnnnnnnnnnnnnnnnnnnnnnnnnnnnnnnnnnnnnnnnnnnnnnnnnnnnnnnnnnnnnnnnnnnnnnnnnnnnnnnnnnnnnnnnnnnnnnnnnnnnnnnnnnnnnnnnnnnnnnnnnnnnnnnnnnnnnnnnnnnnnnnnnnnnnnnnnnnnnnnnnnnnnnnnnnnnnnnnnnnnnnnnnnnnnnnnnnnnnnnnnnnnnnnnnnnnnnnnnnnnnnnnnnnnnnnnnnnnnnnnnnnnnnnnnnnnnnnnnnnnnnnnnnnnnnnnnnnnnnnnnnnnnnnnnnnnnnnnnnnnnnnnnnnnnnnnnnnnnnnnnnnnnnnnnnnnnnnnnnnnnnnnnnnnnnnnnnnnnnnnnnnnnnnnnnnnnnnnnnnnnnnnnnnnnnnnnnnnnnnnnnnnnnnnnnnnnnnnnnnnnnnnnnnnnnnnnnnnnnnnnnnnnnnnnnaggaacctcctcagctgtgtgcaagagattcacagcaggctgatggggcccctggcctaccccgtggccttccctcctcaggatggcgtgcagcagtggaccgagcgcctgcagcacctggccatgcagtgccagatcctgctcgagcagctctcctggctcctccagtgctgccccagtgtagggccagctccaggccatggcaatgcccaggcactggggcagcctcctgccccctgcctggaaggaccagaacttagcaagggacaactttgtggagtattaccagacctaattccctccaatctgagctacccatctccagtacctggaagtcagctgccctctggttgccggatgcggaaacaggatcagctttggcaacagtcaactacgagagtaacagagatgctaaaaaccattaaaacagtgaaagctgacgtcgacaaaattaggcagcagtcttgtgagactctctttcattcttggnnnnnnnnnnnnnnnnnnnnnnnnnnnnnnnnnnnnnnnnnnnnnnnnnnnnnnnnnnnnnnnnnnnnnnnnnnnnnnnnnnnnnnnnnnnnnnnnnnnnnnnnnnnnnnnnnnnnnnnnnnnnnnnnnnnnnnnnnnnnnnnnnnnnnnnnnnnnnnnnnnnnnnnnnnnnnnnnnnnnnnnnnnnnnnnnnnnnnnnnnnnnnnnnnnnnnnnnnnnnnnnnaggaaatcaaatgttggatgaaggatttgtggaagatttttcagagaaaatggaaattgctatccgagccatcctctgtgccatccagaacttagaagaaagcaagaatgaaaaagcagagaacacagaggacaacactgaccaagcgagcccacaagaagnnnnnnnnnnnnnnnnnnnnnnnnnnnnnnnnnnnnnnnnnnnnnnnnnnnnnnnnnnnnnnnnnnnnnnnnnnnnnnnnnnnnnnnnnnnnnnnnnnnnnnnnnnnnnnnnnnnnnnnnnnnnnnnnnnnnnnnnnnnnnnnnnnnnnnnnnnnnnnnnnnnnnnnnnnnnnnnnnnnnnnnnnnnnnnnnnnnnnnnnnnnnnnnnnnnnnnnnnnnnnnnnnnnnnnnnnnnnnnnnnnnnnnnnnnnnnnnnnnnnnnnnnnnnnnnnnnnnnnnnnnnnnnnnnnnnnnnnnnnnnnnnnnnnnnnnnnnnnnnnnnnnnnnnnnnnnnnnnnnnnnnnnnnnnnnnnnnnnnnnnnnnnnnnnnnnnnnnnnnnnnnnnnnnnnnnnnnnnnnnnnnnnnnnnnnnnnnnnnnnnnnnnnnnnnnnnnnnnnnnnnnnnnnnnnnnnnnnnnnnnnnnnnnnnnnnnnnnnnnnnnnnnnnnnnnnnnnnnnnnnnnnnnnnnnnnnnnnnnnnnnnnnnnnnnnnnnnnnnnnnnnnnnnnnnnnnnnnnnnnnnnnnnnnnnnnnnnnnnnnnnnnnnnnnnnnnnnnnnnnnnnnnnnnnnnnnnnnnnnnnnnnnnnnnnnnnnnnnnnnnnnnnnnnnnnnnnnnnnnnnnnnnnnnnnnnnnnnnnnnnnnnnnnnnnnnnnnnnnnnnnnnnnnnnnnnnnnnnnnnnnnnnnnnnnnnnnnnnnnnnnnnnnnnnnnnnnnnnnnnnnnnnnnnnnnnnnnnnnnnnnnnnnnnnnnnnnnnnnnnnnnnnnnnnnnnnnnnnnnnnnnnnnnnnnnnnnnnnnnnnnnnnnnnnnnnnnnnnnnnnnnnnnnnnnnnnnnnnnnnnnnnnnnnnnnnnnnnnnnnnnnnnnnnnnnnnnnnnnnnnnnnnnnnnnnnnnnnnnnnnnnnnnnnnnnnnnnnnnnnnnnnnnnnnnnnnnnnnnnnnnnnnnnnnnnnnnnnnnnnnnnnnnnnnnnnnnnnnnnnnnnnnnnnnnnnnnnnnnnnnnnnnnnnnnnnnnnnnnnnnnnnnnnnnnnnnnnnnnnnnnnnnnnnnnnnnnnnnnnnnnnnnnnnnnnnnnnnnnnnnnnnnnnnnnnnnnnnnnnnnnnnnnnnnnnnnnnnnnnnnnnnnnnnnnnnnnnnnnnnnnnnnnnnnnnnnnnnnnnnnnnnnnnnnnnnnnnnnnnnnnnnnnnnnnnnnnnnnnnnnnnnnnnnnnnnnnnnnnnnnnnnnnnnnnnnnnnnnnnnnnnnnnnnnnnnnnnnnnnnnnnnnnnnnnnnnnnnnnnnnnnnnnnnnnnnnnnnnnnnnnnnnnnnnnnnnnnnnnnnnnnnnnnnnnnnnnnnnnnnnnnnnnnnnnnnnnnnnnnnnnnnnnnnnnnnnnnnnnnnnnnnnnnnnnnnnnnnnnnnnnnnnnnnnnnnnnnnnnnnnnnnnnnnnnnnnnnnnnnnnnnnnnnnnnnnnnnnnnnnnnnnnnnnnnnnnnnnnnnnnnnnnnnnnnnnnnnnnnnnnnnnnnnnnnnnnnnnnnnnnnnnnnnnnnnnnnnnnnnnnnnnnnnnnnnnnnnnnnnnnnnnnnnnnnnnnnnnnnnnnnnnnnnnnnnnnnnnnnnnnnnnnnnnnnnnnnncacagagttttaagaggaaacctgggcaggctgacaatgaacgttccatgggtgatcacaatgagcgtgtgcacaagaggctgaggactgtggatacggacagccacgccgagcaggggccagctcagcagccccaggcccaggtggaggatgcagatgcatttgagcacattaaacaaggcagcgacgcatacgatgcacagacctatnnnnnnnnnnnnnnnnnnnnnnnnnnnnnnnnnnnnnnnnnnnnnnnnnnnnnnnnnnnnnnnnnnnnnnnnnnnnnnnnnnnnnnnnnnnnnnnnnnnnnnnnnnnnnnnnnnnnnnnnnnnnnnnnnnnnnnnnnnnnnnnnnnnnnnnnnnnnnnnnnnnnnnnnnnnnnnnnnnnnnnnnnnnnnnnnnnnnnnnnnnnnnnnnnnnnnnnnnnnnnnnnnnnnnnnnnnnnnnnnnnnnnnnnnnnnnnnnnnnnnnnnnnnnnnnnnnnnnnnnnnnnnnnnnnnnnnnnnnnnnnnnnnnnnnnnnnnnnnnnnnnnnnnnnnnnnnnnnnnnnnnnnnnnnnnnnnnnnnnnnnnnnnnnnnnnnnnnnnnnnnnnnnnnnnnnnnnnnnnnnnnnnnnnnnnnnnnnnnnnnnnaggagaaggttgccgctgagatgtggcagagttacctgatcctaacagcacctctttcacaacggttatgtgaagagcttcgtctcatattagagcctacccaggcagccaagctga

SEQ ID NO: 27834 - DNA, 501 bp, Macaca Mulatta
  misc_feature (1)...(501): n = A,T,C or G
ctatacttttttatgagaccatgtctcatctgccacccaagctggagggcaatgggatgatcatggcagctttgacctactaggctcaagtgatcctccttcctcagcctcttaagtagctaggactgcaggtgtgcaccaatatgcctggctagttttttaaggtttcttgtagagatggggttttgctatgttgcccaagctggtcttgaactgctggcctcaggcagtcctnnnnnnnnnnnnnnnnnnnnnntnnnnnnnnnnnnnnnnnnntctcatgcccagccaaaactatactttttgaatactaatggacttgatatacatagtatagaggcttaaaaaatattaaccaaattatgggttagccatgatcaatatcaagatccatacaaagccatatatctggcgtagcctatcattatctaacaatcacctagtatctgcttaactattttcttcatagtaaggatatctttcagtgtatggggagggata

SEQ ID NO: 27835 - DNA, 266 bp, Macaca Mulatta
atggctgcgtccatggtgcggcgcttgtggcctttgctgactcgtcgggggctccggccccatagaggctggatctccaacggcagtccaaggagaagtttcgctacagagaaacgaaaccggaacctcctgtacgagtatgcgcgcgagggctacagtgcactccctcagctggacatagagtggttctgcgcatgtccagaagaagccgcacgcgccctggagctccgcaagggggagctgcgctcggcggacctgcccgcgat

SEQ ID NO: 27836 - DNA, 704 bp, Macaca Mulatta
gcagttctgaccaatcaggatcagatcatcgttataaattctggtagaagccactgttcattcagtgctttctttcagagcataactttctcaactatggctcggacgaagcagacagcccgcaagtccaccggcggcaaggcaccgcggaagcagctggccaccaaggcagcgcgcaaaagcgctccagcgactggcggtgtgaagaagccccaccgctaccggccaggcactgtggccttgcgcgagatccgccgttatcagaagtcgactgagctgctcatccgcaaactgccatttcagcgcctggtgcgagaaatcgcgcaggatttcaaaactgaccttcgtttccagagcttagcggtgatggcgctgcaagaaacgtgcgaggcctatctggtggggctctttgaggacaccaatctctgtgccattcacgccaagcgcgtcactattatgcctaaggacatccagcttgcgcgtcgtattcgtggtgagcgagcataatcccctgctctagcttgggtttcctacttgtttccaaaggctcttttcagagccacttactttctcacggaggatagctgtcacaccattggtagacttaaatcaactttaaaacaggggtaaattgggggaaactcgtcaaggcttgttcattctgattccttttagggtcctttgtcttctaagatggtcctttt

SEQ ID NO: 27837 - DNA, 437 bp, Macaca Mulatta
tcacaccaagaaggcagaatgtgacacactaggggaaaggtacagtgtgcataattgagaaaagaggaggtatattcacactgaaggtagaagagggcatgtgcctggcagctgggaaggggaaagtgtgggtacacttggggtggggtggggcttggtgttaatcacgcatccaagaagctaggcaggcccagcagtggctgacacacagaatcctaaatccttgccccgctctctattgtggtctcagcacttgtgctaaacccacaatggatatgtttgaaaggagaacattagcactgaaaattctttcttaaggcatttagtggtgttcttggcaatgcctcactcctgccctaccactcgttcctctcctatgatggattctctcagtgagtcatgcatattaaaaaaaccaagtaagatacaaggtccta

SEQ ID NO: 27838 - DNA, 791 bp, Macaca Mulatta
  misc_feature (1)...(791): n = A,T,C or G
aaccaatcattgtacattgattattaccaatgacttcccattatagtttttggatctttagcataagcacatgtttgcaaaagtaaacagtgaaataattagtgttggcaaatatgggaacaacaaagtcaccccaaaatctgataatcatgtctaaccaagtaataatgttttagcaataaaattacaggattattctgttatctaaaaatgtataaaataggaatatgaaaaaaatgacaacagcaagatgttttattttaatattaaacaattccaccacacttctgaagaataaacctaagtttttgtgattgttaaaacaatgtatcaattttcagggaaatctttttgtttatctaccagacatgttctaactttgtattgcccaaagtatattaaatacagatgtgtaatataaagcatcaatatcacctaaaacatcctatataagatataacctgatagatggtcgattacattgctatactgcttagttttaactggtttatttttattgtagcagannnnnnnnnnnnnnnntatgagtttgataatcacacacatgaaagtaccattttgtaactcaacaaaagataaaacatacttcatcaaaaggcttctcgcttggtgtcaggttgtcacatgtgaccactctgcaatgcgaagccatacttcttcagtgcacaaagtcatgtttaaacttggaaaagaggatgctacaatagtttcaaagttcagtgttgggacccaggaaagtttccgtaagtcttgcttgataaccaatgtga

SEQ ID NO: 27839 - DNA, 300 bp, Macaca Mulatta
ttgcatccagggtatggtgtaaataaacccgtgttgtcatggcaacagagactggcgttacctgccccaagcaaaggacacccctgcagatgagctaggagcaccagggttgaaggtgctccttacctgggagggtcattgttgctgtttgaccactgccctggacgtcaggaaccagccactccacattcagaccatcatccccaggcagctggagaagagggatcaggctgcctcccgtgtagtacattggtttccgtgtggcattcactgtggggccccaaattgccaaagtgaagt

SEQ ID NO: 27840 - DNA, 971 bp, Macaca Mulatta
ggggaaggaagcgttggctcttctcgggtctgccttccccggttcaggccccggccctgggcttttgtgtgcgcgtagctgcagccgccgctgcctcctcgcggggctgcccgaccccagatgccgtcaggcggcacaggcaccaagatgtccaaccgagtggtctgccgggaagccagtcacgccgggagctggtacacagcctcaggaccgcagctgaatgcacagctagaaggttggctttctcaagtacagtctacaaaaagacctgctagagccattattgcaccccatgcaggatatacgtactgtgggtcttgtgccgcccatgcttataaacaagtggatccgtctattacccggagaattttcatccttgggccttctcatcatgtgcccctctctcgatgtgcactttccagtgtggatatatataggacaccactgtatgaccttcgtattgaccaaaagatttacggagaactatggaagacaggaatgtttgaacgcatgtctctgcagacagatgaagatgaacacagtattgaaatgcatttgccttatacagctaaagccatggaaagggtatgagtattatagaacaattagaccctgtatcttttagcaattacttgaagaaataccataatactatatgtggaagacatcccattggggtgttattaaatgctatcacagagctccagaagaatggaatgaatatgagcttttcctttttgaattatgcccagtcaagccagtgtagaaactggcaagacagttcagtgagttatgcagctggagcactcacagtccactgaagctctgaatcctcagggatgccacctgcacattctcatactctgtccggggtcccagcctagcctttaccaagatactggtcctggtttggggggattctgaacctcaaactaatagaactttctctctttttttcagtagtgtagtcc

SEQ ID NO: 27841 - DNA, 469 bp, Macaca Mulatta
ggcccttagatcgtctcatacaagggaagagagaaccactggccccacttatttcgggtcccctaggtggcccgtctcatctgtgaacttgactctgtccgtctacatgtctctttaatggggtgggggtggaagagaggtaattattgtccagtgccacccccaatgagcccaatcccaacctcaggtgagcagagcctctacttgagggactattgtcactataggaatccttatttccccagtgttgaagctgaatcggtgagtgtgtacaatgattcataataaatcctgggagtcttgggatcctacattctctttagccttttcttctctctcaccacataaaaacctgtgtatgggtcaatagctgcaagagactcccatggcccattcttaaaggaggacagatatcttgacccttttaaaattttggtccccaaaccactcaatagatccaacagttcct

SEQ ID NO: 27842 - DNA, 626 bp, Macaca Mulatta
cagataagagtctttccacttcaatcttcgaaggtggctacaaagcacatgcgcccaagtgggaatccaaggactttagacctaacaaagtctccgaaactagtaggactactaccacatctttatcccctgagctgatccgcttcacagcttcctcctcgtctgggatggtgcccaaattgccagctggcaaaatgaataaccgtgatctcaaaccccagcctgatatagtcttgcttccgttgcccactgcctatgagctagacagcaccaaactgaagagcccactaattacttcccccatgttccgtaatgtgcccacagcaaaccccacggagccgggaatcagacgggtcccgggggcctcagaggtgatccgggagtcgagcagcacaacagggatggtcgtcggcattgtggctgctgccgccctctgcatcttgatcctcctgtacgccatgtacaagtacaggaacagggacgaggggtcctatcaagtggacgagacgcggaactacatcagcaactccgcccagagcaacggcacgctcatgaaggagaagcagcagagctcgaagagcggccacaagaaacagaaaaacaaggacagggagtactacgtgtaa

SEQ ID NO: 27843 - DNA, 4733 bp, Macaca Mulatta
  misc_feature (1)...(4733): n = A,T,C or G
aggtgggagctattgtggaagtgaagaatcttgatggtgcgtatcaggaagctgttatcaataaactaacagatgcgagttggtacactgtannnnnnnnnnnnnnnnnnnnnnnnnnnnnnnnnnnnnnnnnnnnnnnnnnnnnnnnnnnnnnnnnnnnnnnnnnnnnnnnnnnnnnnnnnnnnnnnnnnnnnnnnnnnnnnnnnnnnnnnnnnnnnnnnnnnnnnnnnnnnnnnnnnnnnnnnnnnnnnnnnnnnnnnnnnnnnnnnnnnnnnnnnnnnnnnnnnnnnnnnnnnnnnnnnnnnnnnnnnnnnnnnnnnnnnnnnnnnnnnnnnnnnnnnnnnnnnnnnnnnnnnnnnnnnnnnnnnnnnnnnnnnnnnnnnnnnnnnnnnnnnnnnnnnnnnnnnnnnnnnnnnnnnnnnnnnnnnnnnnnnnnnnnnnnnnnnnnnnnnnnnnnnnnnnnnnnnnnnnnnnnnnnnnnnnnnnnnnnnnnnnnnnnnnnnnnnnnnnnnnnnnnnnnnnnnnnnnnnnnnnnnnnnnnnnnnnnnnnnnnnnnnnnnnnnnnnnnnnnnnnnnnnnnnnnnnnnnnnnnnnnnnnnnnnnnnnnnnnnnnnnnnnnnnnnnnnnnnnnnnnnnnnnnnnnnnnnnnnnnnnnnnnnnnnnnnnnnnnnnnnnnnnnnnnnnnnnnnnnnnnnnnnnnnnnnnnnnnnnnnnnnnnnnnnnnnnnnnnnnnnnnnnnnnnnnnnnnnnnnnnnnnnnnnnnnnnnnnnnnnnnnnnnnnnnnnnnnnnnnnnnnnnnnnnnnnnnnnnnnnnnnnnnnnnnnnnnnnnnnnnnnnnnnnnnnnnnnnnnnnnnnnnnnnnnnnnnnnnnnnnnnnnnnnnnattgaaagtggagctgtttggaaacaagtctaccaagatcttggaatccctgtcttaaattcagctgcaggatacaatgttaaatgtgcttataaaannnnnnnnnnnnnnnnnnnnnnnnnnnnnnnnnnnnnnnnnnnnnnnnnnnnnnnnnnnnnnnnnnnnnnnnnnnnnnnnnnnnnnnnnnnnnnnnnnnnnnnnnnnnnnnnnnnnnnnnnnnnnnnnnnnnnnnnnnnnnnnnnnnnnnnnnnnnnnnnnnnnnnnnnnnnnnnnnnnnnnnnnnnnnnnnnnnnnnnnnnnnnnnnnnnnnnnnnnnnnnnnnnnnnnnnnnnnnnnnnnnnnnnnnnnnnnnnnnnnnnnnnnnnnnnnnnnnnnnnnnnnnnnnnnnnnnnnnnnnnnnnnnnnnnnnnnnnnnnnnnnnnnnnnnnnnnnnnnnnnnnnnnnnnnnnnnnnnnnnnnnnnnnnnnnnnnnnnnnnnnnnnnnnnnnnnnnnnnnnnnnnnnnnnnnnnnnnnnnnnnnnnnnnnnnnnnnnnnnnnnnnnnnnnnnnnnnnnnnnnnnnnnnnnnnnnnnnnnnnnnnnnnnnnnnnnnnnnnnnnnnnnnnnnnnnnnnnnnnnnnnnnnnnnnnnnnnnnnnnnnnnnnnnnnnnnnnnnnnnnnnnnnnnnnnnnnnnnnnnnnnnnnnnnnnnnnnnnnnnnnnnnnnnnnnnnnnnnnnnnnnnnnnnnnnnnnnnnnnnnnnnnnnnnnnnnnnnnnnnnnnnnnnnnnnnnnnnnnnnnnnnnnnnnnnnnnnnnnnnnnnnnnnnnnnnnnnnnnnnnnnnnnnnnnnnnnnnnnnnnnnnnnnnnnnnnnnnnnnnnnnnnnnnnnnnnnnnnnnnnnnnnnnnnnnnnnnnnnnnnnnnnnnnnnnnntgtaaacttcggcgcttatccaagccaccatttcagacaaatccatctcctgaaatggtatcgaaactggatctcactgatgccaaaaactctgatactgctcatattaaatccatagaaattacttcgatccttaatggacttcaagnnnnnnnnnnnnnnnnnnnnnnnnnnnnnnnnnnnnnnnnnnnnnnnnnnnnnnnnnnnnnnnnnnnnnnnnnnnnnnnnnnnnnnnnnnnnnnnnnnnnnnnnnnnnnnnnnnnnnnnnnnnnnnnnnnnnnnnnnnnnnnnnnnnnnnnnnnnnnnnnnnnnnnnnnnnnnnnnnnnnnnnnnnnnnnnnnnnnnnnnnnnnnnnnnnnnnnnnnnnnnnnnnnnnnnnnnnnnnnnnnnnnnnnnnnnnnnnnnnnnnnnnnnnnnnnnnnnnnnnnnnnnnnnnnnnnnnnnnnnnnnnnnnnnnnnnnnnnnnnnnnnnnnnnnnnnnnnnnnnnnnnnnnnnnnnnnnnnnnnnnnnnnnnnnnnnnnnnnnnnnnnnnnnnnnnnnnnnnnnnnnnnnnnnnnnnnnnnnnnnnnnnnnnnnnnnnnnnnnnnnnnnnnnnnnnnnnnnnnnnnnnnnnnnnnnnnnnnnnnnnnnnnnnnnnnnnnnnnnnnnnnnnnnnnnnnnnnnnnnnnnnnnnnnnnnnnnnnnnnnnnnnnnnnnnnnnnnnnnnnnnnnnnnnnnnnnnnnnnnnnnnnnnnnnnnnnnnnnnnnnnnnnnnnnnnnnnnnnnnnnnnnnnnnnnnnnnnnnnnnnnnnnnnnnnnnnnnnnnnnnnnnnnnnnnnnnnnnnnnnnnnnnnnnnnnnnnnnnnnnnnnnnnnnnnnnnnnnnnnnnnnnnnnnnnnnnnnnnnnnnnnnnnnnnnnnnnnnnnnnnnnnnnnnnnnnnnnnnnnnnnnnnnnnnnnnnnnnnnnnnnnnnnnnnnnnnnnnnnnnnnnnnnnnnnnnnnnnnnnnnnnnnnnnnnnnnnnnnnnnnnnnnnnnnnnnnnnnnnnnnnnnnnnnnnnnnnnnnnnnnnnnnnnnnnnnnnnnnnnnnnnnnnnnnnnnnnnnnnnnnnnnnnnnnnnnnnnnnnnnnnnnnnnnnnnnnnnnnnnnnnnnnnnnnnnnnnnnnnnnnnnnnnnnnnnnnnnnnnnnnnnnnnnnnnnnnnnnnnnnnnnnnnnnnnnnnnnnnnnnnnnnnnnnnnnnnnnnnnnnnnnnnnnnnnnnnnnnnnnnnnnnnnnnnnnnnnnnnnnnnnnnnnnnnnnnnnnnnnnnnnnnnnnnnnnnnnnnnnnnnnnnnnnnnnnnnnnnnnnnnnnnnnnnnnnnnnnnnnnnnnnnnnnnnnnnnnnnnnnnnnnnnnnnnnnnnnnnnnnnnnnnnnnnnnnnnnnnnnnnnnnnnnnnnnnnnnnnnnnnnnnnnnnnnnnnnnnnnnnnnnnnnnnnnnnnnnnnnnnnnnnnnnnnnnnnnnnnnnnnnnnnnnnnnnnnnnnnnnnnnnnnnnnnnnnnnnnnnnnnnnnnnnnnnnnnnnnnnnnnnnnnnnnnnnnnnnnnnnnnnnnnnnnnnnnnnnnnnnnnnnnnnnnnnnnnnnnnnnnnnnnnnnnnnnnnnnnnnnnnnnnnnnnnnnnnnnnnnnnnnnnnnnnnnnnnnnnnnnnnnnnnnnnnnnnnnnnnnnnnnnnnnnnnnnnnnnnnnnnnnnnnnnnnnnnnnnnnnnnnnnnnnnnnnnnnnnnnnnnnnnnnnnnnnnnnnnnnnnnnnnnnnnnnnnnnnnnnnnnnnnnnnnnnnnnnnnnnnnnnnnnnnnnnnnnnnnnnnnnnnnnnnnnnnnnnnnnnnnnnnnnnnnnnnnnnnnnnnnnnnnnnnnnnnnnnnnnnnnnnnnnnnnnnnnnnnnnnnnnnnnnnnnnnnnnnnnnnnnnnnnnnnnnnnnnnnnnnnnnnnnnnnnnnnnnnnnnnnnnnnnnnnnnnnnnnnnnnnnnnnnnnnnnnnnnnnnnnnnnnnnnnnnnnnnnnnnnnnnnnnnnnnnnnnnnnnnnnnnnnnnnnnnnnnnnnnnnnnnnnnnnnnnnnnnnnnnnnnnnnnnnnnnnnnnnnnnnnnnnnnnnnnnnnnnnnnnnnnnnnnnnnnnnnnnnnnnnnnnnnnnnnnnnnnnnnnnnnnnnnnnnnnnnnnnnnnnnnnnnnnnnnnnnnnnnnaaggccttccactgtggccatggaggcttttcactgcctgtagagacaatacagtaagcatagttaaggggtgggtccgaacatgttaagataacttactgtatatgtattcccttgtattttgttaaagctggaacatttgatatttttccatttatttatgaaaaaatatgaacctattttcatttgtacaaggtaattgttttttaaagcaagtcaccttagggtggctttaattgtataagtcaagcacatgtaataaattcaaaacctgcagttaacaggatatcagacatcaatcctggtaaccaaatattaaagattctctttaaaataaaaagactgaacatgtttacaggtttgaattaggctaaaaggtcttgcagtggcttttcatgccccttcaaattggaatggaactactgtactttgccatttttctataaatcagtatttttttttaattttgatataatacattgtgtgaaaaaagaaaatggctaataaactgtattaaatcttaaacaatgtataaagattgtacttagccagttcaaagtgtatatttattcataatgaattataacagttatatttttgtgttttcttgtaaatgtttcttttcccttaaatacagataattcatttgtattgcttattttattatgagctacaacaaaaggacttcaggaacaagtaatgtattagtatggttgaagattgttgatatgaactgtctc

SEQ ID NO: 27844 - DNA, 1366 bp, Macaca Mulatta
  misc_feature (1)...(1366): n = A,T,C or G
gtgagctgcattgngccgcaaaagacataggaggcattttacaaagagtgaggttgttttaattggggagggaattaggtagttattctgatttttagatatttcatatattttatttggtccaatgaagcagaaaattaaaatgaagtgattacctctgcccgatttttgacacacctcaaactataacttgaggttgctaactacaaaacactggcacttaatgatttaaagtaaagaattatgtaatttgtagacttctgagaagttccagaaaataaatcagatggtgtgtaacagcgaccgtgtgctcaaaagaagtgctgaaggaagcaaccctcctaaaccgctgaaaaaactacgctttgatattgaaggatcagatgaagcagatggaagtaaacatctcccaggggagtccaaatttcagcagaaactggcagaaatgattcttcgtcctttttccagcttccactcgaacacgaatgcaaaagcagaaaatgaatgatagcatggatacctcaaacaaggaagagaaatgaggatctcaggaccttggtggacaccgtgtacacctctggattcattgtctttgacagatgtgactgtgtaactttcccaggttctgtttatggccacatttaatatcttcagttctttttgtggatataaagtgtgcagatgcaattgtttgggtgattcctaagccacttgaaatgttagtcattgttatttatacaagattgaaaaatcttgtgtaaatcctgccatttaaaaaattgtagcagattgtttccacttccaaagtaaaattgctgtgctttatggatagtaagaatggccctagagtgggagtcctgataacccatgcctgtctgactactttgccttcttttgtagcgtacatgtgatgtttgctcttgtttttattaatttatatgtatattgttttaatttaacatgaacacccttagcaaatgtgtcctatcttccaaatgcaatttgattgactgctcattcacccaaattatcctgaacccttctgcaaaaatggatattattagaaattagaaaaaaattactaattttacacattagattttattttactattggaatctgatatactgtgtgcttgttttataaatttttgcttttaattaaataaaagctgggaagcaaagtataaacacatgatactatcatactactgacacagatttcatacctcagaaactaaaagaacttactgatttatttcttcatccaacttacgttttttaaatgaggatttattgatagtactccttggttttttataccatttcagatcacttgaatttataaagtactcatctagtaccta

SEQ ID NO: 27845 - DNA, 642 bp, Macaca Mulatta
  misc_feature (1)...(642): n = A,T,C or G
gggcatttactccttcaaagcatgaagcagtttcttcagataaagttctagggtacatgtgcacagtgtgaaggtttgttacatatgtatacttgtgccatgttggtgtgctgcacccatcaactcgtcagcacccatcaactcgtcatttacatcagatggacttggtcaggagaagagaaccactctacagctgggaatctcacactgaaagcttcccaacctcaaagtctatccagtgatgatttgctctgtacatcctcatgcacacaaggagttgtggggagctcanggagatgcatgtgggtatacacccccgacacgctgacgtctgctctgaccatcttatttgctcatactgctcagagcatactgtgccttctgttcagccgcagaatgcacaagctattctctctgtctgggatatttctcctcacaagcaaaattttccaatctccttaagtctcccttcaaaggatgtcctccaaaatcccaatacctgggggccccttaaaataaacaatcccccccccctttggcccggggccctttgtgcccccttgggtgtcccccccaatttggggaggggtttaaactggggacacccggccctctcaaaaaaaaagggccaaaagggaaagg

SEQ ID NO: 27846 - DNA, 945 bp, Macaca Mulatta
  misc_feature (1)...(945): n = A,T,C or G
naggcgggtaaacaccaagaatatgaacagaagctacttcaagaattatataaattaaatcccaattttcttcagctatctacgggttcagttgataaaaataagaacaaagtgacaccactgcagaggtacgatannnnnnnnnnnnnnnnnnnnnnnnnnnnnnnnnnnnnnnnnnnnnnnnnnnnnnncagatatctaacagtgatacgccttcaccaccacctggtttgtcaaaatccaatccagtcatccccatcagttcatccaatcacagtgcacggtccccttttgaaggggcagtaacagagtcacagtcgttattctcagacaattttcgccatcccaaccctatcccaagtgggcttcctcctttccccagctccccacagacatccagtgactggcctacagcaccagaaccacagagcctcttcacatcannagaaacaatcccagtatcatcctctacagactggcaagcagcttttggctttggttcttctaaacaaccagaggatgacttgggttttgatcccttcgatgtcactcgaaaagccttagcagacctgattgagaaggaactgtccgttcaagaccaaccttccctttcacccacatctcttcagaactcctcttcacacactacaaccgccaaaggtccaggctctggattcctgcatcctgctgcagctacaaatgccaattctctcaatagtaccttttcagtcttgccccagaggttccctcaatttcagcagcaccgagcggtttataattcattcagttttccaggccaggcagcccgctatccttggatggcctttccacgcaatagcatcatgcacttgaaccacacagcaaaccccacctcaaatagtaatttcttggacttgaatctcccgccacagcacaacacaggtctgggagggatccctgtagcag

SEQ ID NO: 27847 - DNA, 831 bp, Macaca Mulatta
ggaactcaacttttttcctgtgaacacataaatatatttttatagaaaaacaaatctacagaaaataaatctactgttctgtgagcagtatgatttgtacatgccattgaaaattattaatcagaagaaaattaagcagggtctttgctatacaaaagtgttttccactaattttgcatgcgtatttataagaaaaatgcgaatttggtggttttattctattggtataaaggcattgatattttagatgcacccacatttgtaaaaatgtagagcacaatggaattatgctggaagtctcaaataatattgtttcctattttatagtcatggaagagataagctaaagagaggaaaataatgagaaatgttggtgtgcttttctaagcatttaaaacgtaattgccaattgaaatcctaaatatgtttacatgccattaagatatgattcttgtaacaatgttaaattgattataatgggattgggtttgttatctgtggtagtatatatatatcctagtgttcctatagtgaaataagtaagggtcgagcccaaaactttccttgttttgtacccttaaattgtttcgattacatcctccaaaagaaatggaaaggtatgttaaaaagggggttccacctgaaataaccttttttctttttggccttgggaattaaaaatttcataggtaaaaaattttatttaaaaaccgggttttggttatttgtaagggtgggggtttccgaattttaggcgttaaggaactatagttatggggttttgaaaaaaattttttcctctataaccgtggaaaatttccacctttttcc

SEQ ID NO: 27848 - DNA, 290 bp, Macaca Mulatta
accacaatctgatgcctcccaacgactggaaaaccagtgctcacaaaatgtcagtagagaaaaagctgcaagcttgggaatgggctgggggcagggatgagggtgtgtcaggcctgggtcttgattctctctccttgcccaggtccccagtcctcctccctgtcctcaggggccattgctggtattgtcatcgggatcctggctgtcattgctgtggcctcagaactgggctattttctctacatcagaaatgccagacggtaatacagggatacagggtgggggatggg

SEQ ID NO: 27849 - DNA, 801 bp, Macaca Mulatta
ggggaggtgggcgccaggccctggccgtggcgaaagtaccggcggagccggagacccgctgccggagacgccgcctcgcgatccccgcgcgggcgggaccgggcggccggcgtcatgaccctgtttcacttcgggaactgcttcgctctcgcctacttcccctacttcatcacctacaagtgcagcggcctgtccgagtacaacgccttctggaaatgcgtccaggctggagtcacctacctctttgtccaactctgcaagatgctgttcttggccactttctttcccacctgggaaggcggcatctatgacttcattggggagttcatgaaggccagcgtggatgtggcagacctgataggtctaaaccttgtcatgtcccggaatgccggcaagggggagtacaagatcatggttgctgccctgggctgggccaccgctgagcttattatgtcccgctgcattcccctatgggtcggagcccggggcattgagtttgactggaagtacatccggatgagcatagactccaacatcagtctggtccattacatcgtcgcatcggctcaggtccggatgataacacgctatgatcggtaccacacctttcggccgggctgtcctcccactgaaggttcctcagaggtcaacaagggctttcctgaatggaaaacctttggttccaacactctgctttacctgggggcacacttgggaaaaccccttaacgggggccccgaaaccaaatgggttaaaacgggggacttggcctggggcccctcttaaaactaaactttgggt

SEQ ID NO: 27850 - DNA, 365 bp, Macaca Mulatta
  misc_feature (1)...(365): n = A,T,C or G
ggtgtggaagcgttctggagcatggttcttcaaaggcttccccaaacaggtccttccacagcctatgcctataaagaagaccaagccccagcagcctgtcagtgagcctgctgctcctgaacagcctgcttctgagcccaagcacccggcccgggctccagctcgaggtnaggtgacagtgaagataggaggggcccaggtcagaagacaggncaggccctgacccggcctctgctcccgggcgaggaagctatgggcctcccgtgcgcagggcctccgaggcacgaatgggctcatctacccgggattcagagagctgggaccacagcggaggtgctggagactccagccggagcccagcaggt

SEQ ID NO: 27851 - DNA, 392 bp, Macaca Mulatta
ctcttacggagactgaataaacctcctctggcccacgtgggcccacatactcaggctcagaagctgtgcatattgatttattatccacaaagagggaggtgcggaaaagaagaggagagacaggagggaactgtactctcccactggaactctggggcccactgaggcaccattactcggtgatttcagggtggctgagtactgccaactgcaccctcctctgtggtccctgaaagagccccacacgcctgctccagacgtgtccacgcacaccagccctcacagacactcacacacgtgcatggaggagatagatatgttccgtaccagactgcccccagcctgacgctttgtggggccccctccgaaagagaggggtttaagagctcaat

SEQ ID NO: 27852 - DNA, 281 bp, Macaca Mulatta
cttgtgtccctcctgggatctgcttgtcatcatttttccttcccttctacatctctctggtcccctacccctgatctgacatccccagtcacaaatactatgcccagtttctgcctctgggggagagcccagaaaaggacagaaatgaagtaggaaagggcccggttctggcctggcttcccctctggaagtgaggcattgcacagggaggcgtacataacagcagccccttgactccaaggactccgggtttgagacggacacactggtatggattaaca

SEQ ID NO: 27853 - DNA, 308 bp, Macaca Mulatta
agcccatgggcatcatgtccatcctggaggaggagtgcatgttccccaaggccaccgacatgaccttcaaggccaagctgtacgacaaccacttaggcaagtccaacaatttccagaagccacgcaacatcaaggggaagcaggaagcccatttctccctgatccattacgctggcactgtggactataacatcctgggctggctggaaaaaaacaaggatcctctcaacgagactgttgtggccctgtaccagaagtcctccctcaagctcatggccactctcttctcctcctatgcatctgccgat

SEQ ID NO: 27854 - DNA, 657 bp, Macaca Mulatta
atgaacctggggcatataaggccacatagagcccagcacagagacggccttgcagctattagaagatcagaagcttccttcatgccctgctgtaggctgagtacataacatcattgccttatacaacgctagagattcatgttttaatctgatttttcaggtgaggaaatgcttcagatgaggctccaccttgttaaacaaattggatgtatggaaaaataaactgcagaaaaggggaactcatttagctcatgagtggtcgagtgaaggttgaaaattaacctctgatcataaagcattagtgggcagagtcaatgtggggaagaaaacacgaaaaaggtagaaagaggatgcttgctgcttcctgaggcagcatcagggtgttgggttaggcagatgctgaggcaactctcatttcaccctcctcttcccctctggacacaagatacctggggctttctctcctggcatcaatgagagagtcacatttagggaaggctagggatgccaggctctggactcaggtctcctcagcacagcccaggccttgcatgctgaggctctgaaatccaggaaaaatggttgaccccatggacacttcctcaaattctctacagcggatgtgattctggatcccaaaacgagaaagcccatcct

SEQ ID NO: 27855 - DNA, 2643 bp, Macaca Mulatta
  misc_feature (1)...(2643): n = A,T,C or G
gcctggacattcgctctgaggtggcagagcttcttcgactggagaactgcagcgtggtggagggccacctgcagatcctgctcatgttcacagccaccggggaggacttccgcggcctcagcttccctcgcctcacccaggtcaccgactacctgctgctcttccgtgtctacggactggagagcctgcgcgacctcttccccaacctagcagtcatccgcgggacgcgcctcttcctgggctacgcactggtcatctttgagatgccgcatctgcgtgacgtgggactacctgcgcttggggccgtgctgcgtggggctgtgcgtgtggagaagaaccaggaactctgccacctctccaccattgactggggactgctgcagccagcacctggtgccaaccacattgtgggcaacaagctgggcgaggagtgtgctgacgtgtgccctggtgtgctgggtgctgctggcgaatcctgtgccaagaccaccttcagcgggcacactgactacagatgctggacctccagccactgccagagagnnnnnnnnnnnnnnnnnnnnnnnnnnnnnnnnnnnnnnnnnnnnnnnnnnnnnnnnnnnnnnnnnnnnnnnnnnnnnnnnnnnnnnnnnnnnnnnnnnnnnnnnnnnnnnnnnnnnnnnnnnnnnnnnnnnnnnnnnnnnnnnnnnnnnnnnnnnnnnnnnnnnnnnnnnnnnnnnnnnnnnnnnnnnnnnnnnnnnnnnnnnnnnnnnnnnnnnnnnnnnnnnnnnnnnnnnnnnnnnnnnnnnnnnnnnnnnnnnnnnnnnnnnnnnnnnnnnnnnnnnnnnnnnnnnnnnnnnnnnnnnnnnnnnnnnnnnnnnnnnnnnnnnnnnnnnnnnnnnnnnnnnnnnnnnnnnnnnnnnnnnnnnnnnnnnnnnnnnnnnnnnnnnnnnnnnnnnnnnnnnnnnnnnnnnnnnnnnnnnnnnnnnnnnnnnnnnnnnnnnnnnnnnnnnnnnnnnnnnnnnnnnnnnnnnnnnnnnnnnnnnnnnnnnnnnnnnnnnnnnnnnnnnnnnnnnnnnnnnnnnnnnnnnnnnnnnnnnnnnnnnnnnnnnnnnnnnnnnnnnnnnnnnnnnnnnnnnnnnnnnnnnnnnnnnnnnnnnnnnnnnnnnnnnnnnnnnnnnnnnnnnnnnnnnnnnnnnnnnnnnnnnnnnnnnnnnnnnnnnnnnnnnnnnnnnnnnnnnnnnnnnnnnnnnnnnnnnnnnnnnnnnnnnnnnnnnnnnnnnnnnnnnnnnnnnnnnnnnnnnnnnnnnnnnnnnnnnnnnnnnnnnnnnnnnnnnnnnnnnnnnnnnnnnnnnnnnnnnnnnnnnnnnnnnnnnnnnnnnnnnnnnnnnnnnnnnnnnnnnnnnnnnnnnnnnnnnnnnnnnnnnnnnnnnnnnnnnnnnnnnnnnnnnnnnnnnnnnnnnnnnnnnnnnnnnnnnnnnnnnnnnnnnnnnnnnnnnnnnnnnnnnnnnnnnnnnnnnnnnnnnnnnnnnnnnnnnnnnnnnnnnnnnnnnnnnnnnnnnnnnnnnnnnnnnnnnnnnnnnnnnnnnnnnnnnnnnnnnnnnnnnnnnnnnnnnnnnnnnnnnnnnnnnnnnnnnnnnnnnnnnnnnnnnnnnnnnnnnnnnnnnnnnnnnnnnnnnnnnnnnnnnnnnnnnnnnnnnnnnnnnnnnnnnnnnnnnnnnnnnnnnnnnnnnnnnnnnnnnnnnnnnnnnnnnnnnnnnnnnnnnnnnnnnnnnnnnnnnnnnnnnnnnnnnnnnnnnnnnnnnnnnnnnnnnnnnnnnnnnnnnnnnnnnnnnnnnnnnnnnnnnnnnnnnnnnnnnnnnnnnnnnnnnnnnnnnnnnnnnnnnnnnnnnnnnnnnnnnnnnnnnnnnnnnnnnnnnnnnnnnnnnnnnnnnnnnnnnnnnnnnnnnnnnnnnnnnnnnnnnnnnnnnnnnnnnnnnnnnnnnnnnnnnnnnnnnnnnnnnnnnnnnnnnnnnnnnnnnnnnnnnnnnnnnnnnnnnnnnnnnnnnnnnnnnnnnnnnnnnnnnnnnnnnnnnnnnnnnnnnnnnnnnnnnnnnnnnnnnnnnnnnnnnnnnnnnnnnnnnnnnnnnnnnnnnnnnnnnnnnnnnnnnnnnnnnnnnnnnnnnnnnnnnnnnnnnnnnnnnnnnnnnnnnnnnnnnnnnnnnnnnnnnnnnnnnnnnnnnnnnnnnnnnnnnnnnnnnnnnnnnnnnnnnnnnnnnnnnnnnnnnnnnnnnnnnnnnnnnnnnnnnnnnnnnnnnnnnnnnnnnnnnnnnnnnnnnnnnnnnnnnnnnnnnnnnnnnnnnnnnnnnnnnnnnnnnnnnnnnnnnnnnnnnnnnnnnnnnnnnnnnnnnnnnnnnnnnnnnnnnnnnnnnnnnnnnnnnnnnnnnnnnnnnnnnnnnnnnnnnnnnnnnnnnnnnnnnnnnnnnnnnnnnnnnnnnnnnnnnnnnnnnnnnnnnnnnnnaggaggccacagtgctttgtgtgtcccgtcttcgatatgcgaagtttgggggagtccacctggccctgctgccccctggaaactactctgccagggttagggcaacctcactggctggcaatggctcttggacagacagtgttgccttctacatccttggccca

SEQ ID NO: 27856 - DNA, 902 bp, Macaca Mulatta
agttgcagagggagctctctcaagtgctgacccagcgccagatctacatccagcctgataattaagccgatccaggtaccctgcctgagagccgcgagaccctccccactaaaacaggactcaccaacccgccgagaccctgccggtccggctgctgctgcgcggccatttaaaacaccactaacccccacgtgtgctcccggccggtgcgcagccgcattcccgtgtagccgcggccccgtgtaacacggcacctatcacgtgtgtgcgctttccactctgggcggaggttgggtgtggggaagacggctgattttttggcttttgcttctgaaaaaacccaggccaagggacggatgctgcctctccagcagcagccccttgtgtgcaccggcctgactgtccccagggcaggggtctgcgtgccgtccactccccatgcttcagaggagcctcggatgctggtgcagggatcctagaagccaaataagcccctgctcagcggtacattggctgtccagggctagctggcttggaaggggtgacctccgctctgatctcggagtctctggggttggagggcagagtcagggctggactccaccccggccggccccgatgctctgctggagctgcctggacgcccagtgcagactcggcctcaaccagcataaccttccgcccctaacgagctgcagctgttcctttaaacaggttctgcggatggaaaggaaaatagtcttgcttgttggtaatggccaagaaccatgacttgagcttgtgacagatccagatgtagggaaggaggcagcatccctggagagcaggagggaaacttgtctgtaaaagaaggcatttggaaccctgccagctggggctgcagagtccaggtccaggggctc

SEQ ID NO: 27857 - DNA, 1318 bp, Macaca Mulatta
  misc_feature (1)...(1318): n = A,T,C or G
acttctggtggtgtattgaccgctgtgtgaacatggatgggtggcaggccaacatgnnnnnnnnnnnnnnnnnnnnnnnnnnnnnnnnnnnnnnnnnnnnnnnnnnnnnnnnnnnnnnnnnnnnnnnnnnnnnnnnnnnnnnnnnnnnnnnnnnnnnnnnnnnnnnnnnnnnnnnnnnnnnnnnnnnnnnnnnnnnnnnnnnnnnnnnnnnnnnnnnnnnnnnnnnnnnnnnnnnnnnnnnnnnnnnnnnnnnnnnnnnnnnnnnnnnnnnnnnnnnnnnnnnnnnnnnnnnnnnnnnnnnnnnnnnnnnnnnnnnnnnnnnnnnnnnnnnnnnnnnnnnnnnnnnnnnnnnnnnnnnnnnnnnnnnnnnnnnnnnnnnnnnnnnnnnnnnnnnnnnnnnnnnnnnnnnnnnnnnnnnnnnnnnnnnnnnnnnnnnnnnnnnnnnnnnnnnnnnnnnnnnnnnnnnnnnnnnnnnnnnnnnnnnnnnnnnnnnnnnnnnnnnnnnnnnnnnnnnnnnnnnnnnnnnnnnnnnnnnnnnnnnnnnnnnnnnnnnnnnnnnnnnnnnnnnnnnnnnnnnnnnnnnnnnnnnnnnnnnnnnnnnnnnnnnnnnnnnnnnnnnnnnnnnnnnnnnnnnnnnnnnnnnnnnnnnnnnnnnnnnnnnnnnnnnnnnnnnnnnnnnnnnnnnnnnnnnnnnnnnnnnnnnnnnnnnnnnnnnnnnnnnnnnnnnnnnnnnnnnnnnnnnnnnnnnnnnnnnnnnnnnnnnnnnnnnnnnnnnnnnnnnnnnnnnnnnnnnnnnnnnnnnnnnnnnnnnnnnnnnnnnnnnnnnnnnnnnnnnnnnnnnnnnnnnnnnnnnnnnnnnnnnnnnnnnnnnnnnnnnnnnnnnnnnnnnnnnnnnnnnnnnnnnnnnnnnnnnnnnnnnnnnnnnnnnnnnnnnnnnnnnnnnnnnnnnnnnnnnnnnnnnttacagataataatggaccatattaccaaggaccagtccacatgacccacacactctaaaagaaatattttttaagataacttttattttcttcttattcctttcctcttgatttctttcctataatttcattcttgttttttcatctcattatccaagttctgcagaccacacaggaacttgcttcatggctctttagatgaaatagaagttcagggttcctcaccctagtcactaaagaaggattttactctcccatcccagaaaggtgattctttctttaccatttctggggactttagtcttaattaggtaccttattaacaggaaatgctaagaaacgttctctgggaacaa

SEQ ID NO: 27858 - DNA, 1057 bp, Macaca Mulatta
  misc_feature (1)...(1057): n = A,T,C or G
atgccggctgagctgctgctgctgctgattgttgccttcgccagccccagctgccaggtgctctcatcactgcgcatggnnnnnnnnnnnnnnnnnnnnnnnnnnnnnnnnnnnnnnnnnnnnnnnnnnnnnnnnnnnnnnnnnnnnnnnnnnnnnnnnnnnnnnnnnnnnnnnnnnnnnnnnnnnnnnnnnnnnnnnnnnnnnnnnnnnnnnnnnnnnnnnnnnnnnnnnnnnnnnnnnnnnnnnnnnnnnnnnnnnnnnnnnnnnnnnnnnnnnnnnnnnnnnnnnnnnnnnnnnnnnnnnnnnnnnnnnnnnnnnnnnnnnnnnnnnnnnnnnnnnnnnnnnnnnnnnnnnnnnnnnnnnnnnnnnnnnnnnnnnnnnnnnnnnnnnnnnnnnnnnnnnnnnnnnnnnnnnnnnnnnnnnnnnnnnnnnnnnnnnnnnnnnnnnnnnnnnnnnnnnnnnnnnnnnnnnnnnnnnnnnnnnnnnnnnnnnnnnnnnnnnnnnnnnnnnnnnnnnnnnnnnnnnnnnnnnnnnnnnnnnnnnnnnnnnnnnnnnnnnnnnnnnnnnnnnnnnnnnnnnnnnnnnnnnnnnnnnnnnnnnnnnnnnnnnnnnnnnnnnnnnnnnnnnnnnnnnnnnnnnnnnnnnnnnnnnnnnnnnnnnnnnnnnnnnnnnnnnnnnnnnnnnnnnnnnnnnnnnnnnnnnnnnnnnnnnnnnnnnnnnnnnnnnnnnnnnnnnnnnnnnnnnnnnnnnnnnnnnnnnnnnnnnnnnnnnnnnnnnnnnnnnnnnnnnnnnnnnnnnnnnnnnnnnnnnnnnnnnnnnnnnnnnnnnnnnnnnnnnnnnnnnnnnnnnnnnnnnnnnnnnnnnnnnnnnnnnnnnnnnnnnnnnnnnnnnnnnnnnnnnnnnnnnnnnnnnnnnntgatgtttgatgccgtgccgtggtggtgagcgctgtccgagagctgaaccgcagccaggagatcggtgtgaagccgctggcctgtacgtcagccaacatttggccccatgggaccagcctcatgaactacctgcgcatggt

SEQ ID NO: 27859 - DNA, 680 bp, Macaca Mulatta
gggggactgggagcttttgctgggagtttgcttcatagctctgtgaagaagctgtggcccacactaggatcccctcttttcctaaaccgagatgaacatgcttctcttactaatgagtctttatctccttggatctgccagaggaacatcaggtcattctgatgagtcttctggctccatagatcatcaaacttcagttcagcagctttcaggtgagttcttttcacttgaaaacccttctgatgctgaggctttatatgagactgcttcaggcctgaacactttaagtgagcatggttccagtgagcatggttcaagagagcacactgtggctgagcacactcctggagaacacgccgagagcgagcatgcttcgggtgagcctgctgcgactggacatgcagaaggtgagcgcactgtaggtgagcagccttcaggagaacagtctttcggtgaacaactctccggtgaaacagcttttgggtgagcatgcatcaggtgaacagccttcagatggacagctttcagttgaacatgtctccggtgaacagccttttggtgagcacgcctcaggtgaacagccttcgggtgaaaagcctttaggtgagcacgcttcaggtgaacagtctttggggtgacatgctttgagtgaaaagcttcaggggacaccttcagtgcac

SEQ ID NO: 27860 - DNA, 695 bp, Macaca Mulatta
tcctgcccttcattttctccataggtctctgtgctctgcctgtgctgactcagcccccgtctgcatctgcctcgttgggagcctctgtcaagctcacctgcaccctgatcagtgattacagcaacaactttattttctggtatcaacagagaccggggaggtctccccaatatataatgaaggttaacagtgatggcacccagaccaagggggatgggatccccgatcgcttcttgggctccagttctgggactgaccgctacctcaccatctccaacctccagtctgacgacgaggctgagtattactgtggagagtgccacacgatgtatggccagtacggttgctttttcggaggagggacccggctgaccgtcctacgtcagcccaaggctgccccctcggtcactctcttcccgccctcctctgaggagcttcaagccaacaaggccacactagtgtgtctgatcagtgacttctacccgggagccgtggaagtggcctggaagggcagatggcagcgctgtcaacgcgggagtggagaccaccaaaccctccaaacagagcaacaacaagtacgcggccagcagctacctgagcctgacgtctgaccagtggaagtccacaagagctacaggtgccaggtcacgcacgaagggagaccgtggagaagacagtggccctgcgaatgtcat

SEQ ID NO: 27861 - DNA, 1779 bp, Macaca Mulatta
  misc_feature (1)...(1779): n = A,T,C or G
ccagacctttggagagaaggagcaaaccccctctggcacagcccatcagggagaaannnnnnnnnnnnnnnnnnnnnnnnnnnnnnnnnnnnnnnnnnnnnnnnnnnnnnnnnnnnnnnnnnnnnnnnnnnnnnnnnnnnnnnnnnnnnnnnnnnnnnnnnnnnnnnnnnggggccatggcccaggccagcatcaacagtgactacagtgagtggggcttgagcacagatgccggggagcgggcccggctgcttcagagtccctgtgtggacacagcccccaagagtgagtgggaagcctctcctgggggtccagacagaggcaccacttccacacttggagctgtcttcatcgtcgtcaacgcgtgcctgggcgcaggactactcaacttcccagcagccttcagcactgcggggggcgtggcagcaggcatcgcactgcagatgnggtatgctggttttcatcatcagcggccttgtcatcctggcctactgctcccaggccagcaatgagaggacctaccaggaggtggtgtgggctgtgtgtggcaagctgacaggtgtgctgtgtgaggtggccatcgctgtctacacctttggcacctgcatcgccttcctaatcatcattggtgaccagcaagacaagannnnnnnnnnnnnnnnnnnnnnnnnnnnnnnnnnnnnnnnnnnnnnnnnnnnnnnnnnnnnnnnnnnnnnnnnnnnnnnnnnnnnnnnnnnnnnnnnnnnnnnnnnnnnnnnnnnnnnnnnnnnnnnnnnnnnnnnnnnnnnnnnnnatgagcgtcgtgggtaactggtacgtcacagccatcgttatcatcaagtacatctggccagataaagagatgaccccaggggacatcctgaccagnnnnnnnnnnnnnnnnnnnnnnnnnnnnnnnnnnnnnnnnnnnnnnnnnnnnnnnnnnnnnnnnnnnnnnnnnnnnnnnnnnnnnnnnnnnnnnnnnnnnnnnnnnnnnnnnnnnnnnnnnnnnnnnnnnnnnnnnnnnnnnnnnnnnnnnnnnnnnnnnnnnnnnnnnnnnnnnnnnnnnnnnnnnnnnnnnnnnnnnnnnnnnnnnnnnnnnnnnnnnnnnnnnnnnnnnnnnnnnnnnnnnnnnnnnnnnnnnnnnnnnnnnnnnnnnnnnnnnnnnnnnnnnnnnnnnnnnnnnnnnnnnnnnnnnnnnnnnnnngggcggtggtggaaggcctgtggctgcgctaccagggggtgccagtggaggaggacgtggggcgggagcggcggcggcgagtgctgcagacgctggtctggttcctgctcaccctgctgctggcgctcttcatccctgacatcggcaaggtgatctcagtcattggaggcctggccgcctgcttcatcttcgtcttcccagnnnnnnnnnnnnnnnnnnnnnnnnnnnnnnnnnnnnnnnnnnnnnnnnnnnngctggtgggtgctggtcagctacggagtcctcttggtcaccctgggagccttcatcttcggccagaccacagccaatgccatctttgtggatctcttggcataaccactgcctcccagggaacacaaggcctttgccattggtcgcaggaacccatctcttagagctatggggccattgttagtccacgatcattccaactggtgggatgacatccggacatcctcttccagggactggggcaaactcaggccccacacctctggacagctcaaacccagtcctcttcctgctccccggtgctggcagtgctgtggatg

SEQ ID NO: 27862 - DNA, 618 bp, Macaca Mulatta
  misc_feature (1)...(618): n = A,T,C or G
gtgccctctgccctcctgaccttctcgtgggacatggctgtgctggaggacatcaaggctgcgggggtcgagcctgattccatcctgaaacctgagctcctgtcagccatcgagaagctctcttgaaataaaagcagggttggcctcagccctgtgggtctgtctcatgctctccctgttcctccccccaccaccccagggcctccaagccccctctggaaatacttggctctgccccatgggcacgggaggggcgccagctagctgtggagctgtggaactgggccctgtggcagagccgccatctcctgcgggctgtggnnnnnnnnnnnnnnnnnnnnnnnnnnnnnnnnnnnnnnnnnnnnnnnnnnnnnnnnnnnnnnnnnnnnnnnnnnnnnnnnnnnnnnnnnnnnnnnnnnnnnnnnnnnnnnnnnnnnnnnnnnnnnnnnnnnnnnnnnnnnnnnnnnnnnnnnnnnnnnnnnnnnnnnnnnnnnnnnnnnnnnnnnnnnnnnnnnnnnnnnnnnnnnnnnnnnnnnnnnnnnnnnnnnnnnnnnnnnnnnnnnnnnnnnnagacctgcagttagtaaatcataagcccaaataaacagggtgtttgaa

SEQ ID NO: 27863 - DNA, 2316 bp, Macaca Mulatta
  misc_feature (1)...(2316): n = A,T,C or G
aggttgagccggaccctgaggctgggagtgagcaagaggtatttgctgctgtggaagggcccagtgccgaggagatgccctcagacacagaatctgcagaagtcctggagacaccgcttgacgcccaccaggggcttctggggatggatcccccgggtgacatggtgggcttcgtggcggctgagagcactgaggaccttaaggccctgagcagtgaggaggaagaagaaatggggagagccgcccaggagcctgaaagccttctgccaccctccgtgctggaccaggccagtgtcattgcggagcggtttgttagcagcttctctcggcggagcagcgtggcacaggaggacagcaagtccagtggctttgggagcccacggctggtcagccggagcagcagcgtgctcagcctggagggcagtgagaagggcctggcgcggcgtggcagtgccacagggtccctcagctgtcagctctccccagaagtggacatcagtgnnnnnnnnnnnnnnnnnnnnnnnnnnnnnnnnnnnnnnnnnnnnnnnnnnnnnnnnnnnnnnnnnnnnnnnnnnnnnnnnnnnnnnnnnnnnnnnnnnnnnnnnnnnnnnnnnnnnnnnnnnnnnnnnnnnnnnnnnnnnnnnnnnnnnnnnnnnnnnnnnnnnnnnnnnnnnnnnnnnnnnnnnnnnnnnnnnnnnnnnnnnnnnnnnnnnnnnnnnnnnnnnnnnnnnnnnnnnnnnnnnnnnnnnnnnnnnnnnnnnnnnnnnnnnnnnnnnnnnnnnnnnnnnnnnnnnnnnnnnnnnnnnnnnnnnnnnnnnnnnnnnnnnnnnnnnnnnnnnnnnnnnnnnnnnnnnnnnnnnnnnnnnnnnnnnnnnnnnnnnnnnnnnnnnnnnnnnnnnnnnnnnnnnnnnnnnnnnnnnnnnnnnnnnnnnnnnnnnnnnnnnnnnnnnnnnnnnnnnnnnnnnnnnnnnnnnnnnnnnnnnnnnnnnnnnnnnnnnnnnnnnnnnnnnnnnnnnnnnnnnnnnnnnnnnnnnnnnnnnnnnnnnnnnnnnnnnnnnnnnnnnnnnnnnnnnnnnnnnnnnnnnnnnnnnnnnnnnnnnnnnnnnnnnnnnnnnnnnnnnnnnnnnnnnnnnnnnnnnnnnnnnnnnnnnnnnnnnnnnnnnnnnnnnnnnnnnnnnnnnnnnnnnnnnnnnnnnnnnnnnnnnnnnnnnnnnnnnnnnnnnnnnnnnnnnnnnnnnnnnnnnnnnnnnnnnnnnnnnnnnnnnnnnnnnnnnnnnnnnnnnnnnnnnnnnnnnnnnnnnnnnnnnnnnnnnnnnnnnnnnnnnnnnnnnnnnnnnnnnnnnnnnnnnnnnnnnnnnnnnnnnnnnnnnnnnnnnnnnnnnnnnnnnnnnnnnnnnnnnnnnnnnnnnnnnnnnnnnnnnnnnnnnnnnnnnnnnnnnnnnnnnnnnnnnnnnnnnnnnnnnnnnnnnnnnnnnnnnnnnnnnnnnnnnnnnnnnnnnnnnnnnnnnnnnnnnnnnnnnnnnnnnnnnnnnnnnnnnnnnnnnnnnnnnnnnnnnnnnnnnnnnnnnnnnnnnnnnnnnnnnnnnnnnnnnnnnnnnnnnnnnnnnnnnnnnnnnnnnnnnnnnnnnnnnnnnnnnnnnnnnnnnnnnnnnnnnnnnnnnnnnnnnnnnnnnnnnnnnnnnnnnnnnnnnnnnnnnnnnnnnnnnnnnnnnnnnnnnnnnnnnnnnnnnnnnnnnnnnnnnnnnnnnnnnnnnnnnnnnncagggtgggccgctgccgcagcctgagcaccaagaggggccggggaggcggagaggctgcccgatcccctgggcctctgccccagagcaagcaggacggaggcgagaccctgtatgtcactgcagacctcacccttgaggacaaccggcgggtgattgtcatggagaagggaccccttcccggccccacggcggggctagaggagagcagtggtcagggaccaagctcgccgggggccctgctggggcagggccaggacttccagcagtctgcagagtgtcggctgaaggaagagggtcccagggacccggcagacccgagccagcagggtagagtgagaaacctcagagagaagttccaggccttgaactctgttggttgatgctgactcctgggggagggaggagtcatgttggaggttggggaagaatctgggcatccttcccctcaagcctgggctcatggagcccctgcccagggccctccggcaggcggaaagtctgtcccctctgcccttcgggaaggatgctcccgtgtgcaggggtctcctgcctg

SEQ ID NO: 27864 - DNA, 250 bp, Macaca Mulatta
gctttgggaggccaaggcaggaggatcaaggcaagaggccaggagtttgagaccagcctgggcaacacagtgaaaccccatctctaccaaaaatttaagaatcagctgcgtgtgatggcatgtgtctgtggtcccagctacatgggaggctgaggcaagaagataacttgagtctgggaggttgaggctgccgtgagctgtgtttatgctgctgtattccagcctgggtgacagaatgaggccctatctc

SEQ ID NO: 27865 - DNA, 226 bp, Macaca Mulatta
atgggaaatgtggtctccgacagatggcctatacccgggaggagcccaggaactctaggtggacagttacttccgcacacgcgcagtaggacggtagccggtattcaatcttcaaatcagcgccgcgagaagtgctggcggtggttgccccacagtctgtggacaacgcagtgactgatcccaggcttggaaccggagctgcgagcgaggcagtgaaagggtggca

SEQ ID NO: 27866 - DNA, 2134 bp, Macaca Mulatta
  misc_feature (1)...(2134): n = A,T,C or G
gctccatgctgtgcagcggatcaacaaagccatccagaggggagtggcggctgacactgtgaaggagctgatgtgccctgaggcccagctgcctccagtgtaccctgttgcgtcagctatgtaccagcaggagctggcagtgctccagcggcagcagnnnnnnnnnnnnnnnnnnnnnnnnnnnnnnnnnnnnnnnnnnnnnnnnnnnnnnnnnnnnnnnnnnnnnnnnnnnnnnnnnnnnnnnnnnnnnnnnnnnnnnnnnnnnnnnnnnnnnnnnnnnnnnnnnnnnnnnnnnnnnnnnnnnnnnnnnnnnnnnnnnnnnnnnnnnnnnnnnnnnnnnnnnnnnnnnnnnnnnnnnnnnnnnnnnnnnnnnnnnnnnnnnnnnnnnnnnnnnnnnnnnnnnnnnnnnnnnnnnnnnnnnnnnnnnnnnnnnnnnnnnnnnnnnnnnnnnnnnnnnnnnnnnnnnnnnnnnnnnnnnnnnnnnnnnnnnnnnnnnnnnnnnnnnnnnnnnnnnnnnnnnnnnnnnnnnnnnnnnnnnnnnnnnnnnnnnnnnnnnnnnnnnnnnnnnnnnnnnnnnnnnnnnnnnnnnnnnnnnnnnnnnnnnnnnnnnnnnnnnnnnnnnnnnnnnnnnnnnnnnnnnnnnnnnnnnnnnnnnnnnnnnnnnnnnnnnnnnnnnnnnnnnnnnnnnnnnnnnnnnnnnnnnnnnnnnnnnnnnnnnnnnnnnnnnnnnnnnnnnnnnnnnnnnnnnnnnnnnnnnnnnnnnnnnnnnnnnnnnnnnnnnnnnnnnnnnnnnnnnnnnnnnnnnnnnnnnnnnnnnnnnnnnnnnnnnnnnnnnnnnnnnnnnnnnnnnnnnnnnnnnnnnnnnnnnnnnnnnnnnnnnnnnnnnnnnnnnnnnnnnnnnnnnnnnnnnnnnnnnnnnnnnnnnnnnnnnnnnnnnnnnnnnnnnnnnnnnnnnnnnnnnnnnnnnnnnnnnnnnnnnnnnnnnnnnnnnnnnnnnnnnnnnnnnnnnnnnnnnnnnnnnnnnnnnnnnnnnnnnnnnnnnnnnnnnnnnnnnnnnnnnnnnnnnnnnnnnnnnnnnnnnnnnnnnnnnnnnnnnnnnnnnnnnnnnnnnnnnnnnnnnnnnnnnnnnnnnnnnnnnnnnnnnnnnnnnnnnnnnnnnnnnnnnnnnnnnnnnnnnnnnnnnnnnnnnnnnnnnnnnnnnnnnnnnnnnnnnnnnnnnnnnnnnnnnnnnnnnnnnnnnnnnnnnnnnnnnnnnnnnnnnnnnnnnnnnnnnnnnnnnnnnnnnnnnnnnnnnnnnnnnnnnnnnnnnnnnnnnnnnnnnnnnnnnnnnnnnnnnnnnnnnnnnnnnnnnnnnnnnnnnnnnnnnnnnnnnnnnnnnnnnnnnnnnnnnnnnnnnnnnnnnnnnnnnnnnnnnnnnnnnnnnnnnnnnnnnnnnnnnnnnnnnnnnnnnnnnnnnnnnnnnnnnnnnnnnnnnnnnnnnnnnnnnnnnnnnnnnnnnnnnnnnnnnnnnnnnnnnnnnnnnnnnnnnnnnnnnnnnnnnnnnnnnnnnnnnnnnnnnnnnnnnnnnnnnnnnnnnnnnnnnnnnnnnnnnnnnnnnnnnnnnnnnnnnnnnnnnnnnnnnnnnnnnnnnnnnnnnnnnnnnnnnnnnnnnnnnnnnnnnnnnnnnnnnnnnnnnnnnnnnnnnnnnnnnnnnnnnnnnnnnnnnnnnnnnnnnnnnnnnnnnnnnnnnnnnnnnnnnnnnnnnnnnnnnnnnnnnnnnnnnnnnnnnnnnnnnnnnnnnnnnnnnnnnnnnnnnnnnnnnnnnnnnnnnnnnnnnnnnnnnnnnnnnnnnnnnnnnnnnnnnnnnnnnnnnnnnnnnnnnnnnnnnnnnnnnnnnnnnnnnnnnnnnnnnnnnnnnnnnnnnnnnnnnnnnnnnnnnnnnnnnnngtcaaaggtggagcagccccaggacgtggtgacaggcaacccaacagtggtgaggctggtggtgagattctaccgcaatgggcggggacagagtgccctgcaggagattctgggcaaggttatccaggatgtgctagaggacaaagtgctcagcgtccacacagaccctgtccacctctataagaactggatcaaccagacgaggccc

SEQ ID NO: 27867 - DNA, 3772 bp, Macaca Mulatta
  misc_feature (1)...(3772): n = A,T,C or G
ggcatctttcaacctcatgtacgacacctcctggttttggcgacccctgtagacatagtaattcttggactgagctatgctaatttgcaaacaggtnnnnnnnnnnnnnnnnnnnnnnnnnnnnnnnnnnnnnnnnnnnnnnnnnnnnnnnnnnnnnnnnnnnnnnnnnnnnnnnnnnnnnnnnnnnnnnnnnnnnnnnnnnnnnnnnnnnnnnnnnnnnnnnnnnnnnnnnnnnnnnnnnnnnnnnnnnnnnnnnnnnnnnnnnnnnnnnnnnnnnnnnnnnnnnnnnnnnnnnnnnnnnnnnnnnnnnnnnnnnnnnnnnnnnnnnnnnnnnnnnnnnnnnnnnnnnnnnnnnnnnnnnnnnnnnnnnnnnnnnnnnnnnnnnnnnnnnnnnnnnnnnnnnnnnnnnnnnnnnnnnnnnnnnnnnnnnnnnnnnnnnnnnnnnnnnnnnnnnnnnnnnnnnnnnnnnnnnnnnnnnnnnnnnnnnnnnnnnnnnnnnnnnnnnnnnnnnnnnnnnnnnnnnnnnnnnntaggaccatcgatcgttctgtttttaaaccaattgtccaaatagcagtgattgaaaattctgaatcactggactgccagttattggctgtcacacatgcaggnnnnnnnnnnnnnnnnnnnnnnnnnnnnnnnnnnnnnnnnnnnnnnnnnnnnnnnnnnnnnnnnnnnnnnnnnnnnnnnnnnnnnnnnnnnnnnnnnnnnnnnnnnnnnnnnnnnnnnnnnnnnnnnnnnnnnnnnnnnnnnnnnnnnnnnnnnnnnnnnnnnnnnnnnnnnnnnnnnnnnnnnnnnnnnnnnnnnnnnnnnnnnnnnnnnnnnnnnnnnnnnnnnnnnnnnnnnnnnnnnnnnnnnnnnnnnnnnnnnnnnnnnnnnnnnnnnnnnnnnnnnnnnnnnnnnnnnnnnnnnnnnnnnnnnnnnnnnnnnnnnnnnnnnnnnnnnnnnnnnnnnnnnnnnnnnnnnnnnnnnnnnnnnnnnnnnnnnnnnnnnnnnnnnnnnnnnnnnnnnnnnnnnnnnnnnnnnnnnnnnnnnnnnnnnnnnnnnnnnnnnnnnnnnnnnnnnnnnnnnnnnnnnnnnnnnnnnnnnnnnnnnnnnnnnnnnnnnnnnnnnnnnnnnnnnnnnnnnnnnnnnnnnnnnnnnnnnnnnnnnnnnnnnnnnnnnnnnnnnnnnnnnnnnnnnnnnnnnnnnnnnnnnnnnnnnnnnnnnnnnnnnnnnnnnnnnnnnnnnnnnnnnnaggtatggtggtgaagcacagatgagatttccaaccactcttccgcctccaagtaatgttggtcccatcttggggtctcctgtctattctagtnnnnnnnnnnnnnnnnnnnnnnnnnnnnnnnnnnnnnnnnnnnnnnnnnnnnnnnnnnnnntatacagcctcctgccatgtcaactccagtgtgtgctctgggaaacccagcaactcaggccacaaatatgagttgtgtgactggaccagagattgtgtattctggaaaacacaatggtatttgcatttacttttctcggatcatgggnnnnnnnnnnnnnnnnnnnnnnnnnnnnnnnnnnnnnnnnnnnnnnnnnnnnnnnnnnnnnnnnnnnnnnnnnnnnnnnnnnnnnnnnnnnnnnnnnnnnnnnnnnnnnnnnnnnnnnnnnnnnnnnnnnnnnnnnnnnnnnnnnnnnnnnnnnnnnnnnnnnnnnnnnnnnnnnnnnnnnnnnnnnnnnnnnnnnnnnnnnnnnnnnnnnnnnnnnnnnnnnnnnnnnnnnnnnnnnnnnnnnnnnnnnnnnnnnnnnnnnnnnnnnnnnnnnnnnnnnnnnnnnnnnnnnnnnnnnnnnnnnnnnnnnnnnnnnnnnnnnnnnnnnnnnnnnnnnnnnnnnnnnnnnnnnnnnnnnnnnnnnnnnnnnnnnnnnnnnnnnnnnnnnnnnnnnnnnnnnnnnnnnnnnnnnnnnnnnnnnnnnnnnnnnnnnnnnnnnnnnnnnnnnnnnnnnnnnnnnnnnnnnnnnnnnnnnnnnnnnnnnnnnnnnnnnnnnnnnnnnnnnnnnnnnnnnnnnnnnnnnnnnnnnnnnnnnnnnnnnnnnnnnnnnnnnnnnnnnnnnnnnnnnnnnnnnnnnnnnnnnnnnnnnnnnnnnnnnnnnnnnnnnnnnnnnnnnnnnnnnnnnnnnnnnnnnnnnnnnnnnnnnnnnnnnnnnnnnnnnnnnnnnnnnnnnnnnnnnnnnnnnnnnnnnnnnnnnnnnnnnnnnnnnnnnnnnnnnnnnnnnnnnnnnnnnnnnnnnnnnnnnnnnnnnnnnnnnnnnnnnnnnnnnnnnnnnnnnnnnnnnnnnnnnnnnnnnnnnnnnnnnnnnnnnnnnnnnnnnnnnnnnnnnnnnnnnnnnnnnnnnnnnnnnnnnnnnnnnnnnnnnnnnnnnnnnnnnnnnnnnnnnnnnnnnnnnnnnnnnnnnnnnnnnnnnnnnnnnnnnnnnnnnnnnnnnnnnnnnnnnnnnnnnnnnnnnnnnnnnnnnnnnnnnnnnnnnnnnnnnnnnnnnnnnnnnnnnnnnnnnnnnnnnnnnnnnnnnnnnnnnnnnnnnnnnnnnnnnnnnnnnnnnnnnnnnnnnnnnnnnnnnnnnnnnnnnnnnnnnnnnnnnnnnnnnnnnnnnnnnnnnnnnnnnnnnnnnnnnnnnnnnnnnnnnnnnnnnnnnnnnnnnnnnnnnnnnnnnnnnnnnnnnnnnnnnnnnnnnnnnnnnnnnnnnnnnnnnnnnnnnnnnnnnnnnnnnnnnnnnnnnnnnnnnnnnnnnnnnnnnnnnnnnnnnnnnnnnnnnnnnnnnnnnnnnnnnnnnnnnnnnnnnnnnnnnnnnnnnnnnnnnnnnnnnnnnnnnnnnnnnnnnnnnnnnnnnnnnnnnnnnnnnnnnnnnnnnnnnnnnnnnnnnnnnnnnnnnnnnnnnnnnnnnnnnnnnnnnnnnnnnnnnnnnnnnnnnnnnnnnnnnnnnnnnnnnnnnnnnnnnnnnnnnnnnnnnnnnnnnnnnnnnnnnnnnnnnnnnnnnnnnnnnnnnnnnnnnnnnnnnnnnnnnnnnnnnnnnnnnnnnnnnnnnnnnnnnnnnnnnnnnnnnnnnnnnnnnnnnnnnnnnnnnnnnnnnnnnnnnnnnnnnnnnnnnnnnnnnnnnnnnnnnnnnnnnnnnnnnnnnnnnnnnnnnnnnnnnnnnnnnnnnnnnnnnnnnnnnnnnnnnnnnnnnnnnnnnnnnnnnnnnnnnnnnnnnnnnnnnnnnnnnnnnnnnnnnnnnnnnnnnnnnnnnnnnnnnnnnnnnnnnnnnnnnnnnnnnnnnnnnnnnnnnnnnnnnnnnnnnnnnnnnnnnnnnnnnnnnnnnnnnnnnnnnnnnnnnnnnnnnnnnnnnnnnnnnnnnnnnnnnnnnnnnnnnnnnnnnnnnnnnnnnnnnnnnnnnnnnnnnnnnnnnnnnnnnnnnnnnnnnnnnnnnnnnnnnnnnnnnnnnnnnnnnnnnnnnnnnnnnnnnnnnnnnnnnnnnnnnnnnnnnnnnnnnnnnnnnnnnnnnnnnnnnnnnnnnnnnnnnnnnnnnnggagaagatttacaaatctctgcctggatgctgtttgtggttaccttgttgagctccagtctatgagctcgtcagtagcagtacaagccatcactgggaattttaaatctcttcaggctaaattagaacggcttcattaattactgtgatatactttcatccattttgtgatctgtaaaataaaaactcagctgggtccag

SEQ ID NO: 27868 - DNA, 101 bp, Macaca Mulatta
gattttaattaaacttggatccttttcttgaaagacagctggctgtaagagccttctaccaactgcagttttagatacgttttgaaaattgcatcacctga

SEQ ID NO: 27869 - DNA, 1360 bp, Macaca Mulatta
  misc_feature (1)...(1360): n = A,T,C or G
gaaggaggcggagacagccattgtggtgcgcgcgtccacctcgcccttccccctcgcgcacctccaaccagagatgtccaaccccgggggtgtgacaagggagtggggttgctgggaaaccctcttctctgattggctctctggaagccagccgctgccacgagggaaagaagcttcagtttgtcgcatgcgcagtgagtaaacatgagcctctggtagatgagggaaaccgcgatcagagtacggcgcgtgcgcagatcagggatcgcgattgctagtcctctgctgcggcgattcgggttcctgtagaacgttgagggcactagtcgggtcctgagaccaggtnnnnnnnnnnnnnnnnnnnnnnnnnnnnnnnnnnnnnnnnnnnnnnnnnnnnnnnnnnnnnnnnnnnnnnnnnnnnnnnnnnnnnnnnnnnnnnnnnnnnnnnnnnnnnnnnnnnnnnnnnnnnnnnnnnnnnnnnnnnnnnnnnnnnnnnnnnnnnnnnnnnnnnnnnnnnnnnnnnnnnnnnnnnnnnnnnnnnnnnnnnnnnnnnnnnnnnnnnnnnnnnnnnnnnnnnnnnnnnnnnnnnnnnnnnnnnnnnnnnnnnnnnnnnnnnnnnnnnnnnnnnnnnnnnnnnnnnnnnnnnnnnnnnnnnnnnnnnnnnnnnnnnnnnnnnnnnnnnnnnnnnnnnnnnnnnnnnnnnnnnnnnnnnnnnnnnnnnnnnnnnnnnnnnnnnnnnnnnnnnnnnnnnnnnnnnnnnnnnnnnnnnnnnnnnnnnnnnnnnnnnnnnnnnnnnnnnnnnnnnnnnnnnnnnnnnnnnnnnnnnnnnnnnnnnnnnnnnnnnnnnnnnnnnnnnnnnnnnnnnnnnnnnnnnnnnnnnnnnnnnnnnnnnnnnnnnnnnnnnnnnnnnnnnnnnnnnnnnnnnnnnnnnnnnnnnnnnnnnnnnnnnnnnnnnnnnnnnnnnnnnnnnnnnnnnnnnnnnnnnnnnnnnnnnnnnnnnnnnnnnnnnnnnnnnnnnnnnnnnnnnnnnnnnnnnnnnnnnnnnnnnnnnnnnnnnnnnnnnnnnnnnnnnnnnnnnnnnnnnnnnnnnnnnnnnnnnnnnnnncggtggctcatacctgtaatcccagcactttgggcggctgaggcgggcagatcacaaggtcaggagttcgagatcagcctgcccaacatagtgaaaccccgcctctactaaaaatacaaaaacattagccaggcatgctggtgggtgcctgtaattccagctacttgggaggctgaggcaggataatcgtttggactcaggaggcggaggttgcagtgagctgagatcacgccactgcactccagcctgggcaac

SEQ ID NO: 27870 - DNA, 1782 bp, Macaca Mulatta
  misc_feature (1)...(1782): n = A,T,C or G
agaaatggcccagttgagcagctgtgacagtcctgacactccagagacagatgattctattgagnnnnnnnnnnnnnnnnnnnnnnnnnnnnnnnnnnnnnnnnnnnnnnnnnnnnnnnnnnnnnnnnnnnnnnnnnnnnnnnnnnnnnnnnnnnnnnnnnnnnnnnnnnnnnnnnnnnnnnnnnnnnnnnnnnnnnnnnnnnnnnnnnnnnnnnnnnnnnnnnnnnnnnnnnnnnnnnnnnnnnnnnnnnnnnnnnnnnnnnnnnnnnnnnnnnnnnnnnnnnnnnnnnnnnnnnnnnnnnnnnnnnnnnnnnnnnnnnnnnnnnnnnnnnnnnnnnnnnnnnnnnnnnnnnnnnnnnnnnnnnnnnnnnnnnnnnnnnnnnnnnnnnnnnnnnnnnnnnnnnnnnnnnnnnnnnnnnnnnnnnnnnnnnnnnnnnnnnnnnnnnnnnnnnnnnnnnnnnnnnnnnnnnnnnnnnnnnnnnnnnnnnnnnnnnnnnctcctaattacatcaatggggcacatcaagctcacggactttggactgtccaaaattggtctcatgagtctgacaacgaacttgtatgagggtcacattgaaaaggatgcccgggaattcctggacaagcaggtancaggtatgcgggaccccagaatacattgcgcctgaggtgatccctgcgccagggctatgggaagccggtggactggtgggccatgggcattatcctgtatgagttcctggtgggctgcgtccctttttttggagacactccggaggaactctttggnnnnnnnnnnnnnnnnnnnnnnnnnnnnnnnnnnnnnnnnnnnnnnnnnnnnnnnnnnnnnnnnnnnnnnnnnnnnnnnnnnnnnnnnnnnnnnnnnnnnnnnnnnnnnnnacaggcagtgcctatgaggtaaagcagcacccattctttactggtctggactggacaggacttctccgccagaaagctgaatttattcctcagctggagtcagaggacgatactagctattttgacannnnnnnnnnnnnnnnnnnnnnnnnnnnnnnnnnnnnnnnnnnnnnnnnnnnnnnnnnnnnnnnnnnnnnnnnnnnnnnnnnnnnnnnnnnnnnnnnnnnnnnnnnnnggtgtacagcagcatggagcggctctcactgctcgaggagcgccggacaccaccccccaccaagcgcagcctgagtgaggagaaggaggaccgctcagatggcctggcagggctcaaaggccgagaccggagctgggtgattggctcccctgagatnattacggaagcggctgtcggtgtctgagtcgtcccacacagagagtgactccagccctcccatgacagtgcgacgccgctgctcaggcctcctggatgcgcctcggttccccgagggccctgaggaggccagcagcgccctcaggaggcaaccgcaggaggggatatgggtcctgactcccccctctggagagggggcctctgggcctgttgctgaacgctcaggggagcagcggccaaagctggatgaggaagctgttggccggagcagtggttccagtccaggtatggncagctatggagaccagaggccgtgggaccccgcagctggctgagggagccacagccaaggccatcagtgacctggctgtgcgtagggcccgccaccggctgctctgcggggactcagcagagaagcgccccactcgccctgtcaacaaggtgatcaagtctgcctcagccacagccctctcactcctcattccttcggn

SEQ ID NO: 27871 - DNA, 619 bp, Macaca Mulatta
tctttaatttgacagttactgagtctgtgctttattctaggattcagagaaactgcaaggcttatttcaggcagcattggcgctcagcacaagcaccaaaccatacgactgtgtgacagcttcctacctgctgaacttcttaatctggcaggatgctctaccgtcatccttgtctgcctacttaactcagcaagttgcatgtggtgatggagatagaccagctactgtggtggaaaggaacacattaatgggtttgtattgatgtttgctcttatcaaaactggtatcttactctgtcagtattcatttggctagaatatttaatggttaaacatatactccgtgactttttatttaaaagtttatcagcatataagagcactgtgggttcttattatgcaaatgaacagtttactcagctataatacttttttctaaacagaagatttatgttgaataagcacatatacaaatatttattaataaagttctttttaaatgagaatgacctctttctccaccaaaagtttgctttttttcctgcataaattatactgtgactagagacagaccatctttattgtttctatataggcagagttcctttgtctgtcagggt

SEQ ID NO: 27872 - DNA, 1702 bp, Macaca Mulatta
  misc_feature (1)...(1702): n = A,T,C or G
aggagcttcctgaaactgtgatagatcttttaaagaagtgcctcaccttccatccttctaagaggnnnnnnnnnnnnnnnnnnnnnnnnnnnnnnnnnnnnnnnnnnnnnnnnnnnnnnnnnnnnnnnnnnnnnnnnnnnnnnnnnnnnnnnnnnnnnnnnnnnnnnnnnnnnnnnnnnnnnnnnnnnnnnnnnnnnnnnnnnnnnnnnnnnnnnnnnnnnnnnnnnnnnnnnnnnnnnnnnnnnnnnnnnnnnnnnnnnnnnnnnnnnnnnnnnnnnnnnnnnnnnnnnnnnnnnnnnnnnnnnnnnnnnnnnnnnnnnnnnnnnnnnnnnnnnnnnnnnnnnnnnnnnnnnnnnnnnnnnnnnnnnnnnnnnnnnnnnnnnnnnnnnnnnnnnnnnnnnnnnnnnnnnnnnnnnnnnnnnnnnnnnnnnnnnnnnnnnnnnnnnnnnnnnnnnnnnnnnnnnnnnnnnnnnnnnnnnnnnnnnnnnnnnnnnnnnnnnnnnnnnnnnnnnnnnnnnnnnnnnnnnnnnnnnnnnnnnnnnnnnnnnnnnnnnnnnnnnnnnnnnnnnnnnnnnnnnnnnnnnnnnnnnnnnnnnnnnnnnnnnnnnnnnnnnnnnnnnnnnnnnnnnnnnnnnnnnnnnnnnnnnnnnnnnnnnnnnnnnnnnnnnnnnnnnnnnnnnnnnnnnnnnnnnnnnnnnnnnnnnnnnnnnnnnnnnnnnnnnnnnnnnnnnnnnnnnnnnnnnnnnnnnnnnnnnnnnnnnnnnnnnnnnnnnnnnnnnnnnnnnnnnnnnnnnnnnnnnnnnnnnnnnnnnnnnnnnnnnnnnnnnnnnnnnnnnnnnnnnnnnnnnnnnnnnnnnnnnnnnnnnnnnnnnnnnnnnnnnnnnnnnnnnnnnnnnnnnnnnnnnnnnnnnnnnnnnnnaggtcttgactcactctgtgctccattcctgtatctaaacttcaataatgaagnnnnnnnnnnnnnnnnnnnnnnnnnnnnnnnnnnnnnnnnnnnnnnnnnnnnnnnnnnnnnnnnnnnnnnnnnnnnnnnnnnagagtatctgactgtcttctctcagatgattgcatttcatgatccagagctgagtaatcatctcaatgagattggcttcattccagatnctctatgccatcccttggtttctcaccatgtttactcnnnnntttccactacacaaaattttccacctctgggaataccttactagttgggaaattctttttttccattctgtatgggaagtagcaatttttcagcagttgcgggaccggcttttggctaatggctttaatgagtgcattcttctcttctccgatttaccagnaattgacattgaacgctgtgtgagagaatctatcaacctgttttgtttggactcctaaaaaggtgctacttacagacagcatgctcaacctccaaagccaacttctgacagcagaggagtcagaagttcggcaccttatttctctgctgagtgtccagatcctccaaagacagatctgngtcaagagaatccatcccattaaatgacctaaagtcagaagtatcaccacggatttcagcagaggacctgattgacttgtgtgagctgacaatgacaggccacttcaaaacacccaccaagaaaacaaagtccagtaaaccaaagctcctggtggttgacatccggaacagtgaaga

SEQ ID NO: 27873 - DNA, 717 bp, Macaca Mulatta
ttgttatgggggctcccattaactcatacctgtctgcaactatgaaatcctcagagaaccataaaacccatgcccacagggcaagcacagtgggcaaggcaggggcctcagggcaaggcctgactcatggccttggctgacacctgtcccggagctgacagactgtgctcacctgaaggccatcccagagctgacaggctgtgctccgtctctcttctccaggacgggcaggtcacctgcttcgtggaagcttgcccccctgccacctgtgctgtccccacgaacatcccaggggcctgctgtccagtctgcttacagaggagggcggaggagaagccctaggctcctgggaggctcctcggagtttgtctgcggtgccatcgtgagggggggtggccgacggcagggagctgcaggctgcggaccaggaaacacccagaactcgcgacatttcatgacaacgtccagctggtgctgttacagaaggcagtgcaggaggcttccaactggagcgtctgtggagaaggaggcggagcaggtgcccgaagggaagcaggcaggagtcctagcttcacgttagacttctcaggtttttatttaattcttttacaatgaaaaattggtgctattattaaattgcacagttgaatcatttaggcgtctaaattgattttgcctcccaacaccatttctttttaaataaagcaggatacctct

SEQ ID NO: 27874 - DNA, 420 bp, Macaca Mulatta
  misc_feature (1)...(420): n = A,T,C or G
gggggcgcggccgtcgctatggtgaagctgagcaaggaggccaagcagagactgcagcagctcttcaaggggggccagtttgccatccgctggggctttatccctcttgtgatttacctgggatttaagaggggtgcagatcctggaatgcctgagccaactgttttgagcctactttggggataaaggattaattggtcttctggatttggaggcaatcagcggacagcatggaagatgtgtgctctggcttggataagagatgggacatcgttcagtcactagttggatggcacaaggctcttcacagatgcatctgtagcagagtggaacttgtactaacttatgatagaatgtatcagaataaatgtttttaacantgacnnnnnnnnnnnnnnnnnnnnnnnnnnnnnnnnnnnn

SEQ ID NO: 27875 - DNA, 1375 bp, Macaca Mulatta
  misc_feature (1)...(1375): n = A,T,C or G
naaactctgacctcttactttctacttaactctggtcccgggcagccaagacaaagcgaaaggcagggcagcatgagccgatcacccctcaatcctaaccaactccaatcagtgggctcccaggatgccctggctcccctgcctccacctgttccccagaatccctccacccactcttgggaccctctgtgtggatctctgccctggggcctcagctgtcttctagctctgcannnnnnnnnnnnnnnnnnnnnnnnnnnnnnnnnnnnnnnnnnnnnnnnnnnnnnnnnnnnnnnnnnnnnnnnnnnnnnnnnnnnnnnnnnnnnnnnnnnnnnnnnnnnnnnnnnnnnnnnnnnnnnnnnnnnnnnnnnnnnnnnnnnnnnnnnnnnnnnnnnnnnnnnnnnnnnnnnnnnnnnnnnnnnnnnnnnnnnnnnnnnnnnnnnnnnnnnnnnnnnnnnnnnnnnnnnnnnnnnnnnnnnnnnnnnnnnnnnnnnnnnnnnnnnnnnnnnnnnnnnnnnnnnnnnnnnnnnnnnnnnnnnnnnnnnnnnnnnnnnnnnnnnnnnnnnnnnnnnnnnnnnnnnnnnnnnnnnnnnnnnnnnnnnnnnnnnnnnnnnnnnnnnnnnnnnnnnnnnnnnnnnnnnnnnnnnnnnnnnnnnnnnnnnnnnnnnnnnnnnnnnnnnnnnnnnnnnnnnnnnnnnnnnnnnnnnnnnnnnnnnnnnnnnnnnnnnnnnnnnnnnnnnnnnnnnnnnnnnnnnnnnnnnnnnnnnnnnnnnnnnnnnnnnnnnnnnnnnnnnnnnnnnnnnnnnnnnnnnnnnnnnnnnnnnnnnnnnnnnnnngtcccctaaggtgacttcctattccttccatgggagtttccttctctgggaccaccccccgcttttatggtattctgcctacccccacctcatttcccatgcctcaggatacccaatgcctcttgctcctaaaaccttctctctcttagggttatcctgctcatggtggtctgttctcagcacctgggctccagccagtttcatgtgtgcccctggaggcgagcttcagcttcatcaactcacactcctctccctgccttccggctcctctcggtatgtgtgggtctgggcagggcagtagaggtcagaagggctggcatggagtgctcactccatcccctaccttttggcttctgtctaaccctccaagggtggctcagaaggttctgggggaggagttctttcctcagtcttgctgctcaggtgctgatccccgtggcctgtgtgtggatcgtttctgcctttttggggttcagtgttatcccccaggaactgtctgcccccaccaaggcaccgtggatttggctgcctcacccagg

SEQ ID NO: 27876 - DNA, 773 bp, Macaca Mulatta
  misc_feature (1)...(773): n = A,T,C or G
tttttagggttcatgttctttatttggacacctttacatgagtatggacaaggcctatgggtggggcaagncagcaatgacagctcnagtgaagtcatggcaagtagcatagccacccatgtcagaggttcgaacctgtgggggagaatcatcatcatccatgtggcctgggttccagcctaacaattcccatcaccacccaacagtctcccctaaggaagcgggccaggacaacctaggctctacccagcaaggtgaccatggtccactgcctagaggcacaaggtctcttccctggtgcactgcactgaagggtatggggagtgtggtccttgcaaggctggaagaaataaagggctctagctcccatgggggtgcaggtgaccgatgacagacttgatgaagtcggttgtggtgctgtagccgcccatgtctcgagtccgcaccttgccaactttgatcaccttcttcactgcatctgcaatcatgttggagtgatactcaagattgagatgccgcaacatgttggaagccgacagtagcatggctgtgggattggctatattcctgcccactgcctgggcaaatgggtgccgggcacccgtctcaaagactgcatattctgcactatagctctcaccagggaccacaccagctcccccaaccaggccagcagccagattgtcaataatgttcccatagagattgggcatcacgagcacatcaaactggtaaggattctgcaccagctgcatgcagcagttgtctatgcc

SEQ ID NO: 27877 - DNA, 687 bp, Macaca Mulatta
  misc_feature (1)...(687): n = A,T,C or G
gcgagagaggacccaggtgtcccgacagtgagcgccgcggggcgcaggctgggccaaggtgcaggcggccagggtgggagactgttcgccccgccctgactcctcctctcttctctgccagtccaggagtcggagatgtgcagctaaagaaagcgcatctggggacggacatatctggcactgcagccctcgccannnnnnnnnnnnnnnnnnnnnnnnnnnnnnnnnnnnnnnnnnnnnnnnnnnnnnnnnnnnnnnnnnnnnnnnnnnnnnnnnnnnnnnnnnnnnnnnnnnnnnnnnnnnnnnnnnnnnnnnnnnnnnnnnnnnnnnnnnnnnnnnnnnnnnnnnnnnnnnnnnnnnnnnnnnnnnnnnnnnnnnnnnnnnnnnnnnnnnnnnnnnnnnnnnnnnnnnnnnnnnnnnnnnnnnnnnnnnnnnnnnnnnnnnnnnnnnnnnnnnnnnnnnnnnnnnnnnnnnnnnnnnnnnnnnnnnnnnnnnnnnnnnnnnnnnnnnnnnnnnnnnnnnnnnnnnnnnnnnnnnnnnnnnnnnnnnnnnnnnnnnnnnnnnnnnnnnaggtgatcgacacagtgcccctgggtgaggtggcagaggacatgtttggttacttcgagcccctgtaccaggtgattcctgacatgccgaggcctccagagactttcctgagaaggg

SEQ ID NO: 27878 - DNA, 735 bp, Macaca Mulatta
  misc_feature (1)...(735): n = A,T,C or G
ccagncctcagagtgggagtacagcagggcctgagcagagcctcccctggcctgtggaccccagaccccaagcctactccgaggccgccggcactggtggtcaaaccctcagcacttggagccctggagctgctgtccccacaacccttgtttccagatgccatagacccataaccacctataaggcagagaggacaccggcgagccggccctgagtgccgaccttgggtggcagggcctgggtctctagtcccacccagagggcacagacaccagcttgcttgnnnnnnnnnnnnnnnnnnnnnnnnnnnnnnnnnnnnnnnnnnnnnnnnnnnnnnnnnnnnnnnnnnnnnnnnnnnnnnnnnnnnnnnnnnnnnnnnnnnnnnnnnnnnnnnnnnnnnnnnnnnnnnnnnnnnnnnnnnnnnnnnnnnnnnnnnnnnnnnnnnnnnnnnnnnnnnnnnnnnnnnnnnnnnnnnnnnnnnnnnnnnnnnnnnnnnnnnnnnnnnnnnnnnnnnnnnnnnnnnnnnnnnnnnnnnnnnnnnnnnnnnnnnnnnnnnnnnnnnnnnnnnnnnnnnnnnnnnnnnnnnnnnnnnnnnnnnnnnnnnnnnnnnnnnnnnnnnnnnnnngcaggctttgggggcccctccgcgggagccccaggggccaaggtggggtgcgggggttagaggctgggatggctcctggccccaccgccagggggcagcgcaggccggg

SEQ ID NO: 27879 - DNA, 336 bp, Macaca Mulatta
ccatgggcaacttggcaggagagatggtgccgtaggtggtcatggatggttgacaccaagagaggccttccacccatggtgggcaaatgtccaggcctgggctgccagcccagggctgtttctgggtgctccctggccccagggtggtatctgggtaccgtggctatgtgtgtccatgtctgtgagcagttcttcaataaatggcctgcctcctcctcctgcctgcctccctgcatctgctggcccagtgcagtccagggcccccacccagcccgtcagcccacacctcaggtggctggcttcccagcagaagccggacccaggaagggacgggtt

SEQ ID NO: 27880 - DNA, 2606 bp, Macaca Mulatta
  misc_feature (1)...(2606): n = A,T,C or G
gtggtacaaaaaaccggattacaacctgttcactccatatattcagcatcgtcagagaaacccaaatcagccattttacattcttcatcctaaatttatatggcagctctgggatattatccaggaaaacactaaagagaagattcagccaaacccaccttcttctggtttcattggnnnnnnnnnnnnnnnnnnnnnnnnnnnnnnnnnnnnnnnnnnnnnnnnnnnnnnnnnnnnnnnnnnnnnnnnnnnnnnnnnnnnnnnnnnnnnnnnnnnnnnnnnnnnnnnnnnnnnnnnnnnnnnnnnnnnnnnnnnnnnnnnnnnnnnnnnnnnnnnnnnnnnnnnnnnnnnnnnnnnnnnnnnnnnnnnnnnnnnnnnnnnnnnnnnnnnnnnnnnnnnnnnnnnnnnnnnnnnnnnnnnnnnnnnnnnnnnnnnnnnnnnnnnnnnnnnnnnnnnnnnnnnnnnnnnnnnnnnnnnnnnnnnnnnnnnnnnnnnnnnnnnnnnnnnnnnnnnnnnnnnnnnnnnnnnnnnnnnnnnnnnnnnnnnnnnnnnnnnnnnnnnnnnnnnnnnnnnnnnnnnnnnnnnnnnnnnnnnnnnnnnnnnnnnnnnnnnnnnnnnnnnnnnnnnnnnnnnnnnnnnnnnnnnnnnnnnnnnnnnnnnnnnnnnnnnnnnnnnnnnnnnnnnnnnnnnnnnnnnnnnnnnnnnnnnnnnnnnnnnnnnnnnnnnnnnnnnnnnnnnnnnnnnnnnnnnnnnnnnnnnnnnnnnnnnnnnnnnnnnnnnnnnnnnnnnnnnnnnnnnnnnnnnnnnnnnnnnnnnnnnnnnnnnnnnnnnnnnnnnnnnnnnnnnnnnnnnnnnnnnnnnnnnnnnnnnnnnnnnnnnnnnnnnnnnnnnnnnnnnnnnnnnnnnnnnnnnnnnnnnnnnnnnnnnnnnnnnnnnnnnnnnnnnnnnnnnnnnnnnnnnnnnnnnnnnnnnnnnnnnnnnnnnnnnnnnnnnnnnnnnnnnnnnnnnnnnnnnnnnnnnnnnnnnnnnnnnnnnnnnnnnnnnnnnnnnnnnnnnnnnnnnnnnnnnnnnnnnnnnnnnnnnnnnnnnnnnnnnnnnnnnnnnnnnnnnnnnnnnnnnnnnnnnnnnnnnnnnnnnnnnnnnnnnnnnnnnnnnnnnnnnnnnnnnnnnnnnnnnnnnnnnnnnnnnnnnnnnnnnnnnnnnnnnnnnnnnnnnnnnnnnnnnnnnnnnnnnnnnnnnnnnnnnnnnnnnnnnnnnnnnnnnnnnnnnnnnnnnnnnnnnnnnnnnnnnnnnnnnnnnnnnnnnnnnnnnnnnnnnnnnnnnnnnnnnnnnnnnnnnnnnnnnnnnnnnnnnnnnnnnnnnnnnnnnnnnnnnntccttccaaactagaagaaagatttcggagccgtcactcttgcttctagggatgcacgcctgtcttnnnnnnnnnnnnnnnnnnnnnnnnnnnnnnnnnnnnnnnnnnnnnnacagtgatgagcactgaatcttcactaaatcttcctacagacatttaggaatccaatccttgctttcgcagatatgttttatgtcagcagcatgacaaagccatataattaaatcatttatgcgaaagcattgcttattaacaaggaaaatatctagatgcttcagagggaaaggcacctagagggaaattttcatcccaatatgttagctatattcagggttgatttttttttttttatctcaactgtcactgatacattgaacattttctgccaagaatatagtgaaacagaaacattttgtaatacctttattaaacatgctatgatttcaatgtataaccaaaacgtatctccatggtacagttaagacttgttgcagtgacaatagcagcttaattaaaggcgttctcccttgcaaagtgtatgaatgtcaggagagtttagtggaaaagtttttcttgtttcaggattggtttctagactgttctcgggactattttcttgagcaagaacggcttacagagactggcggcttctgtttggttagtctattcagcagatatggagctgaataacaagacatctcctatagcttattataatagtgaaggaaaaattggaaagtcttaatcacaacaatatccaataaaagcccattttgagagttttgttattaagtctatgagaagggatagataactttgtcctatgtattaacttatgtctaaatagacatggttaagccatgttcctttctaatttattttnnnnnnnnnnnnnnnnnnnnnnnnnnnnnnnnnnnnnnnnntgtcacccaggctggagtgcagtggtgccatcttggctcactgccagctccacctcctgggttcacaccattcttctgcctcagcctgccaagtagctgggactacaggcgcccgccaccatgcctggctacttttttgtatttttagtagagacagggtttcaccgtgttagccacgatggtctcgatctcctgaccttgtgatctgcctgtcttggcctcccaaagtgctgggattacaggcgtgagccacccgtgcccggccgttcctttctaatttcttgaaagaactggtctcgtccttatgt

SEQ ID NO: 27881 - DNA, 862 bp, Macaca Mulatta
  misc_feature (1)...(862): n = A,T,C or G
ccccaatggtttttcacttttaccacccaacatgggggcgcccccggggggggccaaaaaagagaaaaggtgttttttagaaaaaagtttttttctaaaaaggggnnntnaagggggggggnnnnngagcggagcgatgacaaaattgtttttcttnnnttntcttgccgccccaaggaggtttnttaaaaagggttctttagagccgcctttttatttgagcaattattaaaaataagtttttaaactttttatttgcatattaaaaaaattgtgcattccgataattaaaatcatttgaacaaaaaaaaaatggcactctgattaaactgcattacagcctgcaggacaccttgggccagcttggttttactctagatttcactgtcgtcccacccccacttcttccaccccacttcttccttcaccaacatgcaagttctttccttccctgccagccagatagacagatgggaaaggcaggcgcggccttcgttgtcagtagttctttgatgtgaaaggggcagcacagtcatttaaacttgatccaacctctttgcatcttacaaagttaaacagctaaaagaagtaaaataagaaggcaatgcttgtggaatgtacagtgcatattggcggcgcacgcctcattacgattcgcctgcttgcttctcctgttcaatcgtttctttggaaggcagtggatttttctcttgcgtctctgtcttcttcagtttcgacttatcgaatttctcgatctcagccatatcgggtttgtcagacatggttgcggaggaaaagcggagcgaggcgcacgaaaacgagcgaagtctggtctgagcagtggccaccaccgagttccccc

SEQ ID NO: 27882 - DNA, 803 bp, Macaca Mulatta
  misc_feature (1)...(803): n = A,T,C or G
gggtaaaactgaagattatcctgcnnnnnnnnnnnnnnnnnnnaagttaaaattaaatgcagccagtggaagtctcagtatggacagggaatagcaactcttacttcttccccttgttagacatccttcttttttcctaaaggaagaagatcctaacagtgcaatggataaagagagacgaaagtctttaataaaaccaaaattattgagactgcagagagacattgaaaaagcctcaaaagacaaggaaggtgtgtaaccatccctttgaatggccagaaaaaggaccatattatgctcagaggtttcattcggagttaggattaatctgcttttgctatttggcaggggtcatctcatttaaagaaccatatatcaaacttaaattgtgtgnnnnnnnnnnnnnnnnnnnnnnnnnnnnnnnnnnnnnnnnnnnnnnntcacattttggtctatttatgaaacctatataagtattatactactattttcagaaatgtagcattttaactgtgtttctgaaattggctagaatgagaaataatgtttggtttagaacatggtaaaccagctgtgcacaagagtttttggaagatttttttgggttgtttccttttgacttttgaaaacatgtaaaaaatcattcaaattaaattctggtaccttaaaagttagggcatattaaaaatgtggaaggcaacttctaaagcaacatgggattgacaaaaaatgacttcaccattcgggggaactggatggtctacccaggtaagcctggttttatatgggaatccaaaaaactc

SEQ ID NO: 27883 - DNA, 2002 bp, Macaca Mulatta
  misc_feature (1)...(2002): n = A,T,C or G
gtgacctcttccatcccagtatttgacctccaggatggtggacggaaaatatgtccacggtgtaatgctcaatttcgtgttactgaagctttgagaggtcacatgtgtnnnnnnnnnnnnnnnnnnnnnnnnnnnnnnnnnnnnnnnnnnnnnnnnnnnnnnnnnnnnnnnnnnnnnnnnnnnnnnnnnnnnnnnnnnnnnnnnnnnnnnnnnnnnnnnnnnnnnnnnnnnnnnnnnnnnnnnnnnnnnnnnnnnnnnnnnnnnnnnnnnnnnnnnnnnnnnnnnnnnnnnnnnnnnnnnnnnnnnnnnnnnnnnnnnnnnnnnnnnnnnnnnnnnnnnnnnnnnnnnnnnnnnnnnnnnnnnnnnnnnnnnnnnnnnnnnnnnnnnnnnnnnnnnnnnnnnnnnnnnnnnnnnnnnnnnnnnnnnnnnnnnnnnnnnnnnnnnnnnnnnnnnnnnnnnnnnnnnnnnnnnnnnnnnnnnnnnnnnnnnnnnnnnnnnnnnnnnnnnnnnnnnnnnnnnnnnnnnnnnnnnnnnnnnnnnnnnnnnnnnnnnnnnnnnnnnnnnnnnnnnnnnnnnnnnnnnnnnnnnnnnnnnnnnnnnnnnnnnnnnnnnnnnnnnnnnnnnnnnnnnnnnnnnnnnnnnnnnnnnnnnnnnnnnnnnnnnnnnnnnnnnnnnnnnnnnnnnnnnnnnnnnnnnnnnnnnnnnnnnnnnnnnnnnnnnnnnnnnnnnnnnnnnnnnnnnnnnnnnnnnnnnnnnnnnnnnnnnnnnnnnnnnnnnnnnnnnnnnnnnnnnnnnnnnnnnnnnnnnnnnnnnnnnnnnnnnnnnnnnnnnnnnnnnnnnnnnnnnnnnnnnnnnnnnnnnnnnnnnnnnnnnnnnnnnnnnnnnnnnnnnnnnnnnnnnnnnnnnnnnnnnnnnnnnnnnnnnnnnnnnnnnnnnnnnnnnnnnnnnnnnnnnnnnnnnnnnnnnnnnnnnnnnnnnnnnnnnnnnnnnnnnnnnnnnnnnnnnnnnnnnnnnnnnnnnnnnnnnnnnnnnnnnnnnnnnnnnnnnnnnnnnnnnnnnnnnnnnnnnnnnnnnnnnnnnnnnnnnnnnnnnnnnnnnnnnnnnnnnnnnnnnnnnnnnnnnnnnnnnnnnnnnnnnnnnnnnnnnnnnnnnnnnnnnnnnnnnnnnnnnnnnnnnnnnnnnnnnnnnnnnnnnnnnnnnnnnnnnnnnnnnnnnnnnnnnnnnnnnnnnnnnnnnnnnnnnnnnnnnnnnnnnnnnnnnnnnnnnnnnnnnnnnnnnnnnnnnnnnnnnnnnnnnnnnnnnnnnnnnnnnnnnnnnnnnnnnnnnnnnnnnnnnnnnnnnnnnnnnnnnnnnnnnnnnnnnnnnnnnnnnnnnnnnnnnnnnnnnnnnnnnnnnnnnnnnnnnnnnnnnnnnnnnnnnnnnnnnnnnnnnnnnnnnnnnnnnnnnnnnnnnnnnnnnnnnnnnnnnnnnnnnnnnnnnnnnnnnnnnnnnnnnnnnnnnnnnnnnnnnnnnnnnnnnnnnnnnnnnnnnnnnnnnnnnnnnnnnnnnnnnnnnnnnnnnnnnnnnnnnnnnnnnnnnnnnnnnnnnnnnnnnnnnnnnnnnnnnnnnnnnnnnnnnnnnnnnnnnnnnnnnnnnnnnnnnnnnnnnnnnnnnnnnnnnnnnnnnnnnnnnnnnnnnnnnnnnnnnnnnnnnnnnnnnnnnnnnnnnnnnnnnnnnnnnnnnnnnnnnnnnnnnnnnnnnnnnnnnnnnnnnnnnnnnnnnnnnnnnnnnnnnnnnnnnnnnnnnnnnnnnnnnnnnnnnnnnnnnnnnnnnnnnnnnnnnnnnnnnnnnnnngtggtggtagtggggttggcaaaaaggagcagctgtctgtgaagaagcttcgagtagtactgtttgctcaatgctgcaatacagaacaggcagctgaacacttccgaaatccccagcgacgtattcagcgttggcttcgacgtttccaggcctcccagggggagaatct

SEQ ID NO: 27884 - DNA, 4794 bp, Macaca Mulatta
  misc_feature (1)...(4794): n = A,T,C or G
agtgcgcggctttccctctgagaaggactttgaggactacattaggtatgacaaccgctcgtccagcgtgctggccgccgtggtcttcgagcaccccttcaaccacagcaaggagcccctgccgctggcggtgnnnnnnnnnnnnnnnnnnnnnnnnnnnnnnnnnnnnnnnnnnnnnnnnnnnnnnnnnnnnnnnnnnnnnnnnnnnnnnnnnnnnnnnnnnnnnnnnnnnnnnnnnnnnnnnnnnnnnnnnnnnnnnnnnnnnnnnnnnnnnnnnnnnnnnnnnnnnnnnnnnnnnnnnnnnnnnnnnnnnnnnnnnnnnnnnnnnnnnnnnnnnnnnnnnnnnnnnnnnnnnnnnnnnnnnnnnnnnnnnnnnnnnnnnnnnnnnnnnnnnnnnnnnnnnnnnnnnnnnnnnnnnnnnnnnnnnnnnnnnnnnnnnnnnnnnnnnnnnnnnnnnnnnnnnnnnnnnnnnnnnnnnnnnnnnnnnnnnnnnnnnnnnnnnnnnnnnnnnnnnnnnnnnnnnnnnnnnnnnnnnnnnnnnnnnnnnnnnnnnnnnnnnnnnnnnnnnnnnnnnnnnnnnnnnnnnnnnnnnnnnnnnnnnnnnnnnnnnnnnnnnnnnnnnnnnnnnnnnnnnnnnnnnnnnnnnnnnnnnnnnnnnnnnnnnnnnnnnnnnnnnnnnnnnnnnnnnnnnnnnnnnnnnnnnnnnnnnnnnnnnnnnnnnnnnnnnnnnnnnnnnnnnnnnnnnnnnnnnnnnnnnnnnnnnnnnnnnnnnnnnnnnnnnnnnnnnnnnnnnnnnnnnnnnnnnnnnnnnnnnnnnnnnnnnnnnnnnnnnnnnnnnnnnnnnnnnnnnnnnnnnnnnnnnnnnnnnnnnnnnnnnnnnnnnnnnnnnnnnnnnnnnnnnnnnnnnnnnnnnnnnnnnnnnnnnnnnnnnnnnnnnnnnnnnnnnnnnnnnnnnnnnnnnnnnnnnnnnnnnnnnnnnnnnnnnnnnnnnnnnnnnnnnnnnnnnnnnnnnnnnnnnnnnnnnnnnnnnnnnnnnnnnnnnnnnnnnnnnnnnnnnnnnnnnnnnnnnnnnnnnnnnnnnnnnnnnnnnnnnnnnnnnnnnnnnnnnnnnnnnnnnnnnnnnnnnnnnnnnnnnnnnnnnnnnnnnnnnnnnnnnnnnnnnnnnnnnnnnnnnnnnnnnnnnnnnnnnnnnnnnnnnnnnnnnnnnnnnnnnnnnnnnnnnnnnnnnnnnnnnnnnnnnnnnnnnnnnnnnnnnnnnnnnnnnnnnnnnnnnnnnnnnnnnnnnnnnnnnnnnnnnnnnnnnnnnnnnnnnnnnnnnnnnnnnnnnnnnnnnnnnnnnnnnnnnnnnnnnnnnnnnnnnnnnnnnnnnnnnnnnnnnnnnnnnnnnnnnnnnnnnnnnnnnnnnnnnnnnnnnnnnnnnnnnnnnnnnnnnnnnnnnnnnnnnnnnnnnnnnnnnnnnnnnnnnnnnnnnnnnnnnnnnnnnnnnnnnnnnnnnnnnnnnnnnnnnnnnnnnnnnnnnnnnnnnnnnnnnnnnnnnnnnnnnnnnnnnnnnnnnnnnnnnnnnnnnnnnnnnnnnnnnnnnnnnnnnnnnnnnnnnnnnnnnnnnnnnnnnnnnnnnnnnnnnnnnnnnnnnnnnnnnnnnnnnnnnnnnnnnnnnnnnnnnnnnnnnnnnnnnnnnnnnnnnnnnnnnnnnnnnnnnnnnnnnnnnnnnnnnnnnnnnnnnnnnnnnnnnnnnnnnnnnnnnnnnnnnnnnnnnnnnnnnnnnnnnnnnnnnnnnnnnnnnnnnnnnnnnnnnnnnnnnnnnnnnnnnnnnnnnnnnnnnnnnnnnnnnnnnnnnnnnnnnnnnnnnnnnnnnnnnnnnnnnnnnnnnnnnnnnnnnnnnnnnnnnnnnnnnnnnnnnnnnnnnnnnnnnnnnnnnnnnnnnnnnnnnnnnnnnnnnnnnnnnnnnnnnnnnnnnnnnnnnnnnnnnnnnnnnnnnnnnnnnnnnnnnnnnnnnnnnnnnnnnnnnnnnnnnnnnnnnnnnnnnnnnnnnnnnnnnnnnnnnnnnnnnnnnnnnnnnnnnnnnnnnnnnnnnnnnnnnnnnnnnnnnnnnnnnnnnnnnnnnnnnnnnnnnnnnnnnnnnnnnnnnnnnnnnnnnnnnnnnnnnnnnnnnnnnnnnnnnnnnnnnnnnnnnnnnnnnnnnnnnnnnnnnnnnnnnnnnnnnnnnnnnnnnnnnnnnnnnnnnnnnnnnnnnnnnnnnnnnnnnnnnnnnnnnnnnnnnnnnnnnnnnnnnnnnnnnnnnnnnnnnnnnnnnnnnnnnnnnnnnnnnnnnnnnnnnnnnnnnnnnnnnnnnnnnnnnnnnnnnnnnnnnnnnnnnnnnnnnnnnnnnnnnnnnnnnnnnnnnnnnnnnnnnnnnnnnnnnnnnnnnnnnnnnnnnnnnnnnnnnnnnnnnnnnnnnnnnnnnnnnnnnnnnnnnnnnnnnnnnnnnnnnnnnnnnnnnnnnnnnnnnnnnnnnnnnnnnnnnnnnnnnnnnnnnnnnnnnnnnnnnnnnnnnnnnnnnnnnnnnnnnnnnnnnnnnnnnnnnnnnnnnnnnnnnnnnnnnnnnnnnnnnnnnnnnnnnnnnnnnnnnnnnnnnnnnnnnnnnnnnnnnnnnnnnnnnnnnnnnnnnnnnnnnnnnnnnnnnnnnnnnnnnnnnnnnnnnnnnnnnnnnnnnnnnnnnnnnnnnnnnnnnnnnnnnnnnnnnnnnnnnnnnnnnnnnnnnnnnnnnnnnnnnnnnnnnnnnnnnnnnnnnnnnnnnnnnnnnnnnnnnnnnnnnnnnnnnnnnnnnnnnnnnnnnnnnnnnnnnnnnnnnnnnnnnnnnnnnnnnnnnnnnnnnnnnnnnnnnnnnnnnnnnnnnnnnnnnnnnnnnnnnnnnnnnnnnnnnnnnnnnnnnnnnnnnnnnnnnnnnnnnnnnnnnnnnnnnnnnnnnnnnnnnnnnnnnnnnnnnnnnnnnnnnnnnnnnnnnnnnnnnnnnnnnnnnnnnnnnnnnnnnnnnnnnnnnnnnnnnnnnnnnnnnnnnnnnnnnnnnnnnnnnnnnnnnnnnnnnnnnnnnnnnnnnnnnnnnnnnnnnnnnnnnnnnnnnnnnnnnnnnnnnnnnnnnnnnnnnnnnnnnnnnnnnnnnnnnnnnnnnnnnnnnnnnnnnnnnnnnnnnnnnnnnnnnnnnnnnnnnnnnnnnnnnnnnnnnnnnnnnnnnnnnnnnnnnnnnnnnnnnnnnnnnnnnnnnnnnnnnnnnnnnnnnnnnnnnnnnnnnnnnnnnnnnnnnnnnnnnnnnnnnnnnnnnnnnnnnnnnnnnnnnnnnnnnnnnnnnnnnnnnnnnnnnnnnnnnnnnnnnnnnnnnnnnnnnnnnnnnnnnnnnnnnnnnnnnnnnnnnnnnnnnnnnnnnnnnnnnnnnnnnnnnnnnnnnnnnnnnnnnnnnnnnnnnnnnnnnnnnnnnnnnnnnnnnnnnnnnnnnnnnnnnnnnnnnnnnnnnnnnnnnnnnnnnnnnnnnnnnnnnnnnnnnnnnnnnnnnnnnnnnnnnnnnnnnnnnnnnnnnnnnnnnnnnnnnnnnnnnnnnnnnnnnnnnnnnnnnnnnnnnnnnnnnnnnnnnnnnnnnnnnnnnnnnnnnnnnnnnnnnnnnnnnnnnnnnnnnnnnnnnnnnnnnnnnnnnnnnnnnnnnnnnnnnnnnnnnnnnnnnnnnnnnnnnnnnnnnnnnnnnnnnnnnnnnnnnnnnnnnnnnnnnnnnnnnnnnnnnnnnnnnnnnnnnnnnnnnnnnnnnnnnnnnnnnnnnnnnnnnnnnnnnnnnnnnnnnnnnnnnnnnnnnnnnnnnnnnnnnnnnnnnnnnnnnnnnnnnnnnnnnnnnnnnnnnnnnnnnnnnnnnnnnnnnnnnnnnnnnnnnnnnnnnnnnnnnnnnnnnnnnnnnnnnnnnnnnnnnnnnnnnnnnnnnnnnnnnnnnnnnnnnnnnnnnnnnnnnnnnnnnnnnnnnnnnnnnnnnnnnnnnnnnnnnnnnnnnnnnnnnnnnnnnnnnnnnnnnnnnnnnnnnnnnaggtgcggcagcggatcggctactgcccacagtttgatgccttgctggaccacatgactggccgggagatgctggtcatgtacgctcggctccggggcatccctgagcgccacatcggggcctgcgtggagaacactctgcggggcctgctgctggagccacacgccaacaagctggtcaggacgtacannnnnnnnnnnnnnnnnnnnnnnnnnnnnnnnnnnnnnnnnnnnnnnnnnnnnnnnnnnnnnnnnnnnnnnnnnnnnnnnnnnnnnnnnnnnnnnnnnnnnnnnnnnnnnnnnnnnnnccgtggcacgagcccgagagtctggcaaggccatcgtcatcacctcccacagnnnnnnnnnnnnnnnnnnnnnnnnnnnnnnnnnnnnnnnnnnnnnnnnnnnnnnnnnnnnnnnnnnnnnnnnnnnnnnnnnnnnnnnnnnnnnnnnnnnnnnnnnnnnnnnnnnnnnnnnnnnnnnnnnnnnnnnnnnnnnnnnnnnnnnnnnnnnnnnnnnnnnnnnnnnnnnnnnnnnnnnnnnnnnnnnnnnnnnnnnnnnnnnnnnnnnnnnnnnnnnnnnnnnnnnnnnnnnnnnnnnnnnnnnnnnnnnnnnnnnnaaggttttcggtattctggagaaagccaaggaaaagtacagtgtggacgactactctgtgagccagatctcgctggaacacgtcttcctgagcttcgcccacctgcagccgcccactgcagaggaggggcgatg

SEQ ID NO: 27885 - DNA, 669 bp, Macaca Mulatta
  misc_feature (1)...(669): n = A,T,C or G
aggtaaagccttggaaaaggctgggggaaaagagttcttggaaacggtaaaggagcttcgcaaatcccaaggccctttggaagtcgctgaannnnnnnnnnnnnnnnnnnnnnnnnnnnnnnnnnnnnnnnnnnnnnnnnnnnnnnnnnnnnnnnnnnnnnnnnnnnnnnnnnnnnnnnnnnnnnnnnnnnnnnnnnnnnnnnnnnnnnnnnnnnnnnnnnnnnnnnnnnnnnnnnnnnnnnnnnnnnnnnnnnnnnnnnnnnnnnnnnnnnnnnnnncaaacagaccgcggcccaggtgaccctcaaagccannnngcccactttgatgactcgagcgcatcctcgctgaagaacgtgtatttcctgctcttcgacagcgagagcatcggcatatacgtgcaggagatggccaagcnnnnnnnnnnnnnnnnnnnnnnnnnnnnnnnnnnnnnnnnnnnnncacccgagtcccaagagtgggttttgctttttaaaaggagagaggaggggtgacggcgggggagtagagggcggccgggcaggtcctgccggcgcagggagccctttgncnttcacactgtcctccaaaagagcctccattngtaaggaagcaggtctccgcgcggggtttctttccaaagttttcctcctgttgttttagaacttt

SEQ ID NO: 27886 - DNA, 89 bp, Macaca Mulatta
cagggagctccatttaaataacaacctgttacgagttctaccttttgagctgggaaaactgtttcagttgcagactttaggcctgaaag

SEQ ID NO: 27887 - DNA, 678 bp, Macaca Mulatta
aaaaaaaatacacttgacatatttcacatttctgtaccttcatctgtacttccagtaaacatgtggatgatttgatgagggataaatgaacctatttcttttacacacataccaaggacatgcttgtggctaaagtgagttgataatgttgtgcaaaggatagttgtcaccaactcatttctttatggtccataatgaaataaacattttgtatactgttaattctgtaaacagatgcatgttcaaaagatctatgatggtcttgtaatcttaatctaatatattttagatattttaattttttccctcttggggaacacatttagtatagtgtagaaaatacttcattacattttcatataaggttatataacttttcatacataaacatgaaatttgttgtagaaaattctttaaaccaaacatttaaatctaggacttcaatttaatttgtttcttgaatctatttttatgtggcccttaaaaacatatccaaaaaacccattgctaatatagcaataaaaatactttgggtactgacagactctttggagtgtttatattacaaatttgtattcatgttcttttctgtgatgcattgtactaaaatccaaaatggcttttgcaccatttttaagccagtttttctttgatgttggtcccagaattactataatg

SEQ ID NO: 27888 - DNA, 298 bp, Macaca Mulatta
gcactctttcccagtgagtctctggggcaggctgcttcaatcccagcctaactcaactgggcactgtccccctggttgggtgacaattccaatatttctgctttctttgattctccttttatgtgtagttgtctctcttcagactctcagcccagaagaaaattctcccgataaaacaacagctcgatccaaattgggcttctccccaggattcacgcctctccctgggggaagagttgaggaagtgcagaaaaggcgacttcgttagaccgctcttttttctgtacttcctgagttg

SEQ ID NO: 27889 - DNA, 661 bp, Macaca Mulatta
cggcacgaggcatggcggccgcggcgttacttcgaaattgtactccttgctgtttcgcaggacctccaccttcgccctcaccatcgtcgtgggcgtcgtattcttcgagcgcgccttcgatcaaggcgcggacgcgatctacgaccacatcaacgaggggaaactgtggaaacacatcaagcacaagtatgagaagtagtagttccctggaggcccccatcgaggccagaaggaccaggtccacccagcagctgtttgcccagagctggaggctgagcttgaagatgatgctcaagttactcttcatggaccaccgttcgctgttggcaagaaacggctttacttacaaaagactctttaccttctgctgtgtttgaagtatgtttagtcagcatgctcaggaaataaatctgaattgcccttgagacctgcttctgcattggttgctttgttaactctacctgatcttcacttgtcagtaatttgagaccacttcaaagccctctgcaaacaccccaagggcagagtctgctattttgagttttccattaacttccaaagaattccgcttttcaaaacaggagccagagttggagatattacagtcaactttggcttctgagcccagtattccattcttaaataactccactgtcttggg

SEQ ID NO: 27890 - DNA, 690 bp, Macaca Mulatta
tgtctgaccgccaagtcttcgtactcaaggatgtctatgcttccccgtgagcttcccggaggaaacccccaggagttgtcagtacccccgggccactgctaacaagcacctaacaaggggcccagagccccctgctccggccacatctggacccatcagtgactgcctgccatagcctgagagtgtcttggggagaccttgcagagggggagaattgttccttctgctttcccaggggactcttgagcttagaaactcatcgtacactcgaccttgagccttctatttgcctcgtctataacgtgaagtgctagcctcagatgtttgagagctcttagctgtgtacccaggtgtctggtttttggggagtcatccacagagtcactcacccaccgtgtttctggtgccaaggctcttgggggccccactgtcatccctgctttccctaccagggactcagaggaaggcataggagatatttccaggtttccgaccctgggctcacgggttctatttatacgctcaaggcggagtactgtgggtgtgccgggaggggtagccctgttcaaaagcaatttctgccctttgtaaattatttaagaaacctgctttgtcgttgtataagaaaccagcgtgtgactttcctagataacactgctttctcataataaagactgtttgcatttgaca

SEQ ID NO: 27891 - DNA, 2862 bp, Macaca Mulatta
  misc_feature (1)...(2862): n = A,T,C or G
tacatacagtgggtagaagagaattttcctgagaatacataatacttgataactttactagaacatttaatgaaggaatttttagataagaagaaataccacaatgacccaagattcatcaattattgtttaaaatttgnnnnnnnnnnnnnnnnnnnnnnnnnnnnnnnnnnnnnnnnnnnnnnnnnnnnnnnnnnnnnnnnnnnnnnnnnnnnnnnnnnnnnnnnnnnnnnnnnnnnnnnnnnnnnnnnnnnnnnnnnnnnnnnnnnnnnnnnnnnnnnnnnnnnnnnnnnnnnnnnnnnnnnnnnnnnnnnnnnnnnnnnnnnnnnnnnnnnnnnnnnnnnnnnnnnnnnnnnnnnnnnnnnnnnnnnnnnnnnnnnnnnnnnnnnnnnnnnnnnnnnnnnnnnnnnnnnnnnnnnnnnnnnnnnnnnnnnnnnnnnnnnnnnnnnnnnnnnnnnnnnnnnnnnnnnnnnnnnnnnnnnnnnnnnnnnnnnnnnnnnnnnnnnnnnnnnnnnnnnnnnnnnnnnnnnnnnnnnnnnnnnnnnnnnnnnnnnnnnnnnnnnnnnnnnnnnnnnnnnnnnnnnnnnnnnnnnnnnnnnnnnnnnnnnnnnnnnnnnnnnnnnnnnnnnnnnnnnnnnnnnnnnnnnnnnnnnnnnnnnnnnnnnnnnnnnnnnnnnnnnnnnnnnnnnnnnnnnnnnnnnnnnnnnnnnnnnnnnnnnnnnnnnnnnnnnnnnnnnnnnnnnnnnnnnnnnnnnnnnnnnnnnnnnnnnnnnnnnnnnnnnnnnnnnnnnnnnnnnnnnnnnnnnnnnnnnnnnnnnnnnnnnnnnnnnnnnnnnnnnnnnnnnnnnnnnnnnnnnnnaggttaatccagcatgtatggggccaagtgtaggctcccagcaggaactgagagctccatgtcttccagtcacctatcagcagacaccagtgaacatggaaaagaacccaagagaggcacctcctgttgttcctcctttggcaaatgctatttctgcagctttggtgtccccagccaccagccagagcattgctcctcccgttcctttgaaagcccagacagtaacagactccgtgtttgcagtggccagcaaagatgctgnnnnnnnnnnnnnnnnnnnnnnnnnnnnnnnnnnnnnnnnnnnnnnnnnnnnnnnnnnnnnnnnnnnnnnnnnnnnnnnnnnnnnnnnnnnnnnnnnnnnnnnnnnnnnnnnnnnnnnnnnnnnnnnnnnnnnnnnnnnnnnnnnnnnnnnnnnnnnnnnnnnnnnnnnnnnnnnnnnnnnnnnnnnnnnnnnnnnnnnnnnnnnnnnnnnnnnnnnnnnnnnnnnnnnnnnnnnnnnnnnnnnnnnnnnnnnnnnnnnnnnnnnnnnnnnnnnnnnnnnnnnnnnnnnnnnnnnnnnnnnnnnnnnnnnnnnnnnnnnnnnnnnnnnnnnnnnnnnnnnnnnnnnnnnnnnnnnnnnnnnnnnnnnnnnnnnnnnnnnnnnnnnnnnnnnnnnnnnnattaccacagcctaaaaataaacccacaggagccaggacctttggagaacgctctgtcagcagacttccttcaaaaccaaaggnnnnnnnnnnnnnnnnnnnnnnnnnnnnnnnnnnnnnnnnnnnnnnnnnnnnnnnnnnnnnnnnnnnnnnnnnnnnnnnnnnnnnnnnnnnnnnnnnnnnnnnnnnnnnnnnnnnnnnnnnnnnnnnnnnnnnnnnnnnnnnnnnnnnnnnnnnnnnnnnnnnnnnnnnnnnnnnnnnnnnnnnnnnnnnnnnnnnnnnnnnnnnnnnnnnnnnnnnnnnnnnnnnnnnnnnnnnnnnnnnnnnnnnnnnnnnnnnnnnnnnnnnnnnnnnnnnnnnnnnnnnnnnnnnnnnnnnnnnnnnnnnnnnnnnnnnnnnnnnnnnnnnnnnnnnnnnnnnnnnnnnnnnnnnnnnnnnnnnnnnnnnnnnnnnnnnnnnnnnnnnnnnnnnnnnnnnnnnnnnnnnnnnnnnnnnnnnnnnnnnnnnnnnnnnnnnnnnnnnnnnnnnnnnnnnnnnnnnnnnnnnnnnnnnnnnnnnnnnnnnnnnnnnnnnnnnnnnnnnnnnnnnnnnnnnnnnnnnnnnnnnnnnnnnnnnnnnnnnnnnnnnnnnnnnnnnnnnnnnnnnnnnnnnnnnnnnnnnnnnnnnnnnnnnnnnnnnnnnnnnnnnnnnnnnnnnnnnnnnnnnnnnnnnnnnnnnnnnnnnnnnnnnnnnnnnnnnnnnnnnnnnnnnnnnnnnnnnnnnnnnnnnnnnnnnnnnnnnnnnnnnnnnnnnnnnnnnnnnnnnnnnnnnnnnnnnnnnnnnnnnnnnnnnnnnnnnnnnnnnnnnnnnnnnnnnnnnnnnnnnnnnnnnnnnnnnnnnnnnnnnnnnnnnnnnnnnnnnnnnnnnnnnnnnnnnnnnnnnnnnnnnnnnnnnnnnnnnnnnnnnnnnnnnnnnnnnnnnnnnnnnnnnnnnnnnnnnnnnnnnnnnnnnnnnnnnnnnnnnnnnnnnnnnnnnnnnnnnnnnnnnnnnnnnnnnnnnnnnnnnnnnnnnnnnnnnnnnnnnnnnnnnnnnnnnnnnnnnnnnnnnnnnnnnnnnnnnnnnnnnnnnnnnnnnnnnnnnnnnnnnnnnnnnnnnnnnnnnnnnnnnnnnnnnnnnnnnnnnnnnnnnnnnnnnnnnnnnnnnnnnnatgatgaagatgatttatctgctggcttggcactgattgacctgggtcagagtatagatatgaaactttttccaaaaggaactatattcacagcaaagtgtgaaacatctggttttcagtgtgttgagatgctcagcaacaaaccatggaactaccag

SEQ ID NO: 27892 - DNA, 1273 bp, Macaca Mulatta
  misc_feature (1)...(1273): n = A,T,C or G
atatttgtatttgacttgcgttttggaatttatctacacttaaaatgccaccagcagttggaggtccagttggatacacccccccagatggaggctggggctgggcagtggtaattggagctttcatttccatcggcttctcttatgcatttcccaaatctattactgtcttcttcaaagagattgaaagtatattccatgccaccaccagcgaagtgtcatggatatcctccataatgttggctgtcatgtatggtggaggtnnnnnnnnnnnnnnnnnnnnnnnnnnnnnnnnnnnnnnnnnnnnnnnnnnnnnnnnnnnnnnnnnnnnnnnnnnnnnnnnnnnnnnnnnnnnnnnnnnnnnnnnnnnnnnnnnnnnnnnnnnnnnnnnnnnnnnnnnnnnnnnnnnnnnnnnnnnnnnnnnnnnnnnnnnnnnnnnnnnnnnnnnnnnnnnnnnnnnnnnnnnnnnnnnnnnnnnnnnnncggactggccatggcaggcagccctgtgttcctctgtactctggcccccctcaatcaggttttctttggtatctttggatggagaggaagctttctaattcttggaggcttgctactaaactgctgtgtcgctggagccctcatgcgaccaatcgggcccaaaccaaccaaggcagggaaagataagtctaaagcatcccttcagaaagctggaaaatctggtgtaaaaaaaggtcggcatgatgcaaatacggatcttattggaagacaccctaaacgggagaaacgatcagtcttccaaacaattaatcagttcctggacttaaccttattcacccacagaggctttttgctgtacctctctggaaatgtgatcatgttttttggactctttgcacctttagtgtttcttagtagttatgggaagagtcagcattattctagtgagaagtctgccttccttctttccattctggcttttgttgacatggtagccagaccatctatgggacttgtagccaacacaaagccaataagacctcgaattcagtatttctttgcggcttctattgttgcaaatggagtgtgtcatatgctagcacctttatccactacctatgttggattctgtgtctatgcgggattctttggatttgcctttgggtggctcagctccgtattgtttgaaacactgatggaccttgttggaccccagaggttctccagcgctgtgggattggtgaccattgtggaatgctgtcctgtcctcctggggccaccacttttaggt

SEQ ID NO: 27893 - DNA, 612 bp, Macaca Mulatta
  misc_feature (1)...(612): n = A,T,C or G
taatcaaagcaaagaagctttcattgactgggcaagatatgatgattcacgggatcacttttgtgaacttgatgnnnnnnnnnnnnnnnnnnnnnnnnnnnnnnnnnnnnnnnnnnnnnnnnnnnnnnnnnnnnnnnnnnnnnnnnnnnnnnnnnnnnnnnnnnnnnnnnnnnnnnnnnnnnnnnnnnnnnnnnnnnnnnnnnnnnnnnnnnnnnnnnnnnnnnnnnnnnnnnnnnnnnnnnnnnnnnnnnnnnnnnnnnnnnnnnnaggtttgtgtctggagaaaagagtcttctataagctcttatcaggacttcatgctagcatcaatttacatctatgcgcaaattatcttttggaanagaaacctggggtaagcccagttggggacctaatattaaagaattcaaacgccgctttgaccctgtggaaaccaagggagaaggtccgagaaggctcaagaatctttactttttatacttgattgagcttcgagctttgtcaaaggtggctccatattttgagcgctcaattgtcgatctttacactggaaatgcagaagaagatgctgacacaaaaactcttctactgaatatctttcaagatacaaag

SEQ ID NO: 27894 - DNA, 106 bp, Macaca Mulatta
tgttttctcactgttcttcatgaggtcacgggtctttgtggggttttcttattagacatcccaggcctcctggtattccatggaatatgaaaagagactggcacct

SEQ ID NO: 27895 - DNA, 662 bp, Macaca Mulatta
  misc_feature (1)...(662): n = A,T,C or G
gcacaggtagagctggcagtgcagggaagaggagacaccggtctgcaacaacagcttctaataccagcccttagggcactcacccctgtgctcaagcaatcattgtcaatgacaaagtgactattgaaggtataattgtattaaattaatgctaataatttggnnnnnnnnnnnnnnnnnnggctgctcgggtaactttagcccttaaccaagcatacgtggtttttttgnnnnnnnnnnnnnnnnnnnnnnnnnnnnnnnnnnnnnnnnnnnnnngggtacagctgtaaaatatttggatataggaaatgttgtgttatcttgcagccttgatattcacgggtggattgtaaaatataaatttttgtgagatttcaaagattaagattattttgataacattatttacagatttaaaagatgtggttactcacaagtctcgagggggaaactactgcataaaataactaacttggaataaatattttgcatcagtttggattgtcttgtgtaagaagtatattttctttaaaattaaatgagtggattcttttttaggggaaatatttttagaagtcggcgggaaatgtgattcggacacaactgttctctttttagcagatacttttttgatgcagaaaaacctgtgcaaataaattacc

SEQ ID NO: 27896 - DNA, 660 bp, Macaca Mulatta
taacacttagcaagtgttgttatacctggaaaataattgctatgccgtacattcagaatgccccctccccgacaaggccttgccatgatgaacaagtaacttgttagtcttacagataattcatgcattaacagtttaagatttagaccatggtaatggtagttcttattctctaaggttatatcatatgtaatttaaaagtatttaagacaagtctcctgtatacctctgaactgttttgattttgatttcatcatgatagatctgctgtttccttaaaaaaggcatttgttgtgtgagttaatgcaaagtagccaagtccagctatatagcagcttcagaaacatacgtgaccaaaaaattcccagtaactaggcatgatcaatttatagtggtcgtttacatctaacaattatcaggacttttttcgggagtgggttataaaaacattcaagttggtctgacagtattttgttaagaatatttgtttgtatgtttattcagtatacttacataaaaattatttcgccatcagccaaaactcagtaatcatgacagctatcttttgttgttttatgaagtttatttctcaagaaaatgggaataaatttggggtttgttcaccttttttactaaagatgcctaaagccacaggtgtta

SEQ ID NO: 27897 - DNA, 169 bp, Macaca Mulatta
ggcttaatagataattctggactgaggttattttataccatggatataaggaaatatgatgctggggtaattgaggctggcctctgggtgagcctcttccataccatccctccagggatgcctgagttccagtctgagggtcactgtactctggagtgcctagaagagg

SEQ ID NO: 27898 - DNA, 330 bp, Macaca Mulatta
gagttgtatgcccaggcaaacaagggctgagcggcgttcgcatggctgtttcatgaccgcttgtttttctccttttggtgtaatgttttacaaatcctttggcctgagaactaatatgttaattgccttaaataaattaatagaagtctagtccgttaaaaagggatgtgtttcctgcactcccccggggctgtggggattaacaggacacactggcagaagacaggaacaagagtccttccctgctggcctggcctctcctcaggctctcgggagatgcactgatttttatcgtgtctcgggtcctcccctgagatctccctacccaga

SEQ ID NO: 27899 - DNA, 625 bp, Macaca Mulatta
gggaaaatcccagatcaggacctagaagtcttgggtcccagtccctatactcctgttgactcatttggagattctagatggctgcttgccttcctgggcactcatggtgaaaagacaggcaagaagtggggatgatgcttgggggacaagatacttgacccagggtatccccagcctggtccaataccaggtggggcttttcctgtccactcccagcctcccactgtcccaccgcctcccgcctctctcctctttccccagaacatccagagtctgtcccctgtgaagaagaagaagatggtgcctggggctctgggggtccccgctgacctggcccctgttgacgtcgagttctcctttcccaagttctcccgcctgcgccgaagcctcaaagctgaggctgccaagggtcctctcccggctgcccctgcccgccggcgcctccagctgcctcggctgcgtgtacgagaagtggccgaagaggctcaggcagcccggctggccgctgctgctcctccccccaggaaggccaaggtggaggccgaggtggctgcagggactggtttcacagcccctcaggtggagctggttgggccccggctgccaggggccgaggtgggtgtcc

SEQ ID NO: 27900 - DNA, 420 bp, Macaca Mulatta
  misc_feature (1)...(420): n = A,T,C or G
ttgctgaagtttcatcctttgctctctttctgtaagtcatggaaaagtttgaaacattctgtcttcggtagagctcaggccgacagtagttcattcgccagtgcacttttcttaatagctaagnnnnnnnnnnnnnnnnnnnnnnnnnnnnnnnnnnnnnnnnnnnnnnnnnnnnnnnnnnnnnnnnnnnnnnnnnnnnnnnnnnnnnnnnnnnnnnnnnnnnnnnnnnnnnnnnnnnnnnnnnnnnnnnnnnnnnnnnnnnnnnnnnnnnnnnnnnnnnnnnnnnnnnnnnnnnnnnnnnnnnnnnnnnnnnnnnnngcaggaatgggccacttacgtgtaacaaaagatggactgcgcttggaaggggaatcagaatttttattcccattgtatgccaaagaaatacactccagagtg

SEQ ID NO: 27901 - DNA, 958 bp, Macaca Mulatta
  misc_feature (1)...(958): n = A,T,C or G
aggtccggcccggagcagccatgtcccacggccccaagcagcccggcacggccgccgcnnnnnnnnnnnnnnnnnnnnnnnnnnnnnnnnnnnnnnnnnnnnnnnnnnnnnnnnnnnnnnnnnnnnnnnnnnnnnnnnnnnnnnnnnnnnnnnnnnnnnnnnnnnnnnnnnnnnnnnnnnnnnnnnnnnnnnnnnnnnnnnnnnnnnnnnnnnnnnnnnnnnnnnnnnnnnnnnnnnnnnnnnnnnnnnnnnnnnnnnnnnnnnnnnnnnnnnnnnnnnnnnnnnnnnnnnnnnnnnnnnnnnnnnnnnnnnnnnnnnnnnnnnnnnnnnnnnnnnnnnnnnnnnnnnnnnnnnnnnnnnnnnnnnnnnnnnnnnnnnnnnnnnnnnnnnnnnnnnnnnnnnnnnnnnnnnnnnnnnnnnnnnnnnnnnnnnnnnnnnnnnnnnnnnnnnnnnnnnnnnnnnnnnnnnnnnnnnnnnnnnnnnnnnnnnnnnnnnnnnnnnnnnnnnnnnnnnnnnnnnnnnnnnnnnnnnnnnnnagggtggggactgcgatggcttctccaccttcgatgttcccatcttcactgaagagttcttggaccaaaacaaannnnnnnnnnnnnnnnnnnnnnnnnnnnnnnnnnnnnnnnnnnnnnnnnnnnnnnnnnnnnnnnnnnnnnnnnnnnnnnnnnnnnnnnnnnnnnnnnnnnnnnnnnnnnnnnnnnnnnnnnnnnnnnnnnnnnnnnnnnnnnnnnnnnnnnnnnnnnnnnnnnnnnnnnnnnnnnnnnnnnnnnnnnnnnnnnnnnnnnnnnnnnnnnnnnnnnngcacgggcgaaacgcccacgctgggaactctggacttctacatggcccggctgcacggagctatcgagcgcgaccctgcgcagcacgagaagctcatcgtccgcatcaaggaaatcctggcccaggtcgccag

SEQ ID NO: 27902 - DNA, 703 bp, Macaca Mulatta
aaagagattgttattagaataacaaattgtattctttttcttctgcctgaatggaaggctaaagttgatgctggacattgtgaagttcattgatgcaaacatttcccaacttgaaaaacctaaactgtgtacattttagagaagattacaatggaataaaccttaggtctgaaaatgtggtcttatgtctcttaatttctatttcttctgcatttctgtttttagagttctctccatttggtgggtgtcccccagccagaagggcaatgccgaattgaatataaacaaagaatatgacatctgttgggcctcacaagggccagggccttctgcgggagtggcaccaccccacctggcagcacctagacctaagctctacaaaaaaacactgcttcactttgttttgggacttagttcaagaacacattcaaatggcgcatgtctttggtatcttcaacagtagaccaagaatctaacatcgctctcagtaatatagagaccggaatacatggtttagaggaaatgatcaaatgatccaaaaaaaaccccacatttttaaagaagttggaatctgatttcatgcataactgtattaaaacattaaatagatataatgtcatttgaatgaaaatcttatcacattaaattcactgtgaaggtagcatacttaaatctctattttgaaaagactataaggcttaga

SEQ ID NO: 27903 - DNA, 360 bp, Macaca Mulatta
ggtgctgtgggcgcctgtactgtctctgtcacacaaccatggtacctagaagtggactacactcacgaggccgtcaccataaagtgtaccttctccgcaaccggatgcccttctgagcaaccaacacgcctgtggtttcgctacgggactcaacagcctgagaacctgtgcttggacgggtgcaaaagcgaggcagacaagttcacagtgagggaagccttcatggaaaaccaagtttccctcactgtaaacagagtgactgcaaatgacagtgcaatttacatctgtggaatagcattccccagtgtgccggaagcgagagctaagcagacgggaggagggaccacactggtggtaaga

SEQ ID NO: 27904 - DNA, 168 bp, Macaca Mulatta
gtgccctaaagtacatgccccacgcagtcctcaaactcctggagaacatgcctatgccttgggagcagattcgggatgtgcctgtgctgtaccacatcactggagcaatttccttcgtcaatgagattccctgggttattgaacctgtctacatctccctagtggggg

SEQ ID NO: 27905 - DNA, 2274 bp, Macaca Mulatta
  misc_feature (1)...(2274): n = A,T,C or G
tcttggtgaccaacttccttgtgacgcccgtccaagttcagggcagatgcccagagnnnnnnnnnnnnnnnnnnnnnnnnnnnnnnnnnnnnnnnnnnnnnnnnnnnnnnnnnnnnnnnnnnnnnnnnnnnnnnnnnnnnnnnnnnnnnnnnnnnnnnnnnnnnnnnnnnnnnnnnnnnnnnnnnnnnnnnnnnnnnnnnnnnnnnnnnnnnnnnnnnnnnnnnnnnnnnnnnnnnnnnnnnnnnnnnnnnnnnnnnnnnnnnnnnnnnnnnnnnnnnnnnnnnnnnnnnnnnnnnnnnnnnnnnnnnnnnnnnnnnnnnnnnnnnnnnnnnnnnnnnnnnnnnnnnnnnnnnnnnnnnnnnnnnnnnnnnnnnnnnnnnnnnnnnnnnnnnnnnnnnnnnnnnnnnnnnnnnnnnnnnnnnnnnnnnnnnnnnnnnnnnnnnnnnnnnnnnnnnnnnnnnnnnnnnnnnnnnnnnnnnnnnnnnnnnnnnnnnnnnnnnnnnnnnnnnnnnnnnnnnnnnnnnnnnnnnnnnnnnnnnnnnnnnnnnnnnnnnnnnnnnnnnnnnnnnnnnnnnnnnnnnnnnnnnnnnnnnnnnnnnnnnnnnnnnnnnnnnnnnnnnnnnnnnnnnnnnnnnnnnnnnnnnnnnnnnnnnnnnnnnnnnnnnnnnnnnnnnnnnnnnnnnnnnnnnnnnnnnnnnnnnnnnnnnnnnnnnnnnnnnnnnnnnnnnnnnnnnnnnnnnnnnnnnnnnnnnnnnnnnnnnnnnnnnnnnnnnnnnnnnnnnnnnnnnnnnnnnnnnnnnnnnnnnnnnnnnnnnnnnnnnnnnnnnnnnnnnnnnnnnnnnnnnnnnnnnnnnnnnnnnnnnnnnnnnnnnnnnnnnnnnnnnnnnnnnnntcagcacctgcacccacggtcactgctgctgggagtcagacacagacaccaggatggccctgtccaagttctgacacccacttgccagcccattcctgaagcccgtagccattccctgctggttgagagttgggggttgcggagggtggggccctgcttggggatctcannnnnnnnnnnnnnnnnnnaggattaggggtagaattccacccttgaaccccagcagacagtctctcccctgactcctgccttagcaggatgctgcctcggggaaccacagaagtcnnnnnnnnnnnnnnnnnnnnnnnnnnnnnnnnnnnnnnnnnnnnnnnnnnnnnnnnnnnnnnnnnnnnnnnnnnnnnnnnnnnnnnnnnnnnnnnnnnnnnnnnnnnnnnnnnnnnnnnnnnnnnnnnnnnnnnnnnnnnnnnnnnnnnnnnnnnnnnnnnnnnnnnnnnnnnnnnnnnnnnnnnnnnnnnnnnnnnnnnnnnnnnnnnnnnnnnnnnnnnnnnnnnnnnnnnnnnnnnnnnnnnnnnnnnnnnnnnnnnnnnnnnnnnnnnnnnnnnnnnnnnnnnnnnnnnnnnnnnnnnnnnnnnnnnnnnnnnnnnnnnnnnnnnnnnnnnnnnnnnnnnnnnnnnnnnnnnnnnnnnnnnnnnnnnnnnnnnnnnnnnnnnnnnnnnnnnnnnnnnnnnnnnnnnnnnnnnnnnnnnnnnnnnnnnnnnnnnnnnnnnnnnnnnnnnnnnnnnnnnnnnnnnnnnnnnnnnnnnnnnnnnnnnnnnnnnnnnnnnnnnnnnnnnnnnnnnnnnnnnnnnnnnnnnnnnnnnnnnnnnnnnnnnnnnnnnnnnnnnnnnnnnnnnnnnnnnnnnnnnnnnnnnnnnnnnnnnnnnnnnnnnnnnnnnnnnnnnnnnnnnnnnnnnnnnnnnnnnnnnnnnnnnnnnnnnnnnnnnnnnnnnnnnnnnnnnnnnnnnnnnnnnnnnnnnnnnnnnnagtcatacttaggaagctctctgagcgcagctgcttgagggaggccctgtctctgatcccaggctgggtggagtggctggaaggaatggttccaaacaccaccaccgagatctccctcaggctggctgggttttgcagctggaattctcctcttggtcccagggcagggcagggaattctaattgtccaacccagggaggcaaggggctgctttccattgtgggtacctggtgatgagggcatgctgtggagggccaggggtggggctgaggctgggctgacatctggaatcatctgccacctggagcctcagtaaaatgcctggggtccctgctgcctctcagtccccagagccatgtcccttgggagctaggctctgaagggctagggtgggagag

SEQ ID NO: 27906 - DNA, 687 bp, Macaca Mulatta
  misc_feature (1)...(687): n = A,T,C or G
gggtcagcataggaagtcatttaggatgtcagtatataatgcacagaattgtgggttgtttgaaagccaaacaggaaaattaggagcctcctggattgacatttcaatgatccttccaaccagtttatggattattatgaataatagtatagtgtgttcttgttcagaagttatatttgataatagaggagggagttttatgaaagcttctttgnnnnnnnnnnnnnnnnnnnnnnnnnnnaaatcagattatatcaacaatggagtttggaattttgtatggcctataatgttttaagttccagaatgaaaaggtccgtaacaatctgaatagatgtggacacatatagcagagagaactatgtacattatcttgcagaacgaaatagaagggtcctaaatcacattaactcaaacattgtagactagctttgtgtttattcttcaggtccttgtgccttatttggttttgtatattcaacgaactgaaatatttggaattcctatttctacatatttggtagtccataagactttgtcaaatggtaacctaccgtttgatgtgctttaaaatacctagtccagaaggatgattctctttaatccgtttaatgttctgaaattaaaatcttttggagccaataagtggccatatatatctctggagtccttactgtattcggagaa

SEQ ID NO: 27907 - DNA, 516 bp, Macaca Mulatta
  misc_feature (1)...(516): n = A,T,C or G
aggccctggtgcggttcatgtactccctgagtaagggctaccgcaagatcacctaccacaactggcggcacggtttcaacgtgggacagaccatgttctccctgctggtnnnnnnnnnnnnnnnnnnnnnnnnnnnnnnnnnnnnnnnnnnnnnnnnnnnnnnnnnnnnnnnnnnnnnnnnnnnnnnnnnnnnnnnnnnnnnnnnnnnnnnnnnnnnnnnnnnnnnnnnnnnnnnnnnnnnnnnnnnnnnnnnnnnnnnnnnnnnnnnnnnnnnnnnnnnnnnnnnnnnnnnnnnnnnnnnnnnnnnnnnnnnnnnnnnnnnnnnnnnnnnnnnnnnnnnnnnnnnnnnnnnnnnnnnnnnnnnnnnnnnnnnnnnnnnnnnnnnnnnnnnnnnnnnnnnnnnnnnnngaagaggacgatgttccaaaagatcgtggatcagtctaagacatacgagagtgaacaggagtggacacagtacatgatgctggagcagacacggaaggaaatcgttat

SEQ ID NO: 27908 - DNA, 212 bp, Macaca Mulatta
gcaacctcctcgaacgcgggagcggaccccaataccactaacctgcgccccacaacgtacgatacctggtgcggcgtggcccatggatgcaccagaaaactggggctcaagatctgcggcttcttgcagaggaccaacagcctggaagagaagagtcgccttgtgagtgccttcaaggagaggcagtcctccaagaacctgctttcctgtga

SEQ ID NO: 27909 - DNA, 2072 bp, Macaca Mulatta
  misc_feature (1)...(2072): n = A,T,C or G
gaagcaagaagaaattggggcaccatgnggggaaagcccgcaggcctccgccagggcaccacaggcattgtgagggatgcttcaaccgccactgccacattcctgcggaacccaacgtctcctgcctggtgatannnnnnnnnnnnnnnnnnnnnnnnnnnnnnnnnnnnnnnnnnnnnnnnnnnnnnnnnnnnnnnnnnnnnnnnnnnnnnnnnnnnnnnnnnnnnnnnnnnnnnnnnnnnnnnnnnnnnnnnnnnnnnnnnnnnnnnnnnnnnnnnnnnnnnnnnnnnnnnnnnnnnnnnnnnnnnnnnnnnnnnnnnnnnnnnnnnnnnnnnnnnnnnnnnnnnnnnnnnnnnnnnnnnnnnnnnnnnnnnnnnnnnnnnnnnnnnnnnnnnnnnnnnnnnnnnnnnnnnnnnnnnnnnnnnnnnnnnnnnnnnnnnnnnnnnnnnnnnnnnnnnnnnnnnnnnnnnnnnnnnnnnnnnnnnnnnnnnnnnnnnnnnnnnnnnnnnnnnnnnnnnnnnnnnnnnnnnnnnnnnnnnnnnnnnnnnnnnnnnnnnnnnnnnnnnnnnnnnnnnnnnnnnnnnnnnnnnnnnnnnnnnnnnnnnnnnnnnnnnnnnnnnnnnnnnnnnnnnnnnnnnnnnnnnnnnnnnnnnnnnnnnnnnnnnnnnnnnnnnnnnnnnnnnnnnnnnnnnnnnnnnnnnnnnnnnnnnnnnnnnnnnnnnnnnnnnnnnnnnnnnnnnnnnnnnnnnnnnnnnnnnnnnnnnnnnnnnnnnnnnnnnnnnnnnnnataacatggtagaaggagagggcgctcccgaaaagaaagaaccacaggaaaatcagaagcagcagaacgttcacacagctgtggaaaccacagggcttgccccttggcaggatggtgttctggaaagactgaaaacagctgtggatgcaaaggactataacatgtatctagtgcacaatgggcggatgctgatccactttggtcagatgcctgcttgtacacccaaggagagagactttgtttatggcaagcttgaggctcaggaagttaagactgtttataccttcaaagttcctgtgagctactgtggaaagcgagctcgacttggagatgccatgttgagttgtaagccgagtgaacacaaggcagtggatacttcagatctggggatcactgtggaggacctgcccaaatcagatctcatcaagaccaccctccagtgtgctttggaaagagaactcaaaggccacgtcatctctgaatccagaagcattgatggactgttcatggattttgccacacaaacatacaactttgagccagaacagttttcctctgggacagtgctggctgacctaaccgctgccaccccagggggactccatgtggagctgcacagtgagtgtgtcaccaggagacacaacaaaagcagttctgccttcactttcacttgcaacaaattcttcaggagggatgagttccccctgcacttcaagaatgtccacacagacattcagtcatgtctcaacggctggttccagcatcgatgccccctcgcctacttgggatgtacatttgttcaaaacnnnnnnnnnnnnnnnnnnnnnnnnnnnnnnnnnnnnnnnnnnnnnnnnnnnnnnnnnnnnnnnnnnnnnnnnnnnnnnnnnnnnnnnnnnnnnnnnnnnnnnnnnnnnnnnnnnnnnnnnnnnnnnnnnnnnnnnnnnnnnnnnnnnnnnnnnnnnnnnnnnnnnnnnnnnnnnnnnnnnnnnnnnnnnnnnnnnnnnnnnnnnnnnnnnnnnnnnnnnnnnnnnnnnnnnnnnnnnnnnnnnnnnnnnnnnnnnnnnnnnnnnnnnnnnnnnnnnnnnnnnnnnnnnnnnnnnnnnnnnnnnnnnnnnnnnnnnnnnnnnnnnnnnnnnnnnnnnnnnnnnnagatctggcagttcagcagcctcttctccaaaatcaagagctgggagtttaatgaagtcacctccatgtccgagcacctgaagtcctgtcctttcaacatcgtagagcacaaaactgacccgattcttttgactag

SEQ ID NO: 27910 - DNA, 825 bp, Macaca Mulatta
  misc_feature (1)...(825): n = A,T,C or G
atggcccggagaaggcatttcccggggntgaaggaagcccccatggggttgaattacaggcatttacgggctcttaaagtccattaaccatacggcattttgcctgatttnttctgtattacaaatacaggagaaattccagggtgagaaatgaaggctcaatgtgtccttttttttaatgtttcctttgctaatgaatgtaaagcctccagttttgctttcggtagcggccactgatttacccataccggttnttctgttttccaagttaatggaatggtttaggaggcgctacagtggccgcccctaaaaaggataccctattccttttctttcttgatttntcttagtctcaattgggactttaatgccattttcattttttcctaacccctttcctggtatatatcccatcttagtcatgattttttgacttgtggggctgtataatggagcgggcataatgatttccgcaccccattgctgtaataaatctcgaccccatagattaacaggaattgaagtaatcattggctgaacagtactttcttgattatctggtcctaagcaatgtaaaatcattgtactttcgtacacttctgaagctgtgcctacgccgacaagtcttgtaacagccttttgtttaggccaattttttggccattgatttaaagcaatgacagagatatctgctccagtgtctaccaacccttcaaactgttttccttgaataatggccttatacacaggtctgctctcagagaccagatttgcccaatatgcagcctttcctgccggatcagtgcttccgaaccctcctgttcc

SEQ ID NO: 27911 - DNA, 1159 bp, Macaca Mulatta
  misc_feature (1)...(1159): n = A,T,C or G
gctacttggaaggctgaagtgggaggattattgagccctggaggtggaggctggagtgaacagagatcgcaccactgaactccggtctgggcagagtagatcgagaccctgcctgaaaataaatcaataaataaactcaacctaaatgggtgtgaatatatgtaaattgaataccagaagttttgagaaacatcctttgtaaatttcatcctacgaattgggtcattcatgtcctgcccagctaaaacagaggccaggggccagggaggaaaagcaatcaggccacacgccattgctcccgaaatggacttctgtgcaagcctgactcctgaaactgtgcattgtaccctgaaaccagctttatccatagcttctgcgataaatggctgtaagtcttggactccttgctccaaaagcagcaactcagcaatggaacctcccagctcccaacccttcctagtgcccacgggctttcccaaagggcaagagaacatttctcctcctataattgccatctctttgttctcccgacatggtgaacaccacccggactgcgtgtgtgtcccaaattacaattctttctttgctaatgaaatatgaaatttagaggctcttctccacactttaaatttgacttgacattttcaaggcagatgtaagttattagagaatgagactctataaaaatgaccccttcatgccgtggcctccatagaagatgccccgggccaggtgtccacacggcgggcatttattttctcgaagatctggaggctgcaggtccaaagttcgagggttgggtgagagttgttttctctgaggtcaattctcctggctggcagggagtctcccagccgtgtcctctgtggcttttcctctatgcacctgcacctctggggtctctctgcctccaaatatcaaatatcnnnnnnnnnnnnnnnnnnnnnnnnnnnnnnntttgctcttgttgtnnnnnnnnnnnnnnnnnnnnacnnnnnnnnnnnnnnnnnnnnnnnnnnnnnngannnnnnnnnnnnnntctgcttcagcctcccaagtacctgggactaaaggcatgcgtcaccacacctgattaatttcgtagttttagtagagaagggatctcaccatgttggccatgcttgctctcgaactcctg

SEQ ID NO: 27912 - DNA, 288 bp, Macaca Mulatta
gtgcactccccttcatgccactccagatgttatttggatgtggttggggacgagagcagacacaatggaatggagttggagaacatgtaagtcccgatctgaatgtcttttgtgatgtgtgtataggattgccctgtaccgacacctcctttcttgggattataccagccatcttcctgagagttttggagccctctaggattttattctagtgcccaaacctaaagaaagaccttaatacgttaaaacagcatttgcttggagaaggtgtcattgaattcgggtatg

SEQ ID NO: 27913 - DNA, 790 bp, Macaca Mulatta
  misc_feature (1)...(790): n = A,T,C or G
gggatgattttacatgctggttacctgttccattgttgtcaaatgcccactctccatcagatgtgttcctctattttcttgtccacaaagtactcctcacttttcaatttgtcacgttactaaatggtgttacattaaagccctgtgttaagtgtctgcttttgactgaatttcttgatagtaaccttcaatgtgtgtgtgttactatgttcaagtgggttgatcttcctttaattggccactatgtgaaagttcactaatatgcagaaactattatggacagtgaaataatgattttgtctcaccacatgagtttgatgcagtcttttatgtttagccctttcctcttcctgcccacatgattgcagtgcaggagtttctgttgcataatagtgtggacagcagctcagaaaaggagtgaatgctactggtaatttgtagataatattctttaagacttgggggaaccattgaacttcgaaatgtttattagaaaattctttgttcagaatcagactccatattttacgtatacttaaatacttcaaggatattgttgaaagcccagtttttttatgtgctattagatttttaggttacatactgaagaaaagtatgtacacagaatgtagtgctcccagttactatttttttctattaatgaaaatagttttagtcctggtgtaaaaagttctatgtttttgaatgnnnnnnnnnnnnnnnnnnnnnngggactggcatttatgggcacctttttgccctttggttgggccccaacctttcctccatt

SEQ ID NO: 27914 - DNA, 1675 bp, Macaca Mulatta
  misc_feature (1)...(1675): n = A,T,C or G
aggtaaagtgttgagagaggagaaccagcgcattgctcctgtggtttccagccgcgtgagtccaaggacaggaccaacagctatggggtccttcagctcacacatgacagagtttccacgaaaacgcaaagcaagtgattcagacccatcccannnnnnnnnnnnnnnnnnnnnnnnnnnnnnnnnnnnnnnnnnnnnnnnnnnnnnnnnnnnnnnnnnnnnnnnnnnnnnnnnnnnnnnnnnnnnnnnnnnnnnnnnnnnnnnnnnnnnnnnnnnnnnnnnnnnnnnnnnnnnnnnnnnnnnnnnnnnnnnnnnnnnnnnnnnnnnnnnnnnnnnnnnnnnnnnnnnnnnnnnnnnnnnnnnnnnnnnnnnnnnnnnnnnnnnnnnnnnnnnnnnnnnnnnnnnnnnnnnnnnnnnnnnnnnnnnnnnnnnnnnnnnnnnnnnnnnnnnnnnnnnnnnnnnnnnnnnnnnnnnnnnnnnnnaggctagtttgactggacaaagcttatttgacttcttgcatccaaaagatgttgccaaagtaaaggaacaactttcttcttttgatatttcaccaagagaaaagctaatagatgccaaaanctggtttgcaagttcacagtaatttccatactggaaggacacatgtttattctggctcaagacgatcttttttctgtcggataaagagttgtaaaatctctgttcaagaagagcatgaatgcttnnnnnnnnnnnnnnnnnnagagcatagaaaattctatactatccactgcactggttacttgagaagctggcctccaaatattgttggaatggaagaagaaaggaacagtaagaaagacaacagtaattttacctgccttgtggccattggaagattacagccatatattattccacagaacagtggagagattcatgtgaaaccgactgaatttataacccggtttgcaatgaatggaaaatttgtctatgtagatcaaaggnagggcaacagcaattttaggatatctgcctcaggaacttttgggaacttcttgttatgaatattttcatcaagatgaccatagtaatttgactgacaagcacaaagcagnagttctacagagtaaggagaaaatacttacagattcctacaaattcagagcaaaagatggctctttcgtaactttaaaaagcccatggatttagtttcacaaatccttggacgaaagacttggaatatattgtatctgtcaacactttagttttgnnnnnnnnnnnnnnnnnnnnnnnnnnnnnnnnnnnnnnnnnnnnnnnnnnnnnnnnagaatcctctcgacagtcttgtatgagtgtacctggaatgtctgctggaacagtacttggtgctggtagtattggaacagatattgcaaatgaaattctggatttacagaggtnnnnnnnnnnnnnnnnnnnnnnnnnnnnnnnnnnnnnnnnnnnnnnnnnnnnnnnnnnnnnnnnnnnnnnnnnnnnnnnnnnnnnnnnnnnnnnnnnnnnnnnnnnnnnngtgatggtgcacagttgggatttcgataccctgtgtgacaatgatgaacacagcctatggctgcatttatgaatttcttagaagcagaggggggcctgggagaccctggggacttcagtgacatccaggggaccctctagc

SEQ ID NO: 27915 - DNA, 725 bp, Macaca Mulatta
  misc_feature (1)...(725): n = A,T,C or G
tttggaattggtgtatatcatngaagccttgctgaactaagttttgtgtgtatatatttaaaaggagaaatcagtgtttaaaaaaagacctatgtacttaatcctttaactctgcggatagcatttggtaggtagtgattaactgtgaataataaacatacaatgaatnnnnnnnnnnnnnnnnnnnnnnnnnnnnnnnnnnnnnnnnnnnnnnnnnnnnnnnnnnnnnnnnnnnnnnnnnnnnnnnnnnnnnnnnnnnnnnnnnnnnnnnnnnnnnnnnnnnnnnnnnnnnnnnnnnnnnnnnnnnnnnnnnnnnnnnnnnnnnnnnnnnnnnnnnnnnnnnnnnnnnnnnnnnnnnnnnnnnnnnnnnnnnnnnnnnnnnnnnnnnnnnnnnnnnnnnnnnnnnnnnnnnnnnnnnnnnnnnnnnnnnnnnnnnnnnnnnnnnnnnnnnnnnnnnnnnnnnnnnnnnnnnnnnnnnnnnnnnnnnnnnnnnnnnnnnnnnnnnnnnnnnnnnnnnnnnnnnnnnnnnnnnnnnnnnnnnnnnnnnnnnnnnnnnnnnnnnnnnnnnnnnnnnnnnnnnnnnnnnnnnnnnnnnnnnnnnnnnnnnnnnnnnnnnnnnnnnnnnnnnnnnnnnnnnnnnnnnnnnnnnnnnnnnnnnnnnnnnnnnnnnnnnnnnnnnnnnnnnnnnnnnnnnnnnnnnnnnnnnnnnnnnnnnnnnnnnnnnn

SEQ ID NO: 27916 - DNA, 109 bp, Macaca Mulatta
gatccgaggaatgggcatgaactccccggagctgctcctgctggtggaaaactgtcccaagggggcagagacactggtcacacgatgtctgcacagcctcacagacaaa

SEQ ID NO: 27917 - DNA, 238 bp, Macaca Mulatta
  misc_feature (1)...(238): n = A,T,C or G
cagccaacatcctggctgtctccggtggagacaataaggtgaccctgtggaaggagtcggttgacgggcagtgggtgtgcatcagtgatgtcaacaagggccagggctccgtgtcagcgtcagtcacagagggccagcagaacgagcagtgacaagacaggtggggcctggctccctacccgccagcgccaggactgcccctntctgggccaactgaacaaacaactgggaaagagcc

SEQ ID NO: 27918 - DNA, 439 bp, Macaca Mulatta
  misc_feature (1)...(439): n = A,T,C or G
atgcctggaatgatgtcgtcagtaatgcctggaatgatgatgtctcatatgtctcaggcttccatgcagcctgccttaccnnnnnnnnnnnnnnnnnnnnnnnnnnnnnnnnnnnnnnnnnnnnnnnnnnnnnnnnnnnnnnnnnnnnnnnnnnnnnnnnnnnnnnnnnnnnnnnnnnnnnnnnnnnnnnnnnnnnnnnnnnnnnnnnnnnnnnnnnnnnnnnnnnnnnnnnnnnnnnnnnnnnnnnnnnnnnnnnnnngtgaccatataacatttaaactactcccgtagcctcagtttgcttatctcctttacaatttatagcaagctcggggaactgagaccactaaaagtttcgctaagaatctttgagtcacaggcttgaggattatacatagcagncagccaggattatatagtatggatgtagcagcaggta

SEQ ID NO: 27919 - DNA, 1146 bp, Macaca Mulatta
agaaagttctggatcccagggtctaccacagagaacatgcaggcagcacagtgccatggggcccctctcagtgcctccctgcacactgcacatcacctggaaggagctcctgctcacagcatcacttttaatcttctggaacccgcccaccactgcccaagtcacgatcgaagcacagccagccaaagtttctgaggggaaggatgttctgctacttgtccacaatttgccccagaatgttgctggctatagctggtacaaagggcaaataattggacctccaccattacattacatcatatgtaatagacactgaaatcattatatttgggcctgcatacagtggacgagagacagtatattccaatgcatccctgctgatccagaatgtcacccagaaggacacaggatcctacaccattcaaatcacaaagcgaggtgatgggactaaaagagtaactggacatttcactttatacctggagactcccaagccctccatcaacagcagcaacttaaaccccagggagggcacggagactgtgatcttatcctgtgatcctgacactcaggacgtaagctacttgtggtggataaatggacagagcctccctatcagtcgcaagttgcagctgtccgaaaacaacaggaccctcgttctatctggtgtcagaaaggatactgcaggaccctatgaatgtgaaatgaagaacccagtgagctccagccgcagtgacccagtcaccttgaatctcctctctcgttcaggaataggacgtccatcctggcattaatccgatatagcagccgtgatgtcatttctgtattttgggaagactggcagatatatggaaaagactctgacaacaactcttgaatataagtttctgataacttcaagatcatacccctggactctctgagaactttcaaacttttaatgaacagtctgataccttcatgaaattcaagacaaagaagaaaaaaaccgtaacttttattggactaaataatcaaaataataacgttttcataactttttatttgagaatgtgctgattctttgaatgttttattctccagattcgtgaactttctcttttaagctatttatactttatagcaacttggttaaatatacttttg

SEQ ID NO: 27920 - DNA, 692 bp, Macaca Mulatta
  misc_feature (1)...(692): n = A,T,C or G
ttctccttcccattatccccaggaggaagtctaagcccttggcctgggacttgaggcccctcattagtgccctgcccacttgccccaccccccggggctgccatgtgtccctccctgggcactgcaggtcactacggctcctgcccccagagccctcaaggctgctcttattcctgttaatatttcttattattgtgctgctcccatgtggcttggagatggccagggcggggagcaggtggagctggggcaggactgggtgggtcctcggaggaggctactgggcttatgcccctgcctgtacccccctccctggccaggtgcacctgatgaagccagacgcggtccccaaggcatgctgcgcgcccaccaagctaagcgccacctctgtgctctactatgacagcagcaacaacgtcatcctgcgcaagcaccgcaacatggtggtcaaggcctgcggctgccactgagcccacccgcctgcccggccctgctgcagccgcccttctcatccggatcgggccccgcagaggcagaaaacccttaaatgctgtcacagctcaagcaggagtgtcaggggccctcactctctgtgcctacttcctgtcangctgcttctggtcctttctatgtccctctgtgcccctccctggggtttgtggctgtcaccctgtccaacactttggtggcct

SEQ ID NO: 27921 - DNA, 2036 bp, Macaca Mulatta
  misc_feature (1)...(2036): n = A,T,C or G
acactggaaaacctgctggcctctgtccggaagggcaatgccattgacgaagcggacatcccgccgccagtggccataggaaaaggcccggcatccacgcctagctgcagccctgcacccacccagccggcccctggaatcgcgtcagccccggagcccagggtcaccctggagggacgttctcacactgccccagcctcatctccaggcttggctaagccccagatgcccccnncaggtccctgcagccctggccctctggcccagttgcagagccgccagcgtgagtacaagctggctgccctccacgccaagcagcagggagataccgctgctgccgccagacacttccgcgtggcnnnnnnnnnnnnnnnnnnnnnnnnnnnnnnnnnnnnnnnnnnnnnnnnnnnnnnnnnnnnnnnnnnnnngacgtggagggcgccaagatgcatctgcgccaggccaagggactggagcctatgctggaggcctcgcgcaatgggctgcctgtggacatcaccaaggtgnnnnnnnnnnnnnnnnnnnnnnnnnnnnnnnnnnnnnnnnnnnnnnnnnnnnnnnnnnnnnnnnnnnnnnnnnnnnnnnnnnnnnnnnnnnnnnnnnnnnnnnnnnnnnnnnnnnnnnnnnnnnnnnnnnnnnnnnnnnnnnnnnnnnnnnnnnnnnnnnnnnnnnnnnnnnnnnnnnnnnnnnnnnnnnnnnnnnnnnnnnnnnnnnnnnnnnnnnnnnnnnnnnnnnnnnnnnnnnnnnnnnnnnnnnnnnnnnnnnnnnnnnnnnnnnnnnnnnnnnnnnnnnnnnnnnnnnnnnnnnnnnnnnnnnnnnnnnnnnnnnnnnnnnnnnnnnnnnnnnnnnnnnnnnnnnnnnnnnnnnnnnnnnnnnnnnnnnnnnnnnnnnnnnnnnnnnnnnnnnnnnnnnnnnnnnnnnnnnnnnnnnnnnnnnnnnnnnnnnnnnnnnnnnnnnnnnnnnnnnnnnnnnnnnnnnnnnnnnnnnnnnnnnnnnnnnnnnnnnnnnnnnnnnnnnnnnnnnnnnnnnnnnnnnnnnnnnnnnnnnnnnnnnnnnnnnnnnnnnnnnnnnnnnnnnnnnnnnnnnnnnnnnnnnnnnnnnnnnnnnnnnnnnnnnnnnnnnnnnnnnnnnnnnnnnnnnnnnnnnnnnnnnnnnnnnnnnnnnnnnnnnnnnnnnnnnnnnnnnnnnnnnnnnnnnnnnnnnnnnnnnnnnnnnnnnnnnnnnnnnnnnnnnnnnnnnnnnnnnnnnnnnnnnnnnnnnnnnnnnnnnnnnnnnnnnnnnnnnnnnnnnnnnnnnnnnnnnnnnnnnnnnnnnnnttgctgggcccaaagggaaggcgcctcctgtgcctgtccctgcaagggagtcaggtaacagnnnnnnnnnnnnnnnnnnnnnnnnnnnnnnnnnnnnnnnnnnnnnnnnnnnnnnnnnnnnnnnnnnnnnnnnnnnnnnnnnnnnnnnnnnnnnnnnnnnnnnnnnnnnnnnnnnnnnnnnnnnnnnnnnnnnnnnnnnnnnnnnnnnnnnnnnnnnnnnnnnnnnnnnnnnnnnnnnnnnnnnnnnnnnngaatacgcagcccagctggagcggcagctgcagttctacacggaggctgcccggcgcctgggcaatgacggcagcaggnnnnnnnnnnnnnnnnnnnnnnnnnnnnnnnnnnnnnnnnnnnnnagctgcagcggctccgcaggtgaggagcccgtggggcgggcagcccccagaaagtgggcagcaggccccaacgccgggaagagctgacacagccacggaccagacaagcagacaatcagcggacaatcggttctggactcgcccctcgtccgggcctccagcccagccagagcctctgtggctgtgggtgtggggaacgatccctgccagccagtgtattcccctcacccaggcctgggtgggccccagagagtcatgtttgcacagcccaggggagtccggcctctggcccaccccggagcagggagggaggctgggaccaagc

SEQ ID NO: 27922 - DNA, 227 bp, Macaca Mulatta
  misc_feature (1)...(227): n = A,T,C or G
tacagaggaaaatcccaagagagaagattattttggaatcacaaatcttgttgaacatccagcccagctcaatcctccanncagttgacaatgacacaccagttactctgggagtatatcttaccaagaaggaacagaaaaaacttcggagacaaacaaggagggaagcacagaaggaactacaagaaaaagtcaggctgggcctgatgcctcctccagaacccaaa

SEQ ID NO: 27923 - DNA, 733 bp, Macaca Mulatta
  misc_feature (1)...(733): n = A,T,C or G
acaacgctccnngccggcgctgctgtcgcgacccggactgcgcgccagcacccccctgccaacagctccgccactatggaggatatgaacgagtacagcaacgtagaagaattcgcagagggatccaagataaacgcgagcaagaatcagcaggatgacggtaaaatgtttattggaggcttgagctgggatacaagcaaaaaagatctgacagagtatttgtctcgatttggggaagttgtagactgcacaagttaaaacagatccagtcactgggagatcaagaggatttggatttgtgcttttcaaagatgctgctagtgttgataaggttttggaactgaaagaacacaaactggatggcaaattgatagatcccaaaagggccaaagctttaaaagggaaagaaccccccaaaaaggtttttgtgggtggattgagcccggatacttctgaagaacaaattaaagaatattttggagcctttggagagattgaaaatattgaacttcccatggatacaaaaacaaatgagagaagaggattttgttttatcacatacaccgatgaagagccagtaaaaaaattgttagaaagcagataccatcaaattggttctgggaagtgtgaaatcaaagttgcacaacccaaagaggtatataggcagcaacagcaacaacaaaaaggtggaagaggtgctgcggctggtggccgaggtggtacgaggggtcgt

SEQ ID NO: 27924 - DNA, 1101 bp, Macaca Mulatta
  misc_feature (1)...(1101): n = A,T,C or G
cctgaggtcaggagtttgagaccagcctgtctctactaacaatataaaaattacctggaagtcgcagtgggcgcctgtaatcccagctactcgggaggctgacgcaggagaattgcttgaaccgaggagacagagattgcagtgagccaagatcgcaccactgcactctagcctcggcgacacagcaagactgcctcaaaaacaacaacaaaaagcaggacgtgagacttctacctgctcactcagaatcatttctgcaccaaccatggccacctttgtggagctcagtaccaaagccaagatgcccattgtgggcctgggcacttggaagnagtctcctctcggcaaagtgaaagaagcggtgaaggtggccattgatgcaggatatcgccacattgactgtgcctacgtctatcagaatgaacatgaggtgggggaagccatccaagagaagatccaagagcaggctgtgaagcgggaggacctgttcatcgtcagcaagttgtggcccactttctttgagagaccgcttctgaggaaagcctttgagaagaccctcaaggacttgaagctgagctatctggatgtctatcttattcactggcggcagggattcaagnnnnnnnnnnnnnnnnnnnnnnnnnnnnnnnnnnnnnnnnnnnnnnnnnnnnnnnnnnnnnnnnnnnnnnnnnnnnnggccatcgatgagctggtggatgaggggctggtgaaagcccttggcactctccaatttcaaccacttccagattgagaggctcttgaacaaacctggactgaaatataaaccagtgactaaccaggtncaggttgagtgtcacccgtacctcacgcaggagaaactgatccagtactgccactccaagggcatcaccgttacggcctacagccccctgggctctccggatagaccttggnnnnnnnnnnnnnnnnnnnnnnnnnnnnnnnnnnnnnnnnnnnnnnnnnnnnnnnnnnnnnnnnnnnnnnnnnnnnnncaggttctaatacgtttccatatccagaggaatgtgattgtgatccccaagtctgtgacaccggcacgcattgttgagaacattcagg

SEQ ID NO: 27925 - DNA, 217 bp, Macaca Mulatta
atggcttcagattctgtgaatactaaacaagctaggaatcacattacaaaggggaaaaggcaacaacagcaccagcaaataaagaacaggtcctcaattagtgatggtgatggagaagattcctttatttttgaagcaaatgaagcttggaaagattttcatggttctcttcttcgattttatgaaaatggagaactctgcgatgtcacactcaagg

SEQ ID NO: 27926 - DNA, 119 bp, Macaca Mulatta
ggtgggcacttcctctgtggtgtacccagccgccatgtttgccccccaggtggctgccaggggcgtgccagtggcagaatttaatacggagaccaccccagctacgaacagattcaggt

SEQ ID NO: 27927 - DNA, 1539 bp, Macaca Mulatta
  misc_feature (1)...(1539): n = A,T,C or G
nggcagcctgagccgggcagggcccctgcctctgctacggcagccccccatcatgcagcccccgctggacctcaagcagatcctgcccttcccactcgagccggcccctacccttggcctcttcagcaactacagcannnnnnnnnnnnnnnnnnnnnnnnnnnnnnnnnnnnnnnnnnnnnnnnnnnnnnnnnnnnnnnnnnnnnnnnnnnnnnnnnnnnnnnnnnnnnnnnnnnnnnnnnnnnnnnnnnnnnnnnnnnnnnnnnnnnnnnnnnnnnnnnnnnnnnnnnnnnnnnnnnnnnnnnnnnnnnnnnnnnnnnnnnnnnnnnnnnnnnnnnnnnnnnnnnnnnnnnnnnnnnnnnnnnnnnnnnnnnnnnnnnnnnnnnnnnnnnnnnnnnnnnnnnnnnnnagtttccatggagaatggactggggccagccccatggatccccagagaaacagcctggctccccatcccctcccagcattccagagactggtcagggtgtaaccaagggtgaaggggggactccagccccagcttccttgcctggcggtagcaaggaagaggaagagaaagccaagcggctgctctaccgtgctctgtgcaaggtggctgtgaactccctgtcccagcttgaggcacataacacaggtannnnnnnnnnnnnnnnnnnnnnnnnnnnnnnnnnnnnnnnnnnnnnnnnnnnnnnnnnnnnnnnnnnncctcccaccccgggggaaccagaggatcctgcccaggaccgaactctccactgtgagatatgcaatgtcaaggtcaacttggaggtnnnnnnnnnnnnnnnnnnnnnnnnnnnnnnnnnnnnnnnnnnnnnnnnnnnnnnnnnnnnnnnnnnnnnnnnnnnnnnnnnnnnnnnnnnnnnnnnnnnnnnnnnnnnggcacgctgactttctccaaggagctgcccaagttcctggagggcggccttctccccagccccctggcggtggctgcagtgatggcagcggcagcaggctcgccgctgtccctgcgcccggctccagccgcacctcttctccagggaccgccgatcactcaccctctgcttcacccggcccccggacccatccgaactgcgcacggacccatcctcttctccccctactgacctcaaccctgaacccctcccattcaactccccacctccagccgggacccaggcctccgggctcccagcccgcctctcctcccggcactccctaaatgatctctccttcccccccccaccccgagatacggggttccaggaannnnnnnnnnnnnnnnnnnnnnnnnnnnnnnnnnnnnnnnnnacaccccagatctcagggaaccccgccccctgcctttccctctcccctagaaaagggggggccgtctcacccccgagcccccttggagacaccccccctcccaaaagccatgtccatccagcccttcccccccaaacctagcacaaaacggggttcacaagccatggtgggggtccggggggacagaaatggattttcttggca

SEQ ID NO: 27928 - DNA, 810 bp, Macaca Mulatta
  misc_feature (1)...(810): n = A,T,C or G
cgcgccaaacgccagcgccgcctcacccgctcggtggccgcatgaatcggcgcgacccgccacgcaactagagggccagcagaagccagacccttacactcaggacccgcaccgccgagcggaggatgacccccgcgacggaccgacgcccctcctgccgcggcccacacacgcgtgncatctcgttacgggaagagaagaggagggaaaggccggaccgcggcgggatgcctgggcggccccgtgcccaggggggcctacctgtgccaggctcaagggccctcctgccatcccgcgggccgaccgtcatcttgcgccgcacagatcgaacagcccgccggagtgggctaggctatcgcgacgcccaggcgggcgacgaactggcagcatccgtcagtccagggaaatccttgtctcgtccgctgcgaagagccgaggtgggagcggtcagaggggcatccacaatgcaaccacgaagtgattttntccttctttctcccgttatccttggtctgtaacaggaatgccccttactcagtagcaggcggaccgggccatgggtcaagacaccctgcttcatggggaaaccttgtttgtcgttcccaccactgattcggaccacataacccttccattcttcacccagagcgtcagcagcaacttctgtggccatacgcttctcataaaaagtacgaagtttgcgttcatcgtccacttcaatgagtttctggcagccagtggctgggaaggagatgttcagcttcatctcgaagcagctgaacgcctccgaggcgccacggaaaagagccc

SEQ ID NO: 27929 - DNA, 170 bp, Macaca Mulatta
ggtcaaggtaatatggtcattattccagcatgagccaattagtttactatttctgtgggcatagactgcaccctagattgctatgtggtaaatgtgctcttgtgaccacaggtgaaccatagaaaacatagatatagtataattagaaattcatcagtgcttctggaaat

SEQ ID NO: 27930 - DNA, 312 bp, Macaca Mulatta
cctcaataataacacaaaatgaaaatctgtttctgtcataggtaaataatagtagtggaaggagatagaaaatgcaaataattttttgataaacaccacccaagttaccatctccttgctaagtgaatattaaattctgaagggtggactctaatccttaactctacaatctgaaagaaatataagctaaattagtatttttgaaagacatactgggcaagatgcattcatttcttattcaatgccggtttacatattagttagaaattgggacaggactcaacaggagaaagaaataaccaatcactctga

SEQ ID NO: 27931 - DNA, 875 bp, Macaca Mulatta
  misc_feature (1)...(875): n = A,T,C or G
aggtactgcttaggatgaacatgatttggagaaattccatttcctgtctaaggctaggaaaggtgccacacagataccaaagtggttaccacccagtggcccctctgggatcaaggattttaactgacccagccaaagtttttgaacacaacatgtggnnnnnnnnnnnnnnnnnnnnnnnnnnnnnnnnnnnnnnnnnnnnnnnnnnnnnnnnnnnnnnnnnnnnnnnnnnnnnnnnnnnnnnnnnnnnnnnnnnnnnnnnnnnnnnnnnnnnnnnnnnnnnnnnnnnnnnnnnnnnnnnnnnnnnnnnnnnnnnnnnnnnnnnnnnnnnnnnnnnnnnnnnnnnnnnnnnnnnnnnnnnnnnnnnnnnnnnnnnnnnnnnnnnnnnnnnnnnnnnnnnnnnnnnnnnnnnnnnnnnnnnnnnnnnnnnnnnnnnnnnnnnnnnnnnnnnnnnnnnnnnnnnnnnnnnnnnnnnnnnnnnnnnnnnnnnnnnnnnnnnnnnnnnnnnnnnnnnnnnnnnnnnnnnnnnnnnnnnnnnnnnnnnnnnnnnnnnnnnnnnnnnnnnnnnnnnnnnnnnnnnnnnnnnnnnnnnnnnnnnnnnnnnnnnnnnnnnnnnnnnnnnnnnnnnnnnnnnnnnnnnnnnnnnnnnnnnnnnnnnnnnnnnnnnnnnnnnnnnnnnnnnnnnnnnnnnnnnnnnnnnnnnnnnnnnnnnnnnnnnnnnnnnnnnnnnnnagtcacactcgtcctacagagcagcccagtgttttgcctttgttcatgatgtatgtgatgatggcttaccttacccttttccagatgggatcctggatgtcattctccttgtctttgtgctctcttctattcatcctgacagg

SEQ ID NO: 27932 - DNA, 722 bp, Macaca Mulatta
  misc_feature (1)...(722): n = A,T,C or G
caggcacaggtgaggaactcaactcaaactcctctctttgggaaaacgcggtgcttgctcctcccggagtggccttggcagggtgttggagccctcggtctgcccggtctggtctctggggccaaggctgggtttccctcatgtatggcaagagcgctactcgtgcggtgcttcttctccttggcatacagctcacannnnnnnnnnnnnnnnnnnnnnnnnnnnnnnnnnnnnnnnnnnnnnnnnnnnnnnnnnnnnnnnnnnnnnnnnnnnnnnnnnnnnnnnnnnnnnnnnnnnnnnnnnnnnnnnnnnnnnnnnnnnnnnnnnnnnnnnnnnnnnnnnnnnnnnnnnnnnnnnnnnnnnnnnnnnnnnnnnnnnnnnnnnnnnnnnnnnnnnnnnnnnnnnnnnnnnnnnnnnnnnnnnnnnnnnnnnnnnnnnnnnnnnnnnnnnnnnnnnnnnnnnnnnnnnnnnnnnnnnnnnnnnnnnnnnnnnnnnnnnnnnnnnnnnnnnnnnnnnnnnnnnnnnnnnnnnnnnnnnnnnnnnnnnnnnnnnnnnnnnnnnnnnnnnnnnnnnnnnnnnnnnnnnnnnnnnnnnnnnnnnnnnnnnnnnnnnnnnnnnnnnctgtgcactgatgatcatcattgtaattgtagtagtcctcttccagcattaccggaaaacctttgggctgaaagagctcataaagtggtggagataaaatc

SEQ ID NO: 27933 - DNA, 924 bp, Macaca Mulatta
aatagatatgtaagtcacaccgttgagcacattttctctttcccaattacaggtacttgaattactttgccaccaaatccagcccaactggcgtaatcctggatctttgggaagcacagaacttcccagatggaaacctgagcatgctggcagctgtcttggaagaaatgggaagacatgaaacagtggtgtccttagcagcagaagggcagtattaaccaccatcctggaaggggaaatgaaggacgaaaatgcacagggagtctgtggccgtccaggggaatcacagcggaggaggaaatccagacgagaccaatgcacttcacaggcaagactgcagcaggagccagaaggaaaacagatacaactgccaatgtacatgcccactttactcggacatcatcacgggagttaagaaaaattgtgtaaatttgtaccttgaatttagctatcaacctaattttcctcttagttgggctgtatgctgtgtggtacaggatcttacagtttcctaggaaacgctttttattgctatccagatatatggataaactttcttaacaaacccaatttctacaaatgttgtttacatcaaattggacagggatgcagacactgtccatggctcgttctatttttgttcaaatcatttgaagttgaagctgtggacggtttgttgtgtctatttcagattagtaatttacagagaaatcagacttttgctacaaatcgtgtgcatcaagtgtctcagataatcctcccatcagtgttctgtttctagaacttgtagaaccagtgttattgtttgtatcagggaagtggagaatctaagtgtaaaaaagaaataactaagactcctattccttggagggaccttctggtgccctttgggaataaactgtagcattgcaggggagacagtga

SEQ ID NO: 27934 - DNA, 862 bp, Macaca Mulatta
accttttctctcagcttgtgatcttagcacatgggggcccttgctgttgacctgtttatccagttgttaaagatggggtggtgaatactgtgtctgtccttctctcccctgcagtgcgactggctcaacaattaccacctgacctgcagggacgtgattgggaaggaattgcagaaacagggccgccaggaagctctcgagtggcttatcagagagacgcaacccatctccaaacagcattaatacctccctggttttgtttttacaaaatggtctggggaaaggaagaaatgtggcagatccctgacatctttcccctttcctctccttcttccctacctcccctttttactttagactttaagaagaatagaaaatcttcttatcctctttgatattttattgcaaacactgagtcttttatgattttttaattgttgagaacgagccaagaataaaattgctgcaccagaaggagggcccctccaaagtcgaacacttgatgaaagggagttgccctgacttctctggccagtgatggggaaacaatgagtgctccatgatggtcatgttccaggtgctagtacatcattcatgatcaccttaatgctcatgagactatatttatgatcagtgaataaaaatgtcaaaactgtgctttgtcttagctgtctctttcttcatggtgctgtcccccagcatgtcaggtgagctgatctccagggctgctggttctgtggcagacatttcctaggtggtagggcccctttgagaggagacccctggctttgctgcacatttgggggcttatctgtaagctttttcttttctctagaaaacctaatatggtatttttatctca

SEQ ID NO: 27935 - DNA, 639 bp, Macaca Mulatta
actagagactgagaagttgcctcgcaaacgagcaggggccccagttggtgggagtcctgggctggcaaagcggggccgcctacagcccccaagtcccctggggcctgagggttcagtagaggagtctgaggctgaagcctcaggtgaggaggaggaaggggatgggaccccacgccgacgtcctggcccccgccggcttgttgggaccaccaaccaaggggaccagcgcatcctgcgcagcagcgcccctccctccctggctggccctgctgttagtcacagaggccgcaaggccaagacgtgagtgggctgcccctccacctaggctttccaccgtggccactccctccatgaccaggcctgactctgttaaccactacttgaagtcttgagggggaaagcctccagggagacataggggccttctcccttcttcccaccaaagtagggggtaggcaactggttgtcatggaaatggggatcatcacagtccccttccccttcaccccacgtggctgggcagtgttaagggtggcaagatagtctctgtccccacccccttgtacttgattccccagctgtctttcacacagccccccacccttaggggaagggggaggggcttctctacaatgaggt

SEQ ID NO: 27936 - DNA, 341 bp, Macaca Mulatta
  misc_feature (1)...(341): n = A,T,C or G
aaataactttggctgtcatcctgactctcctgggacttgccatcctggctattttgttaacaagatgggcacgacataagcaaagtggnnnnnnnnnnnnnnnnnnnnnnnnnnnnnnnnaggtgctagacttctggactatgaggatggtagagnnnnnnagaatagcaaaactgggactcaggtctttaacctcaagactgtttgtaccacacctggggaggaggaggagggaatgggattatctatctccatgccttctgaaagtctaaatctannnnnnnnnnnnnnnnnnnttattataggtagatataaaatgtttaaaaacaattgaagaacct

SEQ ID NO: 27937 - DNA, 804 bp, Macaca Mulatta
  misc_feature (1)...(804): n = A,T,C or G
gggagccgccagttgagaaagactctgatccggctcagctttccaatcagctgcggaaggagccacgctttctggtttgcaacatggcggccaccagtggaactgatgaacaggtttccggggagttggtgtctgtggcacatgcgctttctctcccagcagagtcgtatggcaacgatcctgatattgagatggcttgggccatgagagcaatgcaacatgctgaagtctattacaagctgatttcatcagttgacccacagttcctgaaactcaccaaagtagatgaccaaatttactctgagttccggaaaaattttgagacccttaggatagatgtattggacccagaagaactcaagtcagaatcagccaaagagaagtggaggccattccgcttgaagtttaatgggaatgttgaagacttcaactatggtactttgctgcgactagattgttctcagggctatacttgaggaaaacaccatctttgccccccaggatacaattctttgccattggaaatttgctcggaaaccgggaaggctataaaaaaagctgttttatatcaattggttcagggacaaagaaaggaaaagaaagggattccaccaatgnnnnnnnnnnnnnnnnnnctgaacaatgggagaagaaagaaaaaccccccaagaaatttaaggaaaagaaaagggacctgaatagtnnnnnnnnnnnnnnnnnnnnnnnnnggaacccaaccggnnnnnnnnnnnnnnnnnnnggtccaaagggagggagcgataaattttcaatagcaaagctttg

SEQ ID NO: 27938 - DNA, 883 bp, Macaca Mulatta
ggtgtctcgttctactccaatccagtggctcccagggcatgatctccagtccgtaagccagggaaacccagaaaacaaccgtagcttctttggttggttttcaaaccacagctccattgagtctgacaagattgtggagataatcaacgaagaattgtggcccaatcccctgcagttctaccttttgagtgaaggggctcgtgtagagaaaggaaaggaaaaagaaggcaggcaaggtccaggaaagcagccagtggagactactcagcctggggtgagccagtccaactgatcctgcacaagtctccctgctacctcctgctgggctgttcctggttgactacatatttggcgctctgccttctcttcatgttggtctctgtgtactatagaccctttggactttagttacaagaatatggcgtttatgatcatgttcttttgcctcccatagcctcttgcttttctacgttagtgtcacatgttatgtgatcgcacctggactgttcatatgttaagcacacgtactttagatgtgtgctgccttttatctacattgcctggaccttgttcttggctctggcctttcctacttgtctttaacatggacactcatgagtcatcctccaggaccaccagtgcatcctcaagctctgctccttcagggccggtgacttgctgggcttcgtgttcatgctggccgtgcatgtcatctatgcaagcgtttccattgccactgcagaatgaagccagtgcacatggtattagtcatcacctagaacttactgttctgtgggtctggggtcaccagctaagatgtcacctactttatttctggctttggcctgtggtccgtgagacccatcctgcttgatgttctgca

SEQ ID NO: 27939 - DNA, 551 bp, Macaca Mulatta
  misc_feature (1)...(551): n = A,T,C or G
cctcctcttcctcctgccggtctgagggcggcagtctccaactcaagaccctggggctccgggtcttctcagcagccgccgcagcagccgcggcgacgtcactgtcctcgcggcctggcacacagcgctcaggccgccgaatgcccgtggacgcgcatctcttcccagagttcctgcttcctgggccagccaaagccgcagnnnnnnnnnnnnnnnnnnnnnnnnnnnnnnnnnnnnnnnnnnnnnnnnnnnnnnnnnnnnnnnnnnnnnnnnnnnnnnnnnnnnnnnnnnnnnnnnnnnnnnnnnnnnnnnnnnnnnnnnnnnnnnnnnnnnnnnnnnnnnnnnnnnnnnnnnnnnnnnnnnnnnnnnnnnnnnnnnnnnnnnnnnnnnnnnnnnnnnnnnnnnnnnnnnnnnnnaggggagctcccaaggggctctgctgcttggccaggccccagaatctttgtctctgcctcgtactccagtgaccttggagcagcaaaaagtttctccttctggagatccccacaggccccctgccctgcccagca

SEQ ID NO: 27940 - DNA, 149 bp, Macaca Mulatta
gtcttaaacactgaatatcacactcttcttatgattcttgctagcaattcaaggacataaatcttcattcttttgtggcacagactacttaaatgggtctgttttcactttgctcatttctcttcaataaatctttttggcaagcaact

SEQ ID NO: 27941 - DNA, 72 bp, Macaca Mulatta
gtcgtccatccgtgcaaaccgaggaaccactggtggctacttcctggccgggaggtccatgagctggtggcc

SEQ ID NO: 27942 - DNA, 524 bp, Macaca Mulatta
caggcccaggggcgggtaaaaggcctccgggagcgcggggcccggacccagcctctgcaggtgcgggtacaccaggcccagctccgcggggccgtagcggatggtgccgggcgtgcacaggcctcgcactaccggtggaaggaagcccgcgtgcaggagggcgggcggggggtccccgggaggcgccaggccccatggccgcaccggatcctgcttcaggacccctgcccggatgacagaggtgaactcgggccgcggggtggccgggtggccggagggatcctcatcgccactgtcctctgagcctttggtttccctcgggctgggctccactttgatgcgtttgccctgggtctgggggacctcgttctccgcaggggcagcctgcttcccttcagtcggaggctctagctctggaagaggaagatggtcagggcctgtgtgtgtccccagccctcagtcttcctgtctttggaatggagctgtgctcaacgggacagacctgtagttctcagctgggagtg

SEQ ID NO: 27943 - DNA, 365 bp, Macaca Mulatta
gtccctggggctccccctacccagtcagcccccttccttgctgccaggtgcccagccctgctgtgctgctctcccagggaccatgagtgcccctacatgtccgcaccacctcggatggaggatactctttcaagtatgaaacagtgcccaaccttctcacgcaacactgtgcttgtatctaaggggtctaaggggggtgggtcttccttcctaatcccatggctggtggctaagcccccaccatcatcagctgggaggaaaggcagagttgggaaatagatggcttccactcctccctcctttcacttctctgcctatgggttaccctccccatcccacttctgtctcaataaagaacacagtgc

SEQ ID NO: 27944 - DNA, 333 bp, Macaca Mulatta
tctttttaggttacctgcgtgtagtaacatgtgcttttcttctaaccttccagcccaagatgacagcatattaaagtgagtgaccccgtgaccctctctctggagcagcagcggatgaataaagcttcctgtgatgtgtgatactctggctccttctcatttgctgtcactggttgtcaaactcctaggttgaagttctgtccatctcccagttcacatgaggtggaagacagggagggggtttcaaaagtattaatccacgtgaccattcacagacccagaatgcatcatacaaacacagcgaggacagacgcgcgctgcctgttctgtctg

SEQ ID NO: 27945 - DNA, 781 bp, Macaca Mulatta
  misc_feature (1)...(781): n = A,T,C or G
cagcaacatgtagttaacatagtgttacttccttctgttttctgtccacagcctttaagtcagcttagtgcttttacatttcgatgtgacttttgttaaaatctactcctagatcaagacctatgtaatggacaagcaatgggccaccaggaactcttaatatcagcacagcagttcattttagtttggtcgtgtatttgcctattcaagttctcatttgaacttcaccattgtgcattgtagggaggacatattcttaagttgcctattaaagaaggtgagctgaagaagctgaatctttttactttagtccaactttgctattgtttcacaatttgaaacccaaaagtcaaaacttaagttgttgggaaagggtggaatgaaagttcacaaacaaacaataaatatgctcaaactgagaaaaataattaagtataagaactcatgggtaccattaaagttctgctaagaggaaacgttatactaaataggaaaaagaaagagaaatgaaagatctttattaaacccaaggaatttttaaaaagaaaagaaattaaactcaagaattatgtttgtgtgcatatcaatgcacaagaatacacacaaatgccagctagaaaaagagctacaagttaaatccaagttgtaaataagtaattgttttatttttaaggcaggcattctttaataaatagataacataactggtatgttataaaacnttggatgttgagataaataaaatatatatacatagtttaataatgggaaaatagagata

SEQ ID NO: 27946 - DNA, 712 bp, Macaca Mulatta
tggacacaccgcagagcaggaagtggagacaccttgaggccgcggagtgggctcgtggcacagctggaacaggagcccctcttgctgctctcccagctcctggctccttcctagcgcccccttgtcatgcatcaggatgccctggggatggtggggaggcgccagggatgggctgaggtttgagggagattctgcccccttccccaggcgttgctggaattcctcaggaaggtggtggcccgggaacagcacaacaagatgactctgtggaatgtttccaccgtgatggcccctaacctctttctgcaccatgggcggccccccaaactccccaaaggcaaggagaagcagctggcagagggggcagccgaggtggtgcggataatggtgcactaccaggatctgctgtggacggtgagtgctgctgggtgctgggtatccctcctctgggtgccgctgccctgtcgccgctgctctccaggagcctgggcattgtcctttcagtttcctagtgtgtcccttccaggccctttgttggcctctgcacagggctgtgttttcttcttccccctgccttagtgaccaagaagcgtcttccctttctgtctccgctgccatgcctctctgtcagtctgctgccatctggtctaccccagattgcaggagttcccccaactcccacaaataattccttcacatcaaagcttttata

SEQ ID NO: 27947 - DNA, 236 bp, Macaca Mulatta
agaaggtgttcagtctgtgttctcctctgaagcagggtgggcccgaggccccagggctcaggtggtttctgcctggggtccccggacatcagtctagggcgaatgcactcggctatggagaaggagttcgcccaggcccagggaccccaggcagtggaggcagcagggagcggccgggtgtcggcagtaatgtctaaccccagaaaatgggtcaccatggccaagaatcctctccc

SEQ ID NO: 27948 - DNA, 838 bp, Macaca Mulatta
  misc_feature (1)...(838): n = A,T,C or G
ctactctaaacttggacaggttgtgtctgtcaaatgtctgctgcttggagccggcaccttgggttgcaatgtagctaggacgttgatggnnnnnnnnnnnnnnnnnnnnnnnnnnnnnnnnnnnnnnnnnnnnnnnnnnnnnnnnnnnnnnnnnnnnnnnnnnnnnnnnnnnnnnnnnnnnnnnnnnnnnnnnnnnnnnnnnnnnnnnnnnnnnnnnnnnnnnnnnnnnnnnnnnnnnnnnnnnnnnnnnnnnnnnnnnnnnnnnnnnnnnnnnnnnnnnnnnnnnnnnnnnnnnnnnnnnnnnnnnnnnnnnnnnnnnnnnnnnnnnnnnnnnnnnnnnnnnnnnnnnnnnnnnnnnnnnnnnnnnnnnnnnnnnnnnnnnnnnnnnnnnnnnnnnnnnnnnnnnnnnnnnnnnnnnnnnnnnnnnnnnnnnnnnnnnnagctggtcatcaatgctgctttgggatttgacacatttgttgtcatgagacatggcctgaagaaaccaaagcagcagggagctggggacttgtgtccaaaccaccctgtggcatctgctgacctcctgggctcatcactttttgccaacatccctggttacaagcttggctgctatttctgcaatgatgtggtggccccaggagatnnnnnnnnnnnnnnnnnnnnnnnnnnnnnnnnnnnnnnnnnnnnnnnnnnnnnnnnnnnnnnnnnnnnnnnnnnnnnnnnnnnnnnnnnnnnnnnnnnnnnnnnnnnnnnnnnnnggggctatgccattgccagcagcagtgacgatcggatgaatgagcctccaacctctcttgggctcgtgcctcaccag

SEQ ID NO: 27949 - DNA, 235 bp, Macaca Mulatta
aggctctgcggcggtgtctgcgccggtgctcgccctgcaccgcctgtcaccggggcctcgcgcctactgcagcgaggccttccccagccgcgccctggagcgcgccttcgcattgtacaacctgctggcgctgtacctgctgccgctgctcgccacctgcgcctgctatggggccatgctgcgccacctgggccgggtcgccgtgcgccccgcgcccgccgatagcgccctgcag

SEQ ID NO: 27950 - DNA, 468 bp, Macaca Mulatta
gagggtttgtccataagcaaaaaatcaactgagaaggaagagatcaaagaccaaccacagaatgtatctgaaaatctgcttccacaaaatgcaccgaattattggtatcatcaaggattaattcataagcagaatggagatctgctgcaagcagtcaaatgttatgagaaggaactgggccgcctgctaaggaatgccccttcaggcataggcagttttttcctgtcagcatctgagcttgaggatggcagtgaggaaatgggccaggacgcagtcagctccaatcctagagagctcgtctctaactcagagtaactgaattgagacagaggaggaaaacagagcatcagaagcctaaaatgatggttgtgaagggtaggaagataggaagacagggggccccagcttggggttgctgagcagggaagttttgcatgttgctttaaagtacatttttaaagaattgtt

SEQ ID NO: 27951 - DNA, 187 bp, Macaca Mulatta
cgcccacagaggtgcactgtgggtgggaggatcccatctcatgctgcaacgcatgaggactggtggccccattctagaggacagctggcatgttcttttagtctcccctatgaccaatagagaggatccagtaccccggggaagaactcttatggggccatgggggaacatgcgcattcactacagg

SEQ ID NO: 27952 - DNA, 1721 bp, Macaca Mulatta
  misc_feature (1)...(1721): n = A,T,C or G
ccagccgctcccctaccaccagagccaggacccctactcccacgtcaacgacccctactccctgaacccactgcaccagccccagcagcatccctgggggcaacgacagcggcaagaagtgggttcggaagccggatctctgctgccccagcctcgggccgccttgccccagctctcgggccttgacccccggagggactaccactcggtccgccggccggacgtgctgctgcattcggcgcaccacggcctggacgcgggcatgggtgacagcctctcgctgcacggcctcggccatcccggcatggaagacgtccannnnnnnnnnnnnnnnnnnnnnnnnnnnnnnnnnnnnnnnnnnnnnnnnnnnnnnnnnngttccggttcctcccaaatcggtgacttctctaatgatgaataaagatggcttcctgggaggcatgtctgtcaacaccggcgaggtgttttgctccgttccaggccgtttgtctctgctcagttcaacttcgaagtacaaagtaactgtgggagaagttcagagacggctgtcgccccccgaatgcctcaatgcatctctcctcggcggagtcctcanngagccaaatcgaaaaatggggggagatctttgcgagaaaggctagaaaaaatcggtttgaatttacccgcgggcaggcgcaaagcagcaaatgtcacgttactcacctccctggtggaaggnnaggagaagctgttcacttagctcgggattttgggtacatttgcgaaacagagtttcccgccaaagccgtctctgagtatttgaaccggcagcacacagacccgagtgatctgcactcccgaaagaatatgctgttggccaccaagcaactttgtaaagaatttacggatctgctggcgcaggaccggacaccgatcgggaacagccgacccagccccatcctggagccggggatccagagctgcctcacgcacttcagcctcatcacgcacggcttcggcgccccggccatttgcgccgcgctcacggccctgcagaactatctcaccgaggcgctcaaaggcatggacaagatgttcttgaacaacaccaccagtaacaggcacacgtctggggaaggcccaggtagtaaaactggcgacaaggaggagaaacacaggaaatnnnnnnnnnnnnnnnnnnnnnnnnnnnnnnnnnnnnnnnnnnnnnnnnnnnnnnnnnnnnnnnnnnnnnnnnnnnnnnnnnnnnnnnnnntttggaagaattatattaggtattacacacatacaatcaaaattttaaaaaannnnnnnnnnnnnnnnnnnnnnnnntgaggcgtacaacggagcaacaatatcggttctcagtgtctatttcaagatacacttggagacaaccgtccggattttccacttcggttctttcgagcttagtaatactgataataaaagaaaactatgatttccccttccctttggaaaataaacataagactaaacatgagaaaacgctaacttattggaagaaaatcggagaaacgttggtgtcaatgctttgagagctggttgactgagacgcacgaactttttaattttaaatatatttttaggaaactctctcgcagtgcccgccctccatctcacttcacccctcttccagccacccttatcctcccttcctcacgttgttacgggaatcgtctgggatgaaaatgagtgtggtt

SEQ ID NO: 27953 - DNA, 1306 bp, Macaca Mulatta
ggatttctgcagctatccaagctaatggtgaaatggttacaaagcaaccattgattagaagtatgcgaactgtaaaaagggaaactttaaagttaatatctggttgggtgagccgatcgaatgatccacaaatggtagctgaaaattttgttccccctctgttggatgcagttctcattgattatcagagaaatgtcccagctgctagagaaccagaagtgcttagtactatggccataattgtcaacaagttagggggacatataacagctgaaatacctcaaatatttgatgctgtttttgaatgcacattgaatatgataaataaggactttgaagaatatcctgaacacagaacgaactttttcttactacttcaggctgtcaattctcattgtttcccagcattccttgctattccacctacacagtttaaacttgttttggattccatcatttgggccttcaaacatactatgaggaatgtcgcagatacgggcttacagatactttttacactcttacaaaatgttgcacaagaagaagctgcagctcagagtttttatcaaacttatttttgtgatattctccagcatatcttttctgttgtgacagacacttcacatactgctggtttaacaatgcatgcatcaattcttgcatatatgtttaatttggttgaagaaggaaaaataagtacatcattaaatcctggaaatccagttaacaaccaaatctttcttcaggaatatgtggctaatctccttaagtcggccttccctcacctacaagatgctcaagtaaagctctttgtgacagggcttttcagcttaaatcaagatattcctgctttcaaggaacatttaagagatttcctagttcaaataaaggaatttgcaggtgaagacacttctgatttgtttttggaagaaagagaaatagccctacgacaggctgatgaagagaaacataaacgtcaaatgtctgtccctggcatctttaatccacatgagaatccagaagaaatgtgtgattaaaatccaaattcatgctgttttttttctctgcaactcttgttggcagaggaaaacagcatgtgggtatttgtcgaccaaaatgatgccaatttgtacattaaaatgtcacctagtgggcccttgttcctatgggattttttgaataaaaaattttctggggaaatatccttccatttgttaaagcttttggttttgggcatcctttaatattaagtttgccttgaaatttgaaaaattaaagggaattttttagaaaaatgctacgcttc

SEQ ID NO: 27954 - DNA, 200 bp, Macaca Mulatta
  misc_feature (1)...(200): n = A,T,C or G
cagcggacccaagagtgagcgagccagtttctgngcaggaagagatgccatgccggactgaaagaccctttgattcagactcttactcagagtgtaagggcaaacagtatgtcaaaaggacatggtataaaaaatttgtaggagtgcagctgtgcaactctctcagatacaagatttacttgagcgactccctcacaggn

SEQ ID NO: 27955 - DNA, 351 bp, Macaca Mulatta
atggggttcagtttcaaggacattaagaaaataatggaggaaaaaattcagacatctgggagcaactataaatcacttgagtttctggttgcagatccagtgaaggctcagaaagatagtacacaagatgaatcaagtcagacttcattgcagaaagagattagtactgaagagcagctaaggcgcctgcaagaggagaagctttgcaaaatctgtatggatagaaatattcctgtcatttttattccttgtggacatccagtcactcgtaaacaatgtgctgaagcggttgacaaatgtcccatgtggtacgccgtcattacgttcaagcaaaaaaattttatgtcttaa

SEQ ID NO: 27956 - DNA, 108 bp, Macaca Mulatta
gacatttgacagtgtgggaggcctggtaccagccaggatcccaagcctcccatcccttggaacattcagccagaatcttcgtcctgccccccgcagcccaccctagcc

SEQ ID NO: 27957 - DNA, 314 bp, Macaca Mulatta
tgtggatgggcctcatccagtcagttgaaggtgttaagagaaaacaccaagttttctgggaaaaggaattctaccacaagactagcataaaaatgctgtgtgagtttccacctgctggcctgccttcactgtcctgggggaggcagggggagaccaggtggactggagtagattgttgagagatgctggtgtggtgaacatgtccaggaaactacgagcctccagcccattgtccaacaaccacccaccaacaccaaagaggcgaggaaggggaaagcatcctctcaaccctggccgaggagccctatcaaagt

SEQ ID NO: 27958 - DNA, 550 bp, Macaca Mulatta
gagtctgaaatttaggcatgtttgggagtttaggcaataggagtatacaagaacaagaattttataacttgcctaggagtttattctcattttttctctattcccatcacaggttcactccaacttcctaaacctgttccagcccacacagccagggagtctcctgtatgaggtactggtgtttgctgagcggctgagtgagggccggaacgcaccccactaccgcgcggtgaaatggcattacaacgaacagtccctgcatgaatccctctttggggaagagtcgcgactggcagaccgactgcttgccctggtcatccaccctgaggaggatgttcagatccaggcatgcaaggtcattgtcagcctgcagtatccccaggacttgagatcccggccctcctcctgccagcccagtcgttcatactttaaaaacacggaataaaattaaggagagccaataaatgagtatgggatagaaacttgaagtttcctgaagtttgattgtctgtcggtggccttccagggctggatggagatttcattcagc

SEQ ID NO: 27959 - DNA, 759 bp, Macaca Mulatta
aggacgatgaggcttttggtggagctctgcagagcacagcaagcggaaagcagagtgtggaagcaagaaaagccagaagcgatttgggagaagttgccaagggcctgtcaggagaattaggcacaagatcaggagaaacaggcaggaagctactagaagctggcagaagagagtcaagagaaatttataggaggccttcaggagaattaggccaaagactctcaggagagttcagcagacaggaaccagaagaactaaataaactttcagaagtgggcagaagagagccagaagaactgggaaaaacacaatttggggaaataggagaaatgaaaaaaacagaaaatgagatggaaaaggagtatgaatgaagacaccggtagggataaggatcaggaagttggtgttcagagggataacgggatcttattaaactggattttcaagcgatttatctgtaataggaaaaatgagggttttacttgtgctgctttccgtcactattttgccattaaataggtgtctttcactcttgcaaaccctgagtgtcactttgtctcctcacccctgcccattcttggaagagcctcgtggagagaaaggtgccaagaagaaagggtttcaggagggtgaagatacaggagcttcagggaatgagaagtcacagcgaggaggagaggggaaggcctgggaggagaggtgcttcccagacaccggtgactgactgagtccttccagtgcgcaggacaccggggaggc

SEQ ID NO: 27960 - DNA, 559 bp, Macaca Mulatta
cgtcccccagcattcccttccctaaatgctgctctcttccctcccgcagggagctgcactgtgcgatgggagaataagaccatgtactgcatcgtcagcgccttcggactgtctatctgacttgcagttcagcctatggcctttctccttttgtctctagttcatcctctaaccaccagccatgaattcagtgaactctctccttgttctctttaagtgttttgtggcattctcacaatgtagaggaaaaaaccaaatgaccacactgtgatgtgaacggcaccgaagtcagatgagtatccctgtaggtcacctgcagcctgcgttgccacgtgtcttaactctgaatatttcttttcaaaggtgctaaaatctgaaatctgctagtgtgaaacttgctctactctctgaaatgattcatagacactaattttccatactttatacttttgttagaataaattattcaaatctagagtctgttgtgttctccatggtctgcatagtatcataaatgatttcttcgtatttagtgagtggcttcataatctatacaact

SEQ ID NO: 27961 - DNA, 758 bp, Macaca Mulatta
  misc_feature (1)...(758): n = A,T,C or G
gggctttttttttttcctgcactccatcatggcggatcaaggtgaaaaggagaaccccatgcgggaacttcgcatccgcaagctctgtctcaacatctgtgttggggagagtggagacagactgacccgagctgccaaggttttggagcagctcacagggacagacccctgtgttttccaaagctagatacactgtcaggtcctttggcatccggagaaatgaaaagattgctgtccactgcacagttcgaggggccaaggcagaagaaatcttggagaagggtctaaaggtgcgggagtatgagttaagaaaaaacaacttctcagatactggaaactttggttttgggatccaggaacacatcgatctgggcatcaagtatgacccaagcattggtatctacggcctggacttctatgtggtgctgggtaggccaggtttcagcatcgcagacaagaagcgcaggacaggctgcattggggccaaacacagaatcagcaaagaggaggccatgcgctggttccagcagaagtatgatgggatcatccttcctggcaaataaattcccgtttctatccaaaagaccaataaaaagttttcagtgaaatgtnnnnnnnnnnnnnnnnnnnnnannntctgaggagggggccctggtacccaaattcgcannnnnnnnnnnnnnnnnnnnnnnncnnnnnnnnnnnnnnnnnnnnnnnnnnnnnnntttnnnnnnnnttnnnnnnnaccaaaaaaaaaa

SEQ ID NO: 27962 - DNA, 130 bp, Macaca Mulatta
  misc_feature (1)...(130): n = A,T,C or G
tcagaaaccaaatttgactccggttcaggtncaggttggccttcattccacgatgtgatcggttctgaggcaatcacattcacagatgacttttcccatgggatgcacagggtggaaacaagctgctctc

SEQ ID NO: 27963 - DNA, 1093 bp, Macaca Mulatta
  misc_feature (1)...(1093): n = A,T,C or G
ctgactgatcaccgcgagtcaggaggggccggcgggctcacggacggagacagggtaggcgggggcaagggccaggcgctagggcggcggcgccagcgtagagcggcggtttggaggaaagatgagacgnnnnnnnnnnnnnnnnnnnnnnnnnnnnnnnnnnnnnnnnnnnnnnnnnnnnnnnnnnnnnnnnnnnnnnnnnnnnnnnnnnnnnnnnnnnnnnnnnnnnnnnnnnnnnnnnnnnnnnnnnnnnnnnnnnnnnnnnnnnnnnnnnnnnnnnnnnnnnnnnnnnnnnnnnnnnnnnnnnnnnnnnnnnnnnnnnnnnnnnnnnnnnnnnnnnnnnnnnnnnnnnnnnnnnnnnnnnnnnnnnnnnnnnnnnnnnnnnnnnnnnnnnnnnnnnnnnnnnnnnnnnnnnnnnnnnnnnnnnnnnnnnnnnnnnnnnnnnnnnnnnnnnnnnnnnnnnnnnnnnnnnnnnnnnnnngcactacatcctccttcagcggatatccacttggaagagcagactttgatcattatactggccgggacagtgaaagggccttgaggctctcagagaagcctccgtattccaagtatagctcaaggaataaatcgcacgacaatgtctactttctcggagggctggaaggtcggaaggcatctggctcgctcctggccatgtggaatggaagttccctgagtgatgctggcccccctcctatcagcagatcgggagctgcaagcatgccttcaagcccaaagcaagccaggaaaatgagcattcaggacagcctgacgcttcaacccaagttaactagacacaaggagcttgcatctgaaaacatcaatttgagaactaggaagtactccagcagcagcctgagtcacatgggagcctacagccgatcacttcccaggttgtacaaagccacagagaaccagctgacacctctcagcttgcctccaagaaactctctgggcaattccaaacgaacaaaacttggggaaaaggatctacctcatagcataatagacaatgacaattaccttaatttttcttctttgagctcaggggctttaccctataaaacct

SEQ ID NO: 27964 - DNA, 138 bp, Macaca Mulatta
gggaggtcggggctgcgggcgctcgctggtggcggacccggaggcggccgcggcgctggggctccgtggcttggattgaatcctatcaggagccatgagcgtggacaaggccgagctatgcgggtctctgctcacctg

SEQ ID NO: 27965 - DNA, 217 bp, Macaca Mulatta
  misc_feature (1)...(217): n = A,T,C or G
ggaaccaaataaaagtgagtctgggattccagtgaggaggcagcggcagcccagncagagccaagaagaagagcaaacccttgaacctcaagatccacagcagcgtatgcagctgcgagaacatcccctctcagcagcgctccccgctgctgtccgagcgctccctccgctccttctttgtgggacacgcacctttcctgccttccacccctcctgt

SEQ ID NO: 27966 - DNA, 763 bp, Macaca Mulatta
ggggtttccggtggaggtggggaaaatggcggtgtccacagtgttctcgatttcatcgcggatgcttgctctgtcaaggcacagcctgttgtctcctttgctcagcgtgacatcattcagacgcttctacagaggtgacagcccaacagattcccaaaaggacatgattgaaatccctttgcctccatggcaggagagaactgatgaatccatagaaaccaaaagagcccgcctgctctatgagagcagaaagaggggaatgttggaaaactgcattcttcttagcctttttgctaaagaacacctgcagcacatgacagagaagcagctgaatctctatgaccgcctgattaatgagcctagtaatgactgggatatttactactgggccacagaagctaaaccagccccagaaatatttgaaaatgaagtcatggccctgctgagagactttgctaaaaacaaaaacaaggagcagagactgcgtgccccagatctcgaatacctctttgaaaagccacgttgagctgtgctggcataagggttcagtctgcggatggtaactacttatggatggacgttagccttggcttccagcttctctttagatggcccaggctgccccaacccccaagaccattggtctccgcctcaagtgaatggacacaaccctttcccaggacatacatgtcagtgccatgtgactcattctcatactttttagttcaactgtgagcctcaaaagtgatttggtcagcatgct

SEQ ID NO: 27967 - DNA, 93 bp, Macaca Mulatta
gtatttgaaccctgaggctgtccctcctgttagtcttttcacttactggcttcagccagatggggtctggttttctgttacttgcaacaggaa

SEQ ID NO: 27968 - DNA, 2165 bp, Macaca Mulatta
  misc_feature (1)...(2165): n = A,T,C or G
ggtgcctttgtggcgaagattgcccggccaaaaaatcgagctttctcaattcgctttactgacacggcagtagtagctcacatagatggcaaacctaatcttatcttccaagtggccaacacccgacctagccctctaaccagtgtccgggtctcagctgtactctatcnnnnnnnnnnnnnnnnnnnnnnnnnnnnnnnnnnnnnnnnnnnnnnnnnnnnnnnnnnnnnnnnnnnnnnnnnnnnnnnnnnnnnnnnnnnnnnnnnnnnnnnnnnnnnnnnnnnnnnnnnnnnnnnnnnnnnnnnnnnnnnnnnnnnnnnnnnnnnnnnnnnnnnnnnnnnnnnnnnnnnnnnnnnnnnnnnnnnnnnnnnnnnnnnnnnnnnnnnnnnnnnnnnnnnnnnnnnnnnnnnnnnnnnnnnnnnnnnnnnnnnnnnnnnnnnnnnnnnnnnnnnnnnnnnnnnnnnnnnnnnnnnnnnnnnnnnnnnnnnnnnnnnnnnnnnnnnnnnnnnnnnnnnnnnnnnnnnnnnnnnnnnnnnnnnnnnnnnnnnnnnnnnnnnnnnnnnnnnnnnnnnnnnnnnnnnnnnnnnnnnnnnnnnnnnnnnnnnnnnnnnnnnnnnnnnnnnnnnnnnnnnnnnnnnnnnnnnnnnnnnnnnnnnnnnnnnnnnnnnnnnnnnnnnnnnnnnnnnnnnnnnnnnnnnnnnnnnnnnnnnnnnnnnnnnnnnnnnnnnnnnnnnnnnnnnnnnnnnnnnnnnnnnnnnnnnnnnnnnnnnnnnnnnnnnnnnnnnnnnnnnnnnnnnnnnnnnnnnnnnnnnnnnnnnnnnnnnnnnnnnnnnnnnnnnnnnnnnnnnnnnnnnnnnnnnnnnnnnnnnnnnnnnnnnnnnnnnnnnnnnnnnnnnnnnnnnnnnnnnnnnnnnnnnnnnnnnnnnnnnnnnnnnnnnnnnnnnnnnnnnnnnnnnnnnnnnnnnnnnnnnnnnnnnnnnnnnnnnnnnnnnnnnnnnnnnnnnnnnnnnnnnnnnnnnnnnnnnnnnnnnnnnnnnnnnnnnnnnnnnnnnnnnnnnnnnnnnnnnnnnnnnnnnnnnnnnnnnnnnnnnnnnnnnnnnnnnnnnnnnnnnnnnnnnnnnnnnnnnnnnnnnnnnnnnnnnnnnnnnnnnnnnnnnnnnnnnnnnnnnnnnnnnnnnnnnnnnnnnnnnnnnnnnnnnnnnnnnnnnnnnnnnnnnnnnnnnnnnnnnnnnnnnnnnnnnnnnnnnnnnnnnnnnnnnnnnnnnnnnnnnnnnnnnnnnnnnnnnnnnnnnnnnnnnnnnnnnnnnnnnnnnnnnnnnnnnnnnnnnnnnnnnnnnnnnnnnnnnnnnnnnnnnnnnnnnnnnnnnnnnnnnnnnnnnnnnnnnnnnnnnnnnnnnnnnnnnnnnnnnnnnnnnnnnnnnnnnnnnnnnnnnnnntatgtatgattgatttgatcatataaaacaccatgaaggctctaattcataaatacaaaaatatatntaagtctttatagatataaagctttacttagatataacttcagtgagtagggaaaaaaaatctacagtagataaagcaaaagataattaggcaacaaagcattttcaaacccaaattcctgtttccaacttcaaatagttttttctataaacacaaaatgagtgtttactcaccagtaggaggttggactagatgaactctattatttctttctaaatctaataatccataaaaattatgcttcctgtttcattttttattttatctatgctaaaacgagccctttcctttatgtccagtttaaaatgatcatttgcatgattttcatttcaataaaaaaaacagaaactgtccttaaacaaaacaaaaaccaaaagtcaccctatcaagtttcaaacagatttgtggctgttcttttctgaaatttcccttattcaggtttctgtgggaaaaatgaaagattaaccttccccactggtgatgacctaggcaggaatcatctcttgaaataaatactagctgagtaaaggcaagcaggtgtgaagagcagggctcagcagcaagtcacatttttctactatttgaccgaaaggaaaagaaaataaagaagaactctggagtggtctaagactgataatagcagaagaatatcaagaacacag

SEQ ID NO: 27969 - DNA, 881 bp, Macaca Mulatta
agatagtgttgtgttggtgcatccacttcacacatacctatcagggcagtccccttgcccggaggaggctgggctcatcttaggctgtttgcctttttaacacctttagtctgctgtgtttccagatcatttatacagggctttgttgaacggttgctgtggtctgcttgagtcccatcggccccaaatcctaattatgaacacctccttggcagcccttgcttcagtgggctctggggactctggctcagccggtgacatctagataaagatccctggagtcagtctgttagaaggaaggtgagcagagcagtgacagatgctgtctttgtctagtgtgggccttcctgccatgaccacgagaattttctccacggtgacgcagaggagaatgtaggtgttggagccggcgcccaggcaattctgctgttcttggttgcacatttgttctcagacccttcgctgcttcacctctgcccttctgcccctgctcccatccccaagcagtgctttctttgtaaagtgagcccatttttagggcacatctccgtaacacatttttctctctcctcctgcaggggagttgctgagtcagcccagaccagaaggagtggcagagatcatttgccccaagaacggcagcgagcgagtgaatgttgccttggtttacccacccacgccgactgtgatcagcccctgttccaagtgagttcccaaagtccctctggcccccggacccggctcctgatcccggccccatagatatgacaacaaaaatccaggttaaactgcatctgcacaaaccttgcaaagtcctcctgaacagacataattcttctgggtaacatcagcttcatgacttatgcagcaaaacaggaact

SEQ ID NO: 27970 - DNA, 115 bp, Macaca Mulatta
tgtccagtagcctggagctccacagtggcttcatgcctcccttctcccagctcaggtggccctgagggctccctcagaacaatgccccaaatcctgacctaagggtcagcatggg

SEQ ID NO: 27971 - DNA, 874 bp, Macaca Mulatta
  misc_feature (1)...(874): n = A,T,C or G
ggggtgctggcgtgcgttcatcttcagcctggtgtgggccttttaaacatataacataaaaatggcttccaaaagagctctggtcatcctggctaaaggagcagaggaaatggagacggtcatccctgtagatgtcatgaggcgagctgggattaaggtcaccgttgcaggtctggctggaaaagacccagtacagtgtagccgtgatgtagtcatttgtcctgatgccagtcttgaagatgcaaaaaaagagggaccgtatgatgtggtggttctacccagaggtaatctgggtgcacagaatttatctgattctgctgccctgaaggaaatcctgaaagagcagggaaacccggangggccttatagccccccatcggggcagggcccaatggcccttttgggcccagaaaataggggttgggaaaaaaagtttccccccccccccttcttgtgctaaaaacaaatgggtgaatggggggggtctttcccccctacccttgaaaaatcgggtgggaaaaaaggaacgnnnnnnnnnnnnnnnnnnnnncgggggggcctggggaaacccctctcccaagtttttcccccttcgcaaatgttggagaacccccccataacgcgagagggggggaggggcgccccccacaagaaagagcgccccccctttgtttctgttaaaaaatcaaaccccgcccacagccgtgggttatctccttcttgaagaaagaagaggcgcggaggagaaaaacaccactctccctagtaatcggcgcccaccacaaaacaacacaaaagggcggggggggtaaggttgtgtcctaaaaacaacggcagggcacgctcataggtctggtttacatcacagtataag

SEQ ID NO: 27972 - DNA, 695 bp, Macaca Mulatta
gcctggctgcttcaagacagagtcagtgagaaacgtgggtcagtgggaaaagcgcaagcaattgctgctggccaacctgcctcaagagctgctgcaggcctatggcaaggactacatcgaacacttgcatgggcagttcctgcgctcgctacgcctggccatgtccgacctcagcccagttgtagatgccatcacagatgcgctgctggcagctcggccccgccgccgctattaccccggccagggcctagggctcatgtacttcatccactactacctgcctgagggcctgcggcgccgcttcctgcaggccttcttcatcagtcaccgtctgcctcgagcactgcagcctggccagcctggcgctaccccaccacaggacgcagcccaggacccaaacctgagcctcggcccttccccagcagtggctcggtgagccctgtgcacctatggcccagccaatgcagcacagaaggctctgtgagcccttggttcctccccgaaaacccccagcattaccatcccccaagtctgtcctggaccctagcctaaaggatcctgcccccacttcatgcccactgccgatgcccaatccaggcccggtgaggccaaggtttcccagtgtgcctctgcgcctctccactgcttcatgagcccaaaaagaccctcctggcacaacactctatcctgaagct

SEQ ID NO: 27973 - DNA, 1194 bp, Macaca Mulatta
ggggcagtttgaatcgcggtgcgacgaaggagtaggtggtgggatctcaccgtgggtccgattagccttttctctgccttgcttgcttgagcttcagcagaattcgaaatggctggcggtaaggctggaaaggactccggaaaggccaagacaaaggcggtttcccgctcgcagagagccggcttgcaggtcagtagttgttcgtgcggtctgggagtcgtgatgtttttctttgcatctccttttttgttattcaccgctctccatgggcgtttcgtctatgcgtgggtgatgcggtgtcgcgacttgggctgcccatacgataaatatgggggggaggaatcacgtgtttcgatgtcgggacgcgttgctgcgcccgtgccacttgctttggcgcgcatataatttccccatctctagttctcctatttttgtgcatttatgtttgtgtatgcttaaaatttaagttcccagtgggccgtattcatcgacacctgaaatctaggacgaccagtcatggacgtgtgggcgcgactgccgctgtgtacagcgcagccatcctggagtacctcaccgcagaggtacttgaactggcaggaaatgcatcaaaagacttaaaggtaaagcgtattacccctcgtcacttgcaacttgctattcgtggagatgaagaattggattcgctcatcaaggctacaattgctggtggtggtgtcattccacacatccacaaatctctgattgggaagaaaggacaacagaagactgtctaaaggatgcctggatttccttgttatctcaggactctaaatactctaacagctgtccagtgttggtgattccagtggactgtatctctgtgaaaaacaaaattttgcctttttgtaattctatttgagcaagttggaattttatttagctttccaaccaaccaaatttctgcattcgagtcttaaccatatttaagtgttactgtggcttcaaagaagctattgtttctgaagtagtgggttttgattgagttgactgtttttaaaaaactgtttggtttttttttgtgatgcagaatttttagtatcaaacatttggttttgtacagacattatttccactctggtggatgagctcaataaaggtcatatcccaaactagttgtgtattcaacccacacaccaacaaactcgagggggggcc

SEQ ID NO: 27974 - DNA, 220 bp, Macaca Mulatta
  misc_feature (1)...(220): n = A,T,C or G
tggttgcgacacccccaaagccataagggccgacccaggcatcttggtccccagcccctcgtctcgggttcaggtccgccccttgctccttgtcgtgaggtcaaggatacaccttggccccgactccggatctctccattctcaggccagaccgccggtgttgccgttgnnnnnnnntctctgtctttgctgcaattttgaaataaaatgccaaagaaca

SEQ ID NO: 27975 - DNA, 139 bp, Macaca Mulatta
atatggttgcagttgaatacaaaagcccggaggcggctcaggttcaaggcctatcagaggcagacgttcagaggatcttgagaccaggaagggacctcaaagcatcagaggctgaagaccagttagggagccatcagga

SEQ ID NO: 27976 - DNA, 2431 bp, Macaca Mulatta
  misc_feature (1)...(2431): n = A,T,C or G
aggaacaatccctgtccagacagaattcaaggaaatttccagataggcctttgcttaccctgggctccaaaacgccgcctgcctctcctcacagagtcagtgacctgaggatgatagacatgcatgctccctataatgcccacgggccgcctcacaccatgcagccagaccgggcctcaccgagccgccaggcctttaaaaaggagccaggcaccttggtgtatatagaaaagccccggagcactgcaggattatccagccttgtggaccttggccctcctctagtggagaagcaagtttttgcttacagcacggcaacgatacccaaagacagagagaccannnnnnnnnnnnnnnnnnnnnnnnnnnnnnnnnnnnnnnnnnnnnnnnnnnnnnnnnnnnnnnnnnnnnnnnnnnnnnnnnnnnnnnnnnnnnnnnnnnnnnnnnnnnnnnnnnnnnnnnnnnnnnnnnnnnnnnnnnnnnnnnnnnnnnnnnnnnnnnnnnnnnnnnnnnnnnnnnnnnnnnnnnnnnnnnnnnnnnnnnnnnnnnnnnnnnnnnnnnnnnnnnnnnnnnnnnnnnnnnnnnnnnnnnnnnnnnnnnnnnnnnnnnnnnnnnnnnnnnnnnnnnnnnnnnnnnnnnnnnnnnnnnnnnnnnnnnnnnnnnnnnnnnnnnnnnnnnnnnnnnnnnnnnnnnnnnnnnnnnnnnnnnnnnnnnnnnnnnnnnnnnnnnnnnnncgagctggaagactttgttgaagacttgaaggactccacggcagccagccgattggttactctgaaagacgtggaagatggggctttcctcctgcgtcaagtgggagaggctgtagctaccctgaaaggnnnnnnnnnnnnnnnnnnnnnnnnnnnnnnnnnnnnnnnnnnnnnnnnnnnnnnnnnnnnnnnnnnnnnnnnnnnnnnnnnnnnnnnnnnnnnnnnnnnnnnnnnnnnnnnnnnnnnnnnnnnnnnnnnnnnnnnnnnnnnnnnnnnnnnnnnnnnnnnnnnnnnnnnnnnnnnnnnnnnnnnnnnnnnnnnnnnnnnnnnnnnnnnnnnnnnnnnnnnnnnnnnnnnnnnnnnnnnnnnnnnnnnnnnnnnnnnnnnnnnnnnnnnnnnnnnnnnnnnnnnnnnnnnnnnnnnnnnnnnnnnnnnnnnnnnnnnnnnnnnnnnnnnnnnnnnnnnnnnnnnnnnnnnnnnnnnnnnnnnnnnnnnnnnnnnnnnnnnnnnnnnnnnnnnnnnnnnnnnnnnnnnnnnnnnnnnnnnnnnnnnnnnnnnnnnnnnnnnnnnnnnnnnnnnnnnnnnnnnnnnnnnnnnnnnnnnnnnnnnnnnnnnnnnnnnnnnnnnnnnnnnnnnnnnnnnnnnnnnnnnnnnnnnnnnnnnnnnnnnnnnnnnnnnnnnnnnnnnnnnnnnnnnnnnnnnnnnnnnnnnnnnnnnnnnnnnnnnnnnnnnnnnnnnnnnnnnnnnnnnnnnnnnnnnnnnnnnnnnnnnnnnnnnnnnnnnnnnnnnnnnnnnnnnnnnnnnnnnnnnnnnnnnnnnnnnnnnnnnnnnnnnnnnnnnnnnnnnnnnnnnnnnnnnnnnnnnnnnnnnnnnnnnnnnnnnnnnnnnnnnnnnnnnnncagaagattctccaaattcagaacaggacttggaaaagctggggggaaagtcgccccctcctcctccccacctcctcgtgaagtactgccaggatcgggactcaccaccacgaggtcaggcgatgtggtctacaccggcagaaaggagaacatcaccgctaagnnnnnnnnnnnnnnnnnnnnnnnnnnnnnnnnnnnnnnnnnnnnnnnnnnnnnnnnnnnnnnnnnnnnnnnnnnnnnnnnnnnnnnnnnnnnnnnnnnnnnnnnnnnnnnnnnnnnnnnnnnnnnnnnnnnnnnnnnnnnnnnnnnnnnnnnnnnnnnnnnnnnnnnnnnnnnnnnnnnnnnnnnnnnnnnnnnnnnnnnnnnnnnnnnnnnnnnnnnnnnnnnnnnnnnnnnnnnnnnnnnnnnnnnnnnnnnnnnnnnnnnnnnnnnnnnnnnnnnnnnnnnngaatttggaatttttccatgaagatgtacggaaatctgatgttgaatatgaaaatggcccccaaatggaattccgaaaggnnagggctccagcggggccccacagacgagcaggatgcctgtccccatgagaaagagaacagacccggaaccctggacaaacctggcaagnnnnnnnnnnnnnnnnnnnnnnnnnnnnnnnnnnnnnnnnnnnnnnnnnnnnnnnnnnnnnnnnnnnnnnnnnnnnnnnnnnnnnnnnactgacttagtttataccaaatattgtgctttctttgtaagataacggtttacatagacatcctgtatctgggggcatgaagaaagtctaaa

SEQ ID NO: 27977 - DNA, 638 bp, Macaca Mulatta
  misc_feature (1)...(638): n = A,T,C or G
cttcatgtacgtccagntgtaaagtctacgttcagttgtggcgcaggctgaaggcctagaagcgtgtgatctttgtacaaaattgcccggacactgccaaaaaactggagaagaacttctcatgcaatgtaaacacagacatcaaggatgctgtggtagtgcctgtatcacaaacaggtacaaattcactgccatctgcagagggtggcccccctgaagttgtatcagtttgatggaacctgttgggagttccttcaccgaagaatatctttctagccctcagccactacaaatgacagaagtgatcttgaattatttactctcttcagctcctcctttctcctactgacacatttttcctgactttgttcaaagaggaaaggaggaaaacacaccaaatgcccaggatcccatgaagtatagcatgaagtatgatatggaaatgtgaagtttgccagagaatgatttctaagacaattaagaactactggggcaatgaatgcttttaggcagtaatcaaggattaaatggacccatgatactcttcaaagtaacaggggaaaagttcaagaatacagacttgaattgcaatgtgtattatttctagggccttgtaatgttcactgtctcatctggaa

SEQ ID NO: 27978 - DNA, 120 bp, Macaca Mulatta
agtgtggcatcgtcctgggggcgctgctcttggtcttctgctcctggatgacgcaccagtcgtgcatgttcttggtgaagtcggccagcctgagcaagaggaggacctacgccggcctgg

SEQ ID NO: 27979 - DNA, 612 bp, Macaca Mulatta
cagatcctgctcacactaaaagatgaaccacaaacacacagagaaacaacttgttcaccactcctgggtgtgtgactgagggtgaagcatccaccagcacttcaaggggtccatagtattttcttttgctgcctcaaagtccccaaagccttcaagcggaagtggcagtagatggttgccaatcatccaatgcagactttcagtgggacaacaggaaagcagatcttctgggttttgatggaacttggcagtggggacattgagctgatgcattatataccccatcagagcacacgtgtatcttttcccctccctttgccccatgcccccaacctgcttaggtctactctgtccctttactgctgccgcacagagatgatataaaagaggctctttggctatttgtattttgcttcctcttcttttccagattgcagtatgaagcttcattttctttgtacaagcttaaaattccaacatcatcgtccaccaaagttgctcctcccttttcggagggtctgggggaaggaggagcattgatcacaagtttcctagagagaggagacaaattggtgtgcagttggcaacaggagccaggctaaaggcaccctt

SEQ ID NO: 27980 - DNA, 406 bp, Macaca Mulatta
  misc_feature (1)...(406): n = A,T,C or G
cttctctgctgtgtggccctttctttctggggagcagcctccacggacaccaaggtcacccagagacctagacttctggtcaaagcaaacaaacagaaagcaaagatggattgtgttcctgtaaaaggacatagttatgtttactggtatcgtaagaagctggacgaagagctcaagtttttggtttactttcagaatgaagaaattattcagaaagcagaaataatcaataagagattttcagcccaatgtccccaaaactcatcttgtaccttggagatccagtccacagagtcaggggacgcagcactgtatttctgtgccagcagcaaagataccggaatctacaatgagcagttctttgggccaggcacacggctcaccgtgctnnnnnnnnnnnnnnnag

SEQ ID NO: 27981 - DNA, 940 bp, Macaca Mulatta
  misc_feature (1)...(940): n = A,T,C or G
caatgagagagattccaaaggcagggatcacctctcaggagtccctactgatgttacagttactgagactccagaaaagaacacagaatcactcattntaagccttaaaatgagctcattgggtaaaatccaagtcacggagaaacaagagaaaggacttactcttggagtagagacgtgtgggagcaaaggaaatgcagagaaaagtgtgtctgcaacagaaaagcaggaacggactgtcatgagccatagctgtgagaacttcaacaccaatgattcagtcacagaaaagaagtctcaaggagaaggaccacatttaagtttgttcattccaagggagacaacttacgagtttcattctgtatcgcagtcaagtagtcaaagtcttgcttctctagctacaaaatttcttccagaagagaaagcagaagcctggaatcataatcgtgtccctgatgtaaaggcattaacggagagtcccgaggaacaggtgtctctggagcccaaatctgatagtccgttccaagcatcacacactaggtgccagagtcctttatgttcagcccagcatcacactcctcagagccccttcaccaatcatgctgcagctgctggcaggaagacccttctcagctgtgtgggactggagtggtttccagagctctatcctggttaccttggactaggggtgttgccagggaagcctcagcgttggaatgcagtggcccagaagccacaacttaggactccccagggggaaagacnnnnnnnnttctttgttggaaagagctcaactcatataaggagtttggaaccccctaccggacttacaacctccaacttctctctaatgaggctcttgggagctgtacaaaaaggnaggctggatcaggtgcaacaccaccataaggaagagtggagtcggtggcatcacgatgct

SEQ ID NO: 27982 - DNA, 488 bp, Macaca Mulatta
gggaaactgggaacattgaggcagactttgtgggaagaatggtcatctgaggccatatggaagataaacagcaccatggtagatgagcctgtgactggggggcccaaggactcccagctggtctataactatgcaggctcctcacatgacccaagccaagcttctctggtcattttcggccccagcttcccctcctgagtaagcctaagcaggtaaagcactgaccatcatcctgggcttctgagtggctggagttatggctctggcacagccctgggcagccttctatcagtctcctttgtaactcagatgggacttctacccccaaatccccacttcttcttcggggcctcacaggttattttgttgcagtttccagtgtctctgtatacagactttatactgcccaattcattgcatcctgtccactctctgcctctaggccttgtcccccagtgacctctttccatatcgagaaggtacattgt

SEQ ID NO: 27983 - DNA, 475 bp, Macaca Mulatta
  misc_feature (1)...(475): n = A,T,C or G
gtagcaaagagctcctgttacaacctgtgaccatcaccttgaatgagaaggaaaaggttctgattgagggctccatcaactctgtccgggtcagcatcgctgtgaaacannnnnnnnnnnnnnnnnnnnnnnnnnnnnnnnnnnnnnnnnnnnnnnnnnnnnnnnnnnnnnnnnnnnnnnnnnnnnnnnnnnnnnnnnnnnagcagaagaagatctttacaatccaaggctgctacccagtgatccggtgtctcttgcgccggaggggctgggtggagaagaagatggtccatcgctcaggccccaccctgctgccaccccagaaggatctggatagctcagcgatgggtgacagtgacaccactgaggatgngaggatgaagatgaggatgaggagttccagccaccacagctgttcgacttggatgatttactgaaatttgatgacctagatggaacacatgctctgatggtg

SEQ ID NO: 27984 - DNA, 170 bp, Macaca Mulatta
caagacaagcagcggcccctgtaagcacacgagacaatcccaagtgtcagtgggaaggagatccctttcctgatggggctgcctctgcccagtccctcccagcttccccagggccctggggctctgcaggcattcagaagtggaagccagccacagcccgggactgaaga

SEQ ID NO: 27985 - DNA, 103 bp, Macaca Mulatta
  misc_feature (1)...(103): n = A,T,C or G
ggaaataacagtacaacagctaatggctcatttggattctatcaggaaagacatggtcatcctagagaanagtgaattcgcaaatctgagagcagagaatgag

SEQ ID NO: 27986 - DNA, 107 bp, Macaca Mulatta
aggttgggtgctgattgaccggagcggccgccactttggtacaatcctcaattacctgcgggatgggtctgtgccactgccggagagtaccagagaactgggggagc

SEQ ID NO: 27987 - DNA, 587 bp, Macaca Mulatta
  misc_feature (1)...(587): n = A,T,C or G
gtacacgagcaagaagccattagctctgacccagagttgtctaattgtgaaaatgttcagaagcctgatgtgaaagatgatctttctgatcctcctgnnnnnnnnnnnnnnnnnnnnnnnnnnnnnnnnnnnnnnnnnnnnnnnnnnnnnnnnnnnnnnnnnnnnnnnnnnnnnnnnnnnnnnnnnnnnnnnnnnnnnnnnnnnnnnnnnnnnnnnnnnnnnnnnnnnnnnnnnnnnnnnnnnnnnnnnnnnnnnnnnnnnnnnnnnnnnnnnnnnnnnnnnnnnnnnnnnnnnnnnnnnnnnnnnnnnnnnnnnnnnnnnnnnnnnnnnnnnnnnnnnnnnnnnnnnnnnnnnnnnnnnnnnnnnnnnnnnnnnnnnnnnnnnnnnnnnnnnnnnnnnnnnnnnnnnnnnnnnnnnnnnnnnnnnnnnnnnnnnnnnnnnnnnnnnnnnnnnnnnnnnnnnnnnnnnnnnnnnnnnnnnnnnnnnnnnnnnnnnnnnatgccgagtataccaattctcctttggtacctacattctgtactcctggtttgaaaattccatctacaaagaacagcatagctttggta

SEQ ID NO: 27988 - DNA, 933 bp, Macaca Mulatta
cacaaatccccgatactgtcaatggtggaaattctggaaagttggatggggaaaagccaccagagaagaaatgtgtctgctagactctaaatagaaactgaacatcaagaaccccacccaaaatattacttttataaacaatgacaaaccacacaattgtcgttgagtaaaccatgcacaatggcatgtctttctttttctgccagaaaatctattttaagaaaccagaatagtcaacagtgttcaaaagaattgactagttatccccgagaccctttcaaacaagatcaaagatttcccacatgtgatctcatcatcatggatactcaatttgtttttcttatagagaaaatgagtatataagacaacatacaagaagaaatatcagtgagttttaaatcagaacaagttacctgtcacattggagaaaagggtgggctactgaagggcgaacacagaaacaagaatttctaaaaggttgggtttacttcttatattgaatcagatgtatacttttagatttgcattggggaaaacgtattaactaaaaatggatacacaatgaagaattctatttggctaattaagaatgacatactatgtacacccaataagctgtactagaatgaatagattactgataaggttacaaataggtaaatgtcacacttctgctaaaatgcaggagatagtgtcataatgccatctttatattcttaatatatagcacattgacaagaacaggactgtaaatgacaaagtacaagacaaataccctgggaaaaaaatgaaagtatgagaaattggcatttgtacagctgaaattcaatgtatctgttagagatgtctggaagggttacttagccaaattttactcaagccaattagaagctgacattatcagctggtattcagagaactccagaggtttcc

SEQ ID NO: 27989 - DNA, 450 bp, Macaca Mulatta
ttttcttaactagtcacggagggttaaagaggacttagtgtgcttccaagaacatggaaatctgcagagggacacctcgtcagtgttcaggttgtttggataagtttcaaacacagttgtttcctgtttttgcacagcctccatagtgattgggaaatggtggtgtgagatggagccttgcctagaaggagaagaatgtaagacactccctgacaattctggatggatgtgcgcaacaggcaacaaaattaagaccacgagagtaagtgcacttatttcaaatgcattttgcatgttacagactgtactatttgagtttgggctgtgcaaacagcatccacagaagctttgcacaggagagaagaacgattctcctgtgacagaaagccttcttaactatgcaaatcactgtccatctatgaatgaggcattagagattgaacttgactt

SEQ ID NO: 27990 - DNA, 69 bp, Macaca Mulatta
gatcattggaaattgtgtgtccatcttggtcttgagctctgctctgcctgtgatgtcgagaacactggg

SEQ ID NO: 27991 - DNA, 630 bp, Macaca Mulatta
  misc_feature (1)...(630): n = A,T,C or G
taattcccctttttgacccttttgagatggaactttcataaagtttcttggcagtagtttattttgcttcaaataaacttatgtgaaaagttgtctcaagtcaaatggattcatcacctgtcatgcattgacacctgatacccagacttaattggtatttgttcttgcattggccaaagtgaaaagnnnnnnnnnnnnnnnnnnnnnnnnnnnnnnnnnnnnnnnnnnnnnnnnnnaaatctagttttgaataagtctgggtgaccgcacctaaaatggtaagcagtaccctccggctttttcttagtgcctctgtgcatttgggtgatgttctatttacatggcctgtataaatctccattgggaaatcattccttctaaaaagattatttgggagagtgggcaaaatgttgattattttctaatgctttgtagcaaagcatatcaattgaaaagggagtatcagtaccttcctagtttgagatttgaaaagtggaattaattgcaatagggataaagtagaagaaaccacaaattatcttgtgcctgaaatccattaagaggcctgatagctttcagaattagggtgggttgtctgtctggaagtgttcagtggaatgggcttcgtcc

SEQ ID NO: 27992 - DNA, 471 bp, Macaca Mulatta
ccagggtgactccgggggccctctggtctgtaaccactctcttcaaggcattatttcctggggccaggatccgtgtgcgatcacccgaaagcctggtgtctacacaaaagtctgcaaatacgtggactggatccaggagacgatgaagaacaattagactggacccacacaccacagcccaataccctccatttccacttggtgattggttcctgttcactctgttaataagaaaccctaagccaagaccctttacgaacattctttgggcctcctggactacaggagatactgtcacttaataatcaacctggggtttgaaatcagtgagacctggattcaaattctgccttgaactattgtgactctgggaatgataacatctggtttgttctctgttgtatccccaaccccaaagacagctcctggccatatatcaaggtttcaataaacttttgctaaatgagtgaa

SEQ ID NO: 27993 - DNA, 633 bp, Macaca Mulatta
  misc_feature (1)...(633): n = A,T,C or G
cccccttgaagctattctttttttaactgtgtaattattatttttaatgtccagaatgtgtaatacaagggccagagcttcctcctggactcaattttataaattctcgattggttggtgaggccaatagggatactttttcttgtctaatttggtttctgggaaagcttcgttcaagtcctcaatggtcatctgatcaaatggaattaagttcttcatcttctccatctgtttctcatattctacaatcctggcctttgagagagacacccactcagcacaagatttcacatcttctttttcttcggcatccacctgggcagtatatttatcctgtggcacaggaatcttcagggcattaaactttttctcaaagtcatccaccaagccggccttggccacattggccttgtagtaagcccagtcgatagctggtggagtctcaggtaaagcagccaacctggaggtgagggtctcatgccaggacttcagggaactagcaatggccttttggttctggggtatgatctccgcaaaagctacccagtcaatggtttttagagcaagttttcgcccagccatcttgggatccttcaccgancctggctgcccacggtccaccgcctcgtgccg

SEQ ID NO: 27994 - DNA, 143 bp, Macaca Mulatta
gtatgacacaacctcagtctaggatacaaaggaaaaacaggcagcagggaatggacagcggaggaagatttaaaaaatgtcccaggtatcctgctgcgggttctggtacttcagctgagttttcctcttggtgttttcttcga

SEQ ID NO: 27995 - DNA, 376 bp, Macaca Mulatta
acacattataaagtcatgttcatgaaagacagattctacaaattgaaaataaacttaacattcacactaatggcagcgtcctataaatcactttgctaccagctttttaatagagtcatttcatccatattatgtactatcatttctcttttcagtcttgtggaccaccctgattatccattttcagatgaatattagcagagagggtgttgcacgacatctagcagaagccctgcgtgtggatggtgatgcagaggatgtctctatgctggtggacacacggcctctggttaaatccctcctgcttggcaacttcagttagctacatacatccatagtccagaaagcaaagaaaataaattttatcttgaagtaa

SEQ ID NO: 27996 - DNA, 474 bp, Macaca Mulatta
  misc_feature (1)...(474): n = A,T,C or G
aggtactgggaacagcttntgatcctttcttaggaggaaaaaacttcgatgaaaagttagtggaatatttttgtgcagaatttaaaactaagtacaagttggatgcaaaatccaaaatacgagcactccttcgtctgtatcaggagtgtgaaaaactgaaaaagctaatgagctctaacagcacagaccttccactgaatatcgaatgctttatgaatgacaaagatgtttccggaaagatgaacaggnnnnnnnnnnnnnnnnnnnnnnnnnnnnnnnnnnnnnnnnnnnnnnnnnnnnnnnnnnnnnnnnnnnnnnnnnnnnnnnnnnnnnnnnnnnnnnnnnnnnnnnnnnnnnnnnnnnnnnnnnnnnnnnnnnnnnnnnnnnnnnnnnnnnnnnnnnnnnnnnnnnnnnnnnnntattagcacaacactcaatgcagatgaagcagtcgtcagaggatgtgcattacag

SEQ ID NO: 27997 - DNA, 780 bp, Macaca Mulatta
  misc_feature (1)...(780): n = A,T,C or G
gggacggtgcggggagcgcggccatggagcttctgctgtcggtgctgcgtgtactgctgggcggcttcttcgcgctcgtggggttggccaagctctcggaggagatctcggctccagtttcggagcggatggggctatcttcaccttggcagctctaaaagagtcactaagcacctgtatcccggccatcgtctgcctggggttcctgctgctgctgaatgtcggccagctcttagcccagactaagaaggtggtcagacccactaggaagaagactctaagtacattcaaggaatcctggaagtagagcatctctgcctgtttatgccgtgcagctctcacagcaggaatatggtagaacacagagtctgtcatcttgttaccattataatatccagggtcagccagtgttgaaagagacattttgcctacctggccctactttctctttttagctttactactcttttgtgaggagtacatgttatgcatattaacattcctcatgtcatacgaaaatacaaaataagcagaaaagaaatttaaatcaaccaaaattctgatgcccgaaataaccacttttaatgccttggtgttagtatacctctgaacttttttctgtgccttttagcagatacatattttttaaaatgaaaataaaacccatatatccccaaaannnnaanannnnaananaanannnnnncctnnnnnnnnnnnnncgnnnnnnnnnnnnnnnnnnnnnngaacattcctttttggcccgccgggccccattag

SEQ ID NO: 27998 - DNA, 404 bp, Macaca Mulatta
gtatctgaaaacaggaggaaatgaccaaaaagacagaaactacagtatctgtgtagcatcttaacacctaagccttttgatacataatatttgagttttctcatttttatattactgagggatttttattgggggacagtaaacaatttctgtttcttaccaaatatttgtgagcctaggctaattggtctcttgtttagaaaatgttaatcaaattagaatccatttctgtgtaaacattgggctttggaatttttttttttgctttatatagaagtactgctttagttaatacagtattctcaatttttttgtggctagttggtagactcaaaggtggattgataacgtgtcagtggttgtgttcaggctccccctgactttaaaattttaatctaaatgtg

SEQ ID NO: 27999 - DNA, 734 bp, Macaca Mulatta
  misc_feature (1)...(734): n = A,T,C or G
ccgtggcagcggccgtggcaggctgactgggtaccggctggccgctgacccgggagaagctgcctgtctacatcagcctaggctgcagcgcgctgccgccgctgggccggcagccatggccaaggacatcctgggtgaagcagggctgcactttgatgaactgaacaagctgcgggtgttggacccagaggttacccagcagaccatagagctgaaggaagagtgcaaagactttgtggacaaaattggccagtttcagaaaatagttggtggtttaattgagcttgttgatcaacttgcaaaagaagcagaaaatgaaaagatgaaggccatcggtgctcggaacttgctcaaatctatagcaaagcagagagaagctcaacagcagcaacttcaagcactaatagcagaaaagaaaatgcagctagaaaggtaagaagtcatgatgtaaagcaagttctttacacagctgaatttccactcttccttctggagtgatcacttcttgtccttactcttcatcattgttttcccaggaatagcatctcacttgtcatcctgatttgaannnnnnnnnnnnnnnnnnnacatttgatgggaaggaaatagaaaacttaatatcaaaccacctctagtagtttgagcatgaaagggtctacgaagttggctggctttctgaaagaagactttcctagggctgagattctcatgggtggctctgggtaaggctttgc

SEQ ID NO: 28000 - DNA, 459 bp, Macaca Mulatta
atggatcaagaaactgtaggcaatgttgtcctgctggccattgtcaccctcatcagcgtggttcagaacggattctttgcccataaggtggagcacgaaagcaggacccagaatgggaggagcttccagaggacggggacacttgcctttgagcgagtctacactgccaaccagaactgtgtagatgcgtaccccactttcctcgctgtgctctggtctgcggggctactctgcagccaagttcccgctgcctttgctggactgatgtacttgttggtgaggcaaaagtactttgtcggttacctaggagagagaacgcagagcacccctggctacatatttgggaaacgcatcatactcttcctgttcctcatgtccgtcgctggcatattcaactattacctcatcttctttttcggaagtgacttcgaaaactacataaagacggtcaccaccacc

SEQ ID NO: 28001 - DNA, 633 bp, Macaca Mulatta
ggggggcggctaagtgtgtttccggtagattcccaggggcggtcggaggtgtggactgttcctgccttcatgctctgggaagatgttctaccatatctccctagagcacgaaatcctgctgcacccgcgctacttcggccccaacttgctcaacacggtgaagcagaagctcttcaccgaagtggaggggacctgcacagggaagtatggctttgtaattgctgtcaccaccattgacaatattggtgctggtgtgatccagccaggccgaggctttgtcctttatccagttaagtacaaggccattgttttccggccctttaaaggggaggtcgtggatgctgttgtaactcatgtcaacaatgttggactcttcaccataattggacctatgtcttgcttcatctctcgtctttgcatcccttccgagatagtctaagatcctatctctaacccccctgtcttcttattttatggagtaaactcttcgttatcctcgtcattttcctttttatattacactgtatttcattcctactattcatttctgtcattacactctatatatctatatgctcgcatgtgtcccccttttaattattaattactatttttctcctccatattactttt

SEQ ID NO: 28002 - DNA, 1297 bp, Macaca Mulatta
  misc_feature (1)...(1297): n = A,T,C or G
gccgaggcttctccctgcgcctgagactgtggccgcctccccaaatagcagccatgaggcgcctggggcagtgtcctcccgggccagcgacgggcaggacgccgcgttcgcccagtgcgtgctcaggnnnnnnnnnnnnnnnnnnnnnnnnnnnnnnnnnnnnnnnnnnnnnnnnnnnnnnnnnnnnnnnnnnnnnnnnnnnnnnnnnnnnnnnnnnnnnnnnnnnnnnnnnnnnnnnnnnnnnnnnnnnnnnnnnnnnnnnnnnnnnnnnnnnnnnnnnnnnnnnnnnnnnnnnnnnnnnnnnnnnnnnnnnnnnnnnnnnnnnnnnnnnnnnnnnnnnnnnnnnnnnnnnnnnnnnnnnnnnnnnnnnnnnnnnnnnnnnnnnnnnnnnnnnnnnnnnnnnnnnnnnnnnnnnnnnnnnnnnnnnnnnnnnnnnnnnnnnnnnnnnnnnnnnnnnnnnnnnnnnnnnnnnnnnnnnnnnnnnnnnnnnnnnnnnnnnnnnnnnnnnnnnnnnnnnnnnnnnnnnnnnnnnnnnnnnnnnnnnnnnnnnnnnnnnnnnnnnnnnnnnnnnnnnnnnnnnnnnnnnnnnnnnnnnnnnnnnnnnnnnnnnnnnnnnnnnnnnnnnnnnnnnnnnnnnnnnnnnnnnnnnnnnnnnnnnnnnnnnnnnnnnnnnnnnnnnnnnnnnnnnnnnnnnnnnnnnnnnnnnnnnnnnnnnnnnnnnnnnnnnnnnnnnnnnnnnnnnnnnnnnnnnnnnnnnnnnnnnnnnnnnnnnnnnnnnnnnnnnnnnnnnnnnnnnnnnnnnnnnnnnnnnnnnnnnnnnnnnnnnnnnnnnnnnnnnnnnnnnnnnnnnnnnnnnnnnnnnnnnnnnnnnnnnnnnnnnnnnnnnnnnnnnnnnnnnnnnnnnnnnnnnnnnnnnnnnnnnnnnnnnnnnnnnnnnnnnnnnnnnnnnnnnnnnnnnnnnnnnngagcctcgggctggggctgcccattgggggccccacgtgtccccgcagggttggcagggccagagcccagaccgtgttgccagccagggagctgtccctctgtgaagggcggaggctcactgagtagagggctgttgtgtaaactgagagaacggcctgtgtgtaagaggaaaagaaagtgtccctggggtgctgtctctgaggaagcggagtttcgttaccgtcttgtagccccaatgtcatcatgtaattattacccagaatgctcttccataaatctcgtgcctttgtccaagctatacaataaaatctttcagtagtgcagtagttaa

SEQ ID NO: 28003 - DNA, 590 bp, Macaca Mulatta
tccctcagatgtcaaggttcgctttgtcattcgaggctgtggacaatactattcctaccgctgccaagaaaaacgcaacacctactttgtagagtactggtatcaggcccagtgctgccagtacgattattgcaactcctggtcaagcccccaactccagagcttcctgccggagccccatgacaggcccctggccctgcctctgtctgactcccagattcagtggttctaccaggccctgaacctctcactacccgtccccaatttccatgctgggaaggagcctgatggcctggaccccgtggtcacattgcccctgaacctgggcttgtcttttgctgagctgcgccgcatgtacttgttcctcaatagttcaggacttttgcttcttcaacagcctggactctgacacctcacccttcctgaattccactctgtgcaagtatctttctgtaacaccctcagcatcctgcactgccctctctgaaaacacccatattctttggtcactgtgatttcttaggcctccctctgttgtaccactagcatctatatgactttggtgtaattttctctctcgaactttggtg

SEQ ID NO: 28004 - DNA, 220 bp, Macaca Mulatta
ccccgtcgcgggcccctgcaccccgagcatccgccccgggtggcgcgtccccgaggccaccaggccggcctcttttccccatccgtcccgtccgctcgcggtgccatgccattcctcgggcaggactggcggtcccctgggcagagctgggtgaagacggccgacggctggaagcgcttcctggatgagaagagcggcagcttcgtgagcgacctcagca

SEQ ID NO: 28005 - DNA, 139 bp, Macaca Mulatta
agcctgcgctttgctgctgccctggcccaggacctgggtctgcccgtccccagccagtggctggcagtggctgacaagatcaaggtaccctttgacgtggagcagaacttccacccggagttcgatgggtatgagcctg

SEQ ID NO: 28006 - DNA, 4904 bp, Macaca Mulatta
  misc_feature (1)...(4904): n = A,T,C or G
gaagaagaaggaaatacttgcaaaacacaaaaaatttcctggctccaagattgtgttttatccttatctccaaccaatgatcttatggtaatagctcgagagcaaaaagctgtatttctagtgaaagtggaaatatagtgataaaggaaaggaagaaatgcaatttgctgttggctggagtggttctttaaatgttgaagaagggnnnnnnnnnnnnnnnnnnnnnnnnnnnnnnnnnnnnnnnnnnnnnnnnnnnnnnnnnnnnnnnnnnnnnnnnnnnnnnnnnnnnnnnnnnnnnnnnnnnnnnnnnnnnnnnnnnnnnnnnnnnnnnnnnnnnnnnnnnnnnnnnnnnnnnnnnnnnnnnnnnnnnnnnnnnnnnnnnnnnnnnnnnnnnnnnnnnnnnnnnnnnnnnnnnnnnnnnnnnnnnnnnnnnnnnnnnnnnnnnnnnnnnnnnnnnnnnnnnnnnnnnnnnnnnnnnnnnnnnnnnnnnnnnnnnnnnnnnnnnnnnnnnnnnnnnnnnnnnnnnnnnnnnnnnnnnnnnnnnnnnnnnnnnnnnnnnnnnnnnnnnnnnnnnnnnnnnnnnnnnnnnnnnnnnnnnnnnnnnnnnnnnnnnnnnnnnnnnnnnnnnnnnnnnnnnnnnnnnnnnnnnnnnnnnnnnnnnnnnnnnnnnnnnnnnnnnnnnnnnnnnnnnnnnnnnnnnnnnnnnnnnnnnnnnnnnnnnnnnnnnnnnnnnnnnnnnnnnnnnnnnnnnnnnnnnnnnnnnnnnnnnnnnnnnnngggaagcacacaaccattattatcccatgttgcactagcagttgcaagtaaactcacttctgctttatttaatgctgccagnnnnnnnnnnnnnnnnnnnnnnnnnnnnnnnnnnnnnnnnnnnnnnnnnnnnnnnnnnnnnnnnnnnnnnnnnnnnnnnnnnnnnnnnnnnnnnnnnnnnnnnnnnnnnnnnnnnnnnnnnnnnnnnnnnnnnnnnnnnnnnnnnnnnnnnnnnnnnnnnnnnnnnnnnnnnnnnnnnnnnnnnnnnnnnnnnnnnnnnnnnnnnnnnnnnnnnnnnnnnnnnnnnnnnnnnnnnnnnnnnnnnnnnnnnnnnnnnnnnnnnnnnnnnnnnnnnnnnnnnnnnnnnnnnnnnnnnnnnnnnnnnnnnnnnnnnnnnnnnnnnnnnnnnnnnnnnnnnnnnnnnnnnnnnnnnnnnnnnnnnnnnnnnnnnnnnnnnnnnnnnnnnnnnnnnnnnnnnnnnnnnnnnnnnnnnnnnnnnnnnnnnnnnnnnnnnnnnnnnnnnnnnnnnnnnnnnnnnnnnnnnnnnnnnnnnnnnnnnnnnnnnnnnnnnnnnnnnnnnnnnnnnnnnnnnnnnnnnnnnnnnnnnnnnnnnnnnnnnnnnnnnnnnnnnnnnnnnnnnnnnnnnnnnnnnnnnnnnnnnnnnnnnnnnnnnnnnnnnnnnnnnnnnnnnnnnnnnnnnnnnnnnnnnnnnnnnnnnnnnnnnnnnnnnnnnnnnnnnnnnnnnnnnnnnnnnnnnnnnnnnnnnnnnnnnnnnnnnnnnnnnnnnnnnnnnnnnnnnnnnnnnnnnnnnnnnnnnnnnnnnnnnnnnnnnnnnnnnnnnnnnnnnnnnnnnnnnnnnnnngctttggaaagcattttggcaagtgaacgtttaccattttcttgccttagaaacatcactcagactttaatggacactttgaaaaatcaannnnnnnnnnnnnnnnnnnnnnnnnnnnnnnnnnnnnnnnnnnnnnnnnnnnnnnnnnnnnnnnnnnnnnnnnnnnnnnnnnnnnnnnnnnnnnnnnnnnnnnnnnnnnnnnnnnnnnnnnnnnnnnnnnnnnnnnnnnnnnnnnnnnnnnnnnnnnnnnnnnnnnnnnnnnnnnnnnnnnnnnnnnnnnnnnnnnnnnnnnnnnnnnnnnnnnnnnnnnnnnnnnnnnnnnnnnnnnnnnnnnnnnnnnnnnnnnnnnnnnnnnnnnnnnnnnnnnnnnnnnnnnnnnnnnnnnnnnnnnnnnnnnnnnnnnnnnnnnnnnnnnnnnnnnnnnnnnnnnnnnnnnnnnnnnnnnnnnnnnnnnnnnnnnnnnnnnnnnnnnnnnnnnnnnnnnnnnnnnnnnnnnnnnnnnnnnnnnnnnnnnnnnnnnnnnnnnnnnnnnnnnnnnnnnnnnnnnnnnnnnnnnnnnnnnnnnnnnnnnnnnnnnnnnnnnnnnnnnnnnnnnnnnnnnnnnnnnnnnnnnnnnnnnnnnnnnnnnnnnnnnnnnnnnnnnnnnnnnnnnnnnnnnnnnnnnnnnnnnnnnnnnnnnnnnnnnnnnnnnnnnnnnnnnnnnnnnnnnnnnnnnnnnnnnnnnnnnnnnnnnnnnnnnnnnnnnnnnnnnnnnnnnnnnnnnnnnnnnnnnnnnnnnnnnnnnnnnnnnnnnnnnnnnnnnnnnnnnnnnnnnnnnnnnnnnnnnnnnnnnnnnnnnnnnnnnnnnnnnnnnnnnnnnnnnnnnnnnnnnnnnnnnnnnnnnnnnnnnnnnnnnnnnnnnnnnnnnnnnnnnnnnnnnnnnnnnnnnnnnnnnnnnnnnnnnnnnnnnnnnnnnnnnnnnnnnnnnnnnnnnnnnnnnnnnnnnnnnnnnnnnnnnnnnnnnnnnnnnnnnnnnnnnnnnnnnaggtggcattgcagacagtgtagccaagtggatatttaaacaggacttcagcccagaagtattaaaactggctaatgaagaaagagatgcagaaaagccagatgaacccannnnnnnnnnnnnnnnnnnnnnnnnnnnnnnnnnnnnnnnnnnnnnnnnnnnnnnnnnnnnnnnnnnnnnnnnnnnnnnnnnnnnnnnnnnnnnnnnnnnnnnnnnnnnnnnnnnnnnnnnnnnnnnnnnnnnnnnnnnnnnnnnnnnnnnnnnnnnnnnnnnnnnnnnnnnnnnnnnnnnnnnnnnnnnnnnnnnnnnnnnnnnnnnnnnnnnnnnnnnnnnnnnnnnnnnnnnnnnnnnnnnnnnnnnnnnnnnnnnnnnnnnnnnnnnnnnnnnnnnnnnnnnnnnnnnnnnnnnnnnnnnnnnnnnnnnnnnnnnnnnnnnnnnnnnnnnnnnnnnnnnnnnnnnnnnnnnnnnnnnnnnnnnnnnnnnnnnnnnnnnnnnnnnnnnnnnnnnnnnnnnnnnnnnnnnnnnnnnnnnnnnnnnnnnnnnnnnnnnnnnnnnnnnnnnnnnnnnnnnnnnnnnnnnnnnnnnnnnnnnnnnnnnnnnnnnnnnnnnnnnnnnnnnnnnnnnnnnnnnnnnnnnnnnnnnnnnnnnnnnnnnnnnnnnnnnnnnnnnnnnnnnnnnnnnnnnnnnnnnnnnnnnnnnnnnnnnnnnnnnnnnnnnnnnnnnnnnnnnnnnnnnnnnnnnnnnnnnnnnnnnnnnnnnnnnnnnnnnnnnnnnnnnnnnnnnnnnnnnnnnnnnnnnnnnnnnnnnnnnnnnnnnnnnnnnnnnnnnnnnnnnnnnnnnnnnnnnnnnnnnnnnnnnnnnnnnnnnnnnnnnnnnnnnnnnnnnnnnnnnnnnnnnnnnnnnnnnnnnnnnnnnnnnnnnnnnnnnnnnnnnnnnnnnnnnnnnnnnnnnnnnnnnnnnnnnnnnnnnnnnnnnnnnnnnnnnnnnnnnnnnnnnnnnnnnnnnnnnnnnnnnnnnnnnnnnnnnnnnnnnnnnnnnnnnnnnnnnnnnnnnnnnnnnnnnnnnnnnnnnnnnnnnnnnnnnnnnnnnnnnnnnnnnnnnnnnnnnnnnnnnnnnnnnnnnnnnnnnnnnnnnnnnnnnnnnnnnnnnnnnnnnnnnnnnnnnnnnnnnnnnnnnnnnnnnnnnnnnnnnnnnnnnnnnnnnnnnnnnnnnnnnnnnnnnnnnnnnnnnnnnnnnnnnnnnnnnnnnnnnnnnnnnnnnnnnnnnnnnnnnnnnnnnnnnnnnnnnnnnnnnnnnnnnnnnnnnnnnnnnnnnnnnnnnnnnnnnnnnnnnnnnnnnnnnnnnnnnnnnnnnnnnnnnnnnnnnnnnnnnnnnnnnnnnnnnnnnnnnnnnnnnnnnnnnnnnnnnnnnnnnnnnnnnnnnnnnnnnnnnnnnnnnnnnnnnnnnnnnnnnnnnnnnnnnnnnnnnnnnnnnnnnnnnnnnnnnnnnnnnnnnnnnnnnnnnnnnnnnnnnnnnnnnnnnnnnnnnnnnnnnnnnnnnnnnnnnnnnnnnnnnnnnnnnnnnnnnnnnnnnnnnaatataaacaaatatcaactctgttataattaatacagatgttttactgtttatttctaattcaaacacttaaatagctttattgttaacctttgctatttaaaattgattataatttagattatgttcttataagattctatatttcctatcgaaaatgttgttgtaattcaatttaaatgtgttcatgtacggtccccatcagtagagtatagaaacaccccactctcctttagtacatgttgagaaaatgcctttgttgtcatgctccaaatcccacatgggctgccacctgggagctctggataccgaaagcttcctttcccagaggttctgctgttgccatcagaggaggatgaccatgcttgaggaggaagaatgggttcaagatcatcatattcatcagaaggggacactaaacagaacccttaacctgttgtacttgccaaaattgagaataagaggtgtgtacaatgcagcaaattaattataatgtaagttaagatttgctttttgcaagttgcaaagttgtatccacatcaggtcactgtaaaaatgtattatcttgtaaaacttatgnnnnnnnnnnnnnnnnnnnnggcaaagatactaaaaattttaagtccaacttttatttttcctacaagtgtttagaaatgcttctgg

SEQ ID NO: 28007 - DNA, 1789 bp, Macaca Mulatta
  misc_feature (1)...(1789): n = A,T,C or G
gttggcactctatgtgctttcattcctggaacccaaagacctgctacaagcggctcagacatgtcgctattggagaattttggctgaagacaaccttctctggagagagaaatgcaaagaagagggnnnnnnnnnnnnnnnnnnnnnnnnnnnnnnnnnnnnnnnnnnnnnnnnnnnnnnnnnnnnnnnnnnnnnnnnnnnnnnnnnnnnnnnnnnnnnnnnnnnnnnnnnnnnnnnnnnnnnnnnnnnnnnnnnnnnnnnnnnnnnnnnnnnnnnnnnnnnnnnnnnnnnnnnnnnnnnnnnnnnnnnnnnnnnnnnnnnnnnnnnnnnnnnnnnnnnnnnnnnnnnnnnnnnnnnnnnnnnnnnnnnnnnnnnnnnnnnnnnnnnnnnnnnnnnnnnnnnnnnnnnnnnnnnnnnnnnnnnnnnnnnnnnnnnnnnnnnnnnnnnnnnnnnnnnnnnnnnnnnnnnnnnnnnnnnnnnnnnnnnnnnnnnnnnnnnnnnnnnnnnnnnnnnnnnnnnnnnnnnnnnnnnnnnnnnnnnnnnnnnnnnnnnnnnnnnnnnnnnnnnnnnnnnnnnnnnnnnnnnnnnnnnnnnnnnnnnnnnnnnnnnnnnnnnnnnnnnnnnnnnnnnnnnnnnnnnnnnnnnnnnnnnnnnnnnnnnnnnnnnnnnnnnnnnnnnnnnnnnnnnnnnnnnnnnnnnnnnnnnnnnnnnnnnnnnnnnnnnnnnnnnnnnnnnnnnnnnnnnnnnnnnnnnnnnnnnnnnnnnnnnnnnnnnnnnnnnnnnnnnnnnnnnnnnnnnnnnnnnnnnnnnnnnnnnnnnnnnnnnnnnnnnnnnnnnnnnnnnnnnnnnnnnnnnnnnnnnnnnnnnnnnnnnnnnnnnnnnnnnnnnnnnnnnnnnnnnnnnnnnnnnnnnnnnnnnnnnnnnnnnnnnnnnnnnnnnnnnnnnnnnnnnnnnnnnnnnnnnnnnnnnnnnnnnnnnnnnnnnnnnnnnnnnnnnnnnnnnnnnnnnnnnnnnnnnnnnnnnnnnnnnnnnnnnnaacaagaactttgtaattaccagctcagatgatggaactgtaaaactatgggacttgaaaacgggtgaatttattcgaaacctagtcacattggagagtggggggagtgggggagtcgtgtggcggatcagagcctcaaacacaaagctggtgtgtgcagttgggagtcggaatgggactgaagaaaccaagctgctggtgctggactttgatgtggacatgaagtgaagagcagaaaagatgaatttgtccaattgtgtagacgatatactccctgcccttccccctgnnnnnnnnnnnnnnnnnnnnnnnnnnnnnnnntcccttgttctcagtggtgcaggatgttggcttggggcaacagattgaaaagacctacagactaagaaggaaaagaagaagagatgacaaaccataactgacaagagaggcgtctgctgtctcatcacataaaaggcttcacttttgactgagggcagctttgcaaaatgagactttctaaatcaaaccaggtgcaattatttctttattttcttctccagtgctcattgggcagtgttaatgctgaaacatcattacagattctgctagcctgttcttttaccactgacaactagacacctagaaaggaactgcaataacatcaaaacaagtactggttgactttctaattagagagcatctgcaacaaaaagtcatttttctggagtgaaaaagcttaaaaaaattactgtgaattgtttttgtacagtt

SEQ ID NO: 28008 - DNA, 562 bp, Macaca Mulatta
  misc_feature (1)...(562): n = A,T,C or G
agactacggcatgaacatgatgcacatccacgtgttcgcagcctattttgggctgactgtggcctggtgcctgccaaagcctctactcaagggaacagaggataaatatcagacaacaacgagccccagtttgtttgccatgctggnnnnnnnnnnnnnnnnnnnnnnnnnnnnnnnnnnnnnnnnnnnnnnnnnnnnnnnnnnnnnnnnnnnnnnnnnnnnnnnnnnnnnnnnnnnnnnnnnnnnnnnnnnnnnnnnnnnnnnnnnnnnnnnnnnnnnnnnnnnnnnnnnnnnnnnnnnnnnnnnnnnnngacttatatgcacaatgcagcgttggcaggaggtgtggctctgagtgcctcatgtcacgtgatccattctccttggattgccatggtgctaggtcttgtggctgggctgatctccatcgggggagccaagtgcctgccggnngtgtgttttaaccgagtgctggggattcacgagagccacagcgtgcactacaccttcggcttgccggctctgcttggagagatcacctacattgtgctgatggcgcttc

SEQ ID NO: 28009 - DNA, 2492 bp, Macaca Mulatta
  misc_feature (1)...(2492): n = A,T,C or G
gcccgcccccttggaggggacaggaagcgttcgtcatggcccggaagcagtgttgactgtacacgcgcgctgcggcatggcggctcgccgctccggtccgctcaagcagcagaataaagctcataaaggcgggcggcatcggggtcggggatctgcacagcgggacggcaagggnggccgtctagcactgaaaaccctaagcaagaaggtgagaaaagaactcagcagagtcgaccagaggcatcgcgccagccagctccgaaagcagaagaaggaggcggtnnnnnnnnnnnnnnnnnnnnnnnnnnnnnnnnnnnnnnnnnnnnnnnnnnnnnnnnnnnnnnnnnnnnnnnnnnnnnnnnnnnnnnnnnnnnnnnnnnnnnnnnnnnnnnnnnnnnnnnnnnnnnnnnnnnnnnnnnnnnnnnnnnnnnnnnnnnnnnnnnnnnnnnnnnnnnnnnnnnnnnnnnnnnnnnnnnnnnnnnnnnnnnnnnnnnnnnnnnnnnnnnnnnnnnnnnnnnnnnnnnnnnnnnnnnnnnnnnnnnnnnnnnnnnnnnnnnnnnnnnnnnnnnnnnnnnnnnnnnnnnnnnnnnnnnnnnnnnnnnnnnnnnnnnnnnnnnnnnnnnnnnnnnnnnnnncactagctgtccaggggatttctggcctcccactgaagaaacaaatagatgccaggaagaagctaagtaaagcagtggagaagcgctttctgcatgacaaattcctcttgttagacactcaacaggaggcagggatgctgcttaggcagttggctaaccagaagcaacagcatcttgcgtttcgagatcggcgggcctacctgtttgcccatgctgttgattttgttcctagtgaagagaataacttggtgggcaccttgaaaatttcaggctatgttcgagggcagactgtgaatgtcaataggttgctgcatatcgttggacatggcgatttccagatgaaacagatagatgcccctggagaccctttccctttaaatcctagaagaattaaaccccagaaggacccagacatggcaatggannnnnnnnnnnnnnnnnnnnnnnnnnnnnnnnnnnnnnnnnnnnnnnnnnnnnnnnnnnnnnnnnnnnnnnnnnnnnnnnnnnnnnnnnnnnnnnnnnnnnnnnnnnnnnnnnnnnnnnnnnnnnnnnnnnnnnnnnnnnnnnnnnnnnnnnnnnnnnnnnnnnnnnnnnnnnnnnnnnnnnnnnnnnnnnnnnnnnnnnnnnnnnnnnnnnnnnnnnnnnnnnnnnnnnnnnnnnnnnnnnnnnnnnnnnnnnnnnnnnnnnnnnnnnnnnnnnnnnnnnnnnnnnnnnnnnnnnnnnnnnnnnnnnnnnnnnnnnnnnnnnnnnnnnnnnnnnnnnnnnnnnnnnnnnnnnnnnnnnnnnnnnnnnnnnnnnnnnnnnnnnnnnnnnnnnnnnnnnnnnnnnnnnnnnnnnnnnnnnnnnnnnnnnnnnnnnnnnnnnnnnnnnnnnnnnnnnnnnnnnnagagatgtttccagacgaagtggacaccccccgtgatgtggctgctagaattcnnnnnnnnnnnnnnnnnnnnnnnnnnnnnnnnnnnnnnnnnnnnnnnnnnnnnnnnnnnnnnnnnnnnnnnnnnnnnnnnnnnnnnnnnnnnnnnnnnnnnnnnnnnnnnnnnnnnnnnnnnnnnnnnnnnnnnnnnnnnnnnnnnnnnnnnnnnnnnnnnnnnnnnnnnnnnnnnnnnnnnnnnnnnnnnnnnnnnnnnnnnnnnnnnnnnnnnnnnnnnnnnnnnnnnnnnnnnnnnnnnnnnnnnnnnnnnnnnnnnnnnnnnnnnnnnnnnnnnnnnnnnnnnnnnnnnnnnnnnnnnnnnnnnnnnnnnnnnnnnnnnnnnnnnnnnnnnnnnnnnnnnnnnnnnnnnnnnnnnnnnnnnnnnnnnnnnnnnnnnnnnnnnnnnnnnnnnnnnnnnnnnnnnnnnnnnnnnnnnnnnnnnnnnnnnnnnnnnnnnnnnnnnnnnnnnnnnnnnnnnnnnnnnnnnnnnnnnnnnnnnnnnnnnnnnnnnnnnnnnnnnnnnnnnnnnnnnnnnnnnnnnnnnnnnnnnnnnnnnnnnnnnnnnnnnnnnnnnnnnnnnnnnnnnnnnnnnnnnnnnnnnnnnnnnnnnnnnnnnnnnnnnnnnnnnnnnnnnnnnnnnnnnnnnnnnnnnnnnnnnnnnnnnnnnnnnnnnnnnnnnnnnnnnnnnnnnnnnnnnnnnnnnnnnnnnnnnnnnnnnnnnnnnnnnnnnnnnnnnnnnnnnnnnnnnnnnnnnnnnnnnccatggccacatgaaatgcagctttgacgggaagctaaaatctcaagacacagtactgatgaacctctataaacgagttttccccaaatggacttacgatccatatgtaccagaaccagtaccctgggtgaaaagtgagagttcttcagtagtacctcaggagggcatggagtaa

SEQ ID NO: 28010 - DNA, 684 bp, Macaca Mulatta
gagagtgagagtagaagctgaaagacttcttgggttcttggcctggaactgggactaggacagtgtcacttctgctaaattctctccgtcagagcaaatcacaaggctttgctcagattcaagggatgagaaacagacgacatgtcttgatgaggggaaccacgcagagcttgtggccatttttcacctatcacaaataattttggatgggcaaataaaagtatttccctcttccccctttctctctctctgtttcacgggcctcactctgccaagtctgaaggcactaagacattgtcttggccctcagggtctaggggaagaggtgttggggcaggaagtgagtctctccaaggactggacccactgtagtaggggcacctccttgctgcactgatggtatggggttaggccaggtaggacattccagaggggcttccgaaaatcaagagtccccagggaaagggaacagagtaaggcaggccttgttctcactgccctctaagggaacttggtcacttggcacttttaagcctcagtttccccagttcaataataaggacaacaacttttcccacgcattctctttcccagggaaagatgactgaggtgaccaataatagaactgaaaagggagagtgtcctgagtgcaatgttgtatcctggattggatcttggaacaaa

SEQ ID NO: 28011 - DNA, 381 bp, Macaca Mulatta
aaagtctgtaaatggttgtctacacttaaggaaagtgaaaccttcgcatcagccgtgtgactgaggccagcgctgtgtgtcgcagggctgcctgaccatggtccccagtgagaaggaagtggaacccaagtgatgctgagcatccccctgcagaccgcagagcagaccctggcaccaggagggagcaggtgtgggcgtctcctcccaactggaattgtaataaatacatctaaataaaacgtgccttgggagtgtacagatctttccacactaatacctgagttgtgttttcactaaagctggattgaagaaaaagccgcaagtgtacctcctgaggcctcagacacgcccaggtgtgggcgccttgcgtgctggggtgcg

SEQ ID NO: 28012 - DNA, 165 bp, Macaca Mulatta
gctcttctctggatcttctcccttctctccatttcgcccgcaaaggaagccctgccctttcacatccttctcctcgaaagcctccctggacttgtgattggattacagcatcctcagaggctcgccaaggcactgtgtattcagcagtgtatcagccagtctgct

SEQ ID NO: 28013 - DNA, 715 bp, Macaca Mulatta
gcacgaggcagagagattaatttagtggccggctggaaatgctggctgacggtgcagtctggatgctcgccccatggttccactatctggctgcgtgatcttgaacaagttccttctggtgtctgctttctccgtggtaaaccacaaggctgttgcatgggctgatgaagatcatatacgtgaaaattctttgaaaacgtataaagcactatacaaattcgaaactccactgagccattatccttgctatgatggtggtgttttggggatgagagggtgctgtccatttctcatgttttccattgtgtgaaacaaagaaggttaccaagaagcctttcctgtagccttctgtaggaattcttttggggaagtgaggaagccaggtccacggtctgttcttgaaacagaagcctaacacactccaagatacggacacacgggagccactggcagaagggactccacgaaatgttgcatggatgttttaaccattgttgggtttctcttatcaaacttgggcccttcccttcttggtttccgaaggcattttattgcttgggttatatgttcactgtccccctaatattagggagtaaaatggataccaagttgatttagtgtttttgcctctgtcgtggctttcatgttattaaacgtacgcatgtgaagaaagggtgtttctctgttttatattcaactcataagactctgggat

SEQ ID NO: 28014 - DNA, 1359 bp, Macaca Mulatta
  misc_feature (1)...(1359): n = A,T,C or G
ctcttgagcagaggagtcagcactgcaagcctgaagaaggccttgaggcccaaggagatgccctgggcctggtgggtgcgcaggctcctgctactgaggagcaggagattgcctcctcctcttctactgtagtggaagtcacccagggggaggtgcctgctgctgagtcaccgggtcctccccagagtcctcagggagcctccaccctccccactaccaacaactacacactctggagccaatctgatgaggactccagcagccaagaagaggaggggccaagcacctttcctgacctggagtccggcttccaggcagcactcagtaggaaggtggctgagttggttcattttctgctcctcaagtatcgagccagggagccagtcacaaaggcggaaatgctggagagtgtcatgagaaattgccagtacttctttcctgtgatcttcagcaaagcatctgattccttgcagctggtctttggcatcgagctgatggaagtggacccagtcggccacttgtacatctttgtcacctgcctgggcctctcctacgatggcctcctgggcgacaatcagatcatgcccaaggcaggcctcctgataatcgtcctggccataatcgcaaaagaaggcgactgtgctcctgaggagaaaatctgggaggagctgaatgtgttggaggtgtttgacgagaaggaagacagtatcttcgcggatcccaggaagctgctcacccaagatttcgtgcaggaaaactacctggagtaccggcaggtgcctggcggtgatcctgcatgctacgagttcctgtggggtccaagggccctccttgaaaccagctatgtgaaagtcctgtaccatatgctaaaaatcagtggaggacctcacttttcctacccacccctccatgaatgggctttgagagagggggaagagtgnnnnnnnnnnnnnnnnnnnnnnnnnnnnnnnnnnnnnnnnnnnnnnnnnnnnnnnnnnnnnnnnnnnnnnnnnnnnnnnnnnnnnnnnnnnnnnnnnnnnnnnnnnnnnnnnnnnnnnnnnnnnnnnnnnnnnnnnnnnnnnnnnnnnnnnnnnnnnnnnnnnnnnnnnnnnnnnnnnnnnnnnnnnnnnnnnnnnnnnnnnnnnnnnnnnnnnnnnnnnnnnnnnnnnnnnnnnnnnnnnnnnnnnnnnnnnnnnaatgacagtagtcacacatagtgctgtttatatagtttaggagtaagagtcttgttttttattcagattaggaaatccattccattttgtgaattgtgacataataacagcggtgaaataagtatttacttagaattgtgaaagaattagcaataacatacat

SEQ ID NO: 28015 - DNA, 384 bp, Macaca Mulatta
acagaccccacagggtgtctagatgactggaccatggccttggcctccctgaggccctgtctgtgtccagctcttcctttgagcagagagccaccctctcctcttctgaatgacctggtgctgcctcatgtgccctggagggcgcctgtgcccccatgggaaggatccccctccttgttttgccacattccgtctccctctgagcagcgtccaggttgagggacctgaacgactgtagaacaaaccacaaattagtctctaggtttttgtcatcacccgtcatggaaagaaaagaaaaattcttttcttcaacaggcacttatgttttccataaatccaagccagttacaataaagctgctagaaattctacgaagagtagagg

SEQ ID NO: 28016 - DNA, 180 bp, Macaca Mulatta
gaatgctatgctggactttgtgttcacagtagatgaccctgtcgcatggcattcaaagaacctgaagaaaaattggagacactactctttcttaaaagttttagggcccaagatgatcacatccatccagaataactatggcgctggagtttactacaattcattgatcatgtgtgatgg

SEQ ID NO: 28017 - DNA, 93 bp, Macaca Mulatta
gttattataagatactcacctctaaacttcattccaatgcttcaaactgcaagaactttgagaattttaaaaattattcctttaaatcaaggt

SEQ ID NO: 28018 - DNA, 1472 bp, Macaca Mulatta
  misc_feature (1)...(1472): n = A,T,C or G
gggctctaccggcgggatttgatggcgtgatgtctcacagaaagttctcggctcccagacatgggtcgctcggcttcctgcctcggaagcgcagcagcaggcatcgcgggaaggttaagagcttccctaaagatgatccgtctaagccggtccacctcacagccttcctgggatacaaggctggcatgacccacatcgtgcgggaagtcgacaggccaggatctaaggtgaacaagaaggaggtggtggaggctgtaaccattgtggagacgccacccatggtggttgtgggcattgtgggctacgtggaaacccctcgaggcctccggaccttcaagactgtcttcgctgagcacatcagtgatgaatgcaagaggcgtttctataagaactggcataaatctaagaagaaggcctttaccaagtactgcaagaaatggcaggatgaggatggcaagaagcagctggagaaggacttcagcagcatgaagaagtactgccaagtcatccgtgtcattgcccacacccagatgcgcctgcttcctctgcgccagaagaaggcccacctgatggagatccaggtgaacggaggcaccgtggccgagaagctggactgggcccgcgagaggctcgagcagcaggtacctgtgaaccaagtgtttgggcaggatgagatgatcgacgtcatcggggtcaccaagggcaaaggctacaaaggggtcaccagtcgttggcacaccaagaagctgccccgcaagacccaccgaggcctgcgcaaggtggcctgtattggggcatggcatcctgctcgtgtggccttctctgtggcacgtgctgggcagaaaggctaccatcaccgcactgagatcaataagaagatctttaagattggccagggctacctttatcaaggatggcaaggctgatatcagaacaatggcctccactggactatgaacttgttctggacaagagcatccaaccctctgggtggctttgtccactatggtgaagtgaccaatgactttgtcatgctgaaaggctgtgtggtgggaaccaagaagcgggtgctcaccctccgcaagtccttgctggtgcagacgaagcggcgggctctggagaagattgaccttaagttcattgacaccacctccaagtttggccatggccgcttccagaccatggaagagaagaaagcattcatgggaccacttcaagaaagaccgaatttgcaaaggaagaaaggagcttaatgcgaaggagcagatttttgcggctgggtgggggtctcaataaaaagttttttttcccacgcncnnnaaacnnnnnnnnnnnnnnnnnnnnnnnnnnnctcgggccggcccctgggcccttcgaaaaaaccttttctaaaaaccatttctttttgtggccccgcggggcccccagtaagggtaaaagtggaaacatgggggccaataagcctggtttcc

SEQ ID NO: 28019 - DNA, 71 bp, Macaca Mulatta
tattccaggcaattatcgttgcacttgttttgatggcttcatgttggctcatgatggtcataattgtcttg

SEQ ID NO: 28020 - DNA, 456 bp, Macaca Mulatta
ggcttaccactcttctctcatggatcctgacaccaaactcatcggaaacatggcactgttacctattagaagtcaattcaaaggacctgcacccagagagacaaaagatacagatattgtggatgaagccatctattacttcaaggccaatgtcttcttcaaaaactatgaaattaagttcctgtgaggaggatggtcaggggaaggtagaagcaggagaccaaaaaggagatgggaaaatgaaaaccagaaatgttctctgcaatcctgctgtgagaaagtgacaaggaaaatcagcaaatttccttgatgaatgaagctgataggaccttgatatatataactctctatatttctgaatgtctgaagaaactccaaaagtgcaattccaaaagccaaggtgagacagaaatgtatacattgggaatcactaattgtcccattcctggagagcct

SEQ ID NO: 28021 - DNA, 947 bp, Macaca Mulatta
  misc_feature (1)...(947): n = A,T,C or G
tctgctaacctgaagctgagtgagaagcaggaggtgaagaaggannngtgacagagatcctgacggctctgtttctgatgtcgtgctcccacacgaggacagccctgctctccggcgggcagaggaagcgtctggccatcgccctggagctggtcaataacccgcctgtcatgttctttgatgagcccaccagnnnnnnnnnnnnnnnnnnnnnnnnnnnnnnnnnnnnnnnnnnnnnnnnnnnnnnnnnnnnnnnnnnnnnnnnnnnnnnnnnnnnnnnnnnnnnnnnnnnnnnnnnnnnnnnnnnnnnnnnnnnnnnnnnnnnnnnnnnnnnnnnnnnnnnnnnnnnnnnnnnnnnnnnnnnnnnnnnnnnnnnnnnnnnnnnnnnnnnnnnnnnnnnnnnnnnnnnnnnnnnnnnnnnnnnnnnnnnnnnnnnnnnnnnnnnnnnnnnnnnnnnnnnnnnnnnnnnnnnnnnnnnnnnnnnnnnnnnnnnnnnnnnnnnnnnnnnnnnnnnnnnnnnnnnnnnnnnnnnnnnnnnnnnnnnnnnnnnnnnnnnnnnnnnnnnnnnnnnnnnnnnnnnnnnnnnnnnnnnnnnnnnnnnnnnnnnnnnnnnnnnnnnnnnnnnnnnnnnnnnnnnnnnnnnnnnnnnnnnnnnnnnnnnnnnnnnnnnnnnnnnnnnnnnnnnnnnnnnnnnnnnnnnnnnnnnnnnnnnnnnnnnnnnnnnnnnnnnnnnnnnnnnnnnnnnnnnnnnnnnnnnnnnnnnnnnnnnnnnnnnnnnnnnnnnnnnnnnnnnnnnnnnnnnnnnnnnnnnnnnnnnnnnnnnnnnnnnnnnnnnnnnnnnnntccccctagaaatggcggtcttcatgatggagcacctcaactactggtacagcctcaaagcgtattacctggccaagaccatggctgacgtgccctttcaggtg

SEQ ID NO: 28022 - DNA, 595 bp, Macaca Mulatta
ttcttgaaatccagtagtgcccaggtctaagttgagatgggtgaatgaggaaaataaggaacagagaagaggcaagatgatgcctaggtttgtgatgcctctttcctggttctcttgtgtccacaggaggagtcatggggcactacgtcttagctgaacgtgagtgacacgcagcctgcagactcatcatgggaaggacacaaaactagagattcaaaaagggagtgcacttatggagctcttcatgtttcaggacagagttgaacctaaacatagaaatcgcctgaagaactccttgcttttagctttctctgttcatttcctcaaaaatatttccccatttaggtttctgattcctgcacgccagtgatccccagctgtgacctctcccctggaactgcctctcatgaacctcaagctgcatctgcttccttcatttcctccatcacctcagacacatacacctatgtcatttcatttcctatttttggaagaggactccttaaatttgggggacttacatgattcattttaacatctcagaaaagctttgaatcctgggacatggctagtcaggacattaccagaattttac

SEQ ID NO: 28023 - DNA, 748 bp, Macaca Mulatta
ggatcaaaaatatgtctcttgaaaaccaagtcaagtacctagagatgaaagccacaaatgagaaactgttacaggaattagatacacttcaacaacaattggattcacagaacatgaaaaaagagagcatggaagcagaaatagctcactcccaggtgaaacaggaggctgtattgctgcatgaaaagctttatgagttggagtcccatcgagatcaaatgattgcagaagacaaaagcataggatctccaatggaagagagagagaaattacttaagcaggttaaagatgataatcaggaaatagccagcatggaaagacagttaacagatataaaagaaaagataaatcagtttaatgaagaaattagacaacttgatatggatttagaggaacaccaaggtgaaatgaaccagaaatacaaggagctaaaaaaaagggaggaaaatatggacacttttattgagacttttgaggaaacaaagaatcaggaactggaacgaaaggcccagatagaaaccaacattgtttcactcttggagcactgtaatcgaaatataaatcgtatgaaaaagaatatcttctattcccaatcaaaagctaaagaatgatccaggaatgacctcaattttttaaatccttctgaaagtggcaaaaatcccaacggtaacagcctccggaaaattggaactttcaaaaagttccagcgttctgtcaaattggaattctgcaccaaaaatgggcaaca

SEQ ID NO: 28024 - DNA, 753 bp, Macaca Mulatta
  misc_feature (1)...(753): n = A,T,C or G
tttaaattacctaaagaactaatccatggaacaattcattgtaaagctggagtgcctgaaatattgatagaagaggtttacactttattaacacatcgaganaattaaaagtatccaggatgactctgtgaatttcacggactatagttaccagaggcatttacccctggtttccaggtctacagcttcaaagtctattaaagataacattaggttatcagaattactaagcaatcccaacatgctnnnnnnnnnnnnnnnnnnnnnnnnnnnnnnnnnnnnnnnnnnnnnnnnnnnnnnnnnnnnnnnnnnnnnnnnnnnagaatggtttgatgtgaaaccaacagtgggagaagttactctcaatcaccttcctgctcaagcctgtgggcacagatataattccaaagttacaagaggaagagttgcccttgttttacnnnnnnnnnnnnnnnnnnnnnnnnnnnnnnnnnnnnnnnnnnnnnnnnnnnnnnnnnnnnnnnnnnnnnnnnnnnnnntgaaacctatcagaaacatggaaaagaaaccttgaaaagcacctgtcaaatggctttgaagaaatgatgccatcatctctcgccataataaagaatcgctcagtattgaatgcatttcaataataaatagagtggtgtcttgtccataattgtgttaaagaacatttcttttcccttcaatttgtttattaaactcctatgccaggtactgttgaaaatacaaaattaaataaat

SEQ ID NO: 28025 - DNA, 1900 bp, Macaca Mulatta
  misc_feature (1)...(1900): n = A,T,C or G
ccatttgcgtaagtggccttcgggcatctgcgtgctggggaccgacagtgggggtgtgttaggtggatctgtatggagcacattgctgccgctggctaggacagggtagaaaggggggcgtggctacagcctgacccgtgggcaccatcctaccctttattctgtgcttcaaagggtcagtcgtgctggtgtctgtgggctcatgactcagacggtgagctctgaccttcctgagccagggctttgctgtggttctgcctggctcaggagctctgggacaaggggaccgctccaggtctacacctaaggtgtggcagggcccctcgacactcctgtgtactagtgtcgtctttcccattgaaatgactgtgaggactagaatgtgcacgtgcagatgggcagctacttgtctgccttggccctttattacataacttgctgggtttgtggagatgtcatccccccagcagtcagagcccgtttgtgatgtcgtggggctggttacatgactgccaaggggtgctgctggccacactgcactagcaagtttgccagatggaggacaagccatcactgagtgtggctctctgtgaagaaagaaattcgagaggacagggtcatggcttggacagggtgccttttcctccccagttgcactcagagacctaccttcacccagcagatccttcccctgcctgggatgacccnnnnnnnnnnnnnnnnnnnnnnnnnnnnnnnnnnnnnnnnnnnnnnnnnnnnnnnnnnnnnnnnnnnnnnnnnnnnnnnnnnnnnnnnnnnnnnnnnnnnnnnnnnnnnnnnnnnnnnnnnnnnnnnnnnnnnnnnnnnnnnnnnnnnnnnnnnnnnnnnnnnnnnnnnnnnnnnnnnnnnnnnnnnnnnnnnnnnnnnnnnnnnnnnnnnnnnnnnnnnnnnnnnnnnnnnnnnnnnnnnnnnnnnnnnnnnnnnnnnnnnnnnnnnnnnnnnnnnnnnnnnnnnnnnnnnnnnnnnnnnnnnnnnnnnnnnnnnnnnnnnnnnnnnnnnnnnnnnnnnnnnnnnnnnnnnnnnnnnnnnnnnnnnnnnnnnnnnnnnnnnnnnnnnnnnnnnnnnnnnnnnnnnnnnnnnnnnnnnnnnnnnnnnnnnnnnnnnnnnnnnnnnnnnnnnnnnnnnnnnnnnnnnnnnnnnnnnnnnnnnnnnnnnnnnnnnnnnnnnnnnnnnnnnnnnnnnnnnnnnnnnnnnnnnnnnnnnnnnnnnnnnnnnnnnnnnnnnnnnnnnnnnnnnnnnnnnnnnnnnnnnnnnnnnnnnnnnnnnnnnnnnnnnnnnnnnnnnnnnnnnnnnnnnnnnnnnnnnnnnnnnnnnnnnnnnnnnnntgctctaccagcaagtcctgtgatggtgcccgatcccgccatggcaagtgacaacactccagtgacccagccggccggcgagtggtcagagggcagccaggctcacgtcactccggtggccgctgtccctgggcctgcagcgcagccattcctctctgtccccggatctcccacccagatgaattcttacaggcctgtggtggcccttcccacagcgtcccccagtacccttgccatggagaccacaggacttcctgcgcctggcatgctgcccttttgccatctctgggtgccggtgaccctagtggctgctggggctgcacagcctgttgtctccatggccatgttcccccatcccctagctctgcaccaccattgcccccacagccaccgcacatcacagtacatgccagctagcgatggccccaggcatacccagactacgcagaccagcgcacatagaggcaagcatttgggcagaatatgtgccggtcaataaatgtgtcacaaaatgagtaattttctgactgcacaaa

SEQ ID NO: 28026 - DNA, 1978 bp, Macaca Mulatta
  misc_feature (1)...(1978): n = A,T,C or G
cggagggtgaggagcggactcgggccgagactgaagggctgggtgggttcggagcggcgctccgggggcccgcggaggacgagggagggagagaacctaaggggctgnnnnnnnnnnnnnnnnnnnnnnnnnnnnnnnnnnnnnnnnnnnnnnnnnnnnnnnnnnnnnnnnnnnnnnnnnnnnnnnnnnnnnnnnnnnnnnnnnnnnnnnnnnnnnnnnnnnnnnnnnnnnnnnnnnnnnnnnnnnnnnnnnnnnnnnnnnnnnnnnnnnnnnnnnnnnnnnnnnnnnnnnnnnnnnnnnnnnnnnnnnnnnnnnnnnnnnnnnnnnnnnnnnnnnnnnnnnnnnnnnnnnnnnnnnnnnnnnnnnnnnnnnnnnnnnnnnnnnnnnnnnnnnnnnnnnnnnnnnnnnnnnnnnnnnnnnnnnnnnnnnnnnnnnnnnnnnnnnnnnnnnnnnnnnnnnnnnnnnnnnnnnnnnnnnnnnnnnnnnnnnnnnnnnnnnnnnnnnnnnnnnnnnnnnnnnnnnnnnnnnnnnnnnnnnnnnnnnnnnnnnnnnnnnnnnnnnnnnnnnnnnnnnnnnnnnnnnnnnnnnnnnnnnnnnnnnnnnnnnnnnnnnnnnnnnnnnnnnnnnnnnnnnnnnnnnnnnnnnnnnnnnnnnnnnnnnnnnnnnnnnnnnnnnnnnnnnnnnnnnnnnnnnnnnnnnnnnnnnnnnnnnnnnnnnnnnnnnnnnnnnnnnnnnnnnnnnnnnnnnnnnnnnnnnnnnnnnnnnnnnnnnnnnnnnnnnnnnnnnnnnnnnnnnnnnnnnnnnnnnnnnnnnnnnnnnnnnnnnnnnnnnnnnnnnnnnnnnnnnnnnnnnnnnnnnnnnnnnnnnnnnnnnnnnnnnnnnnnnnnnnnnnnnnnnnnnnnnnnnnnnnnnnnnnnnnnnnnnnnnnnnnnnnnnnnnnnnnnnnnnnnnnnnnnnnnnnnnnnnnnnnnnnnnnnnnnnnnnnnnnnnnnnnnnnnnnnnnnnnnnnnnnnnnnnnnnnnnnnnnnnnnnnnnnnnnnnnnnnnnnnnnnnnnnnnnnnnnnnnnnnnnnnnnnnnnnnnnnnnnnnnnnnnnnnnnnnnnnnnnnnnnnnnnnnnnnnnnnnnnnnnnnnnnnnnnnnnnnnnnnnnnnnnnnnnnnnnnnnnnnnnnnnnnnnnnngtgctggaggaggtggcggcggccgtggagggcctgcgtgagctggagcgaagccggcggctctgtcatgaggacgtggaggcgctggccgccatctacgaggagaaggaggcctggtaccgcgaggagagcgacagcctgggccaggacctgcggcggctgcggcaggagctgctcaagaccgaggcactcaagcggcaggcgcaggaggaggccaagggcgcgctgctggggaccagcggcctcaagcgccgcttcagccgcctagagaaccgctacgaggcgctggccaagcaggtggcctccgagatgcgcttcgtacaggacctggtgcgcgccctggagcaggagaagctgcagggcgtggagtgcgggctgcgctaggcctactgggatgggccaggccccaggacagctggagctcggccttcggtgggggcgcttacttggacgctgctcctcctgtcccgttccagcccttgtacaccgcccccaggctggaggcggagtgggaagagctggagnnnnnnnnnnnnnnnnnnngcaagggtgggtgtgggacggggctgcttctctgcacagcctccaagccggccttcaccttcgctcctgcatcatcaatgacgctgggaccctccaggcagcgtggcctctggcgctgtgagggttgggacccannnnnnnnnnnnnnnnnnnnnnnnnnnnnnnnnnnnnnnnnnnnnnnnnnnnnnnnnnnnnnnnnnnnnnnnnnntcggcggggtgctgcccgctgctgccactggcccaggaggaggtcg

SEQ ID NO: 28027 - DNA, 896 bp, Macaca Mulatta
aggaaggaggctggtaaagtgggaggactgatcagtgctacccctccccctcacagagtctgagtcagcccatcctgttgggagccctggagagagtggcacatcagggtggcgaaggggggacactcccagccccctctgtctcttgctattactgctgctgctgattcttcgtcttctgcgaattctgtgaaccaagcagaccttgcctctcaccccaaggagccagagccctcccaagatcccctgaaggagggggatccttgctgcctgcactgggggtacccattcagaccgacaagatggagcattgatgggggagatcagagggtctgaggtgacccttgcaggtgcctgtcccctcatcacaggctaaagaagagcagcagacagccctggacactctgaagcagaggcaagacaaacataggtgctttgcaggctgctctgagggtctcagcccatcccccaggaagactgggatttggtacgatcaaatcctcaagccagctgggggccaaggctgaagacctggggacaggtggattgctggaccagggcaaagaagaagccctgccatctgtgccctgtgggcctcttccctggggcagcaccttgccctccccacggggtcactcacttgtcttctgtgaagacggactcttcatgaggttgaatttcatgccagtttgtatttttataagtatctagaccaaaccttcaataaaccacccatctttttgttgctctccccaacctactgccctcaggccccttccctgatagcaggactccctgtggcctgtactcttcagcttagcttggcctgacctccatgccagctgtgctcaggccatccatgccaggcctcagtgggcacccctctgggcaatgtg

SEQ ID NO: 28028 - DNA, 176 bp, Macaca Mulatta
agtttacagacaaggatcagcagccctctggaagtgagggagaggatgatgatgtggaggctgccttgaagaaagaagttggtgacattaaggcatctacagagttgaggctaagaagattccagtcagtggaaagtggagcaaataacgtcgtcttcatcaggacacttgggata

SEQ ID NO: 28029 - DNA, 1032 bp, Macaca Mulatta
  misc_feature (1)...(1032): n = A,T,C or G
acctacaggtgcccggcatggaggagactctcttgtaacagctgacttggtcgcggcatggtgaatccggcagcatggccatcttccaccaaacgcagggacccaactattcggagcccaaacggctggaattcgtggctgccagactgggcacagagctccgggatgcctcgctgaggatgttcggcgtgcgtgtcgaggatgaaggcaactacacctgcctgttcgtcnnnnnnnnnnnnnnnnnnnnnnnnnnnnnnnnnnnnnnnnnnnnnnnnccaagccacagaacacagctgaagttcagaaggtccagctcactggaaagccagtgcccgtggcccgctgcgtctccacagggggtcgcccgccggcccatatcacctggcactcagacctgggcgggatgcccaataccagccaggcgccagggttcctgtctggcacagtcactgtcaccagcctcnnnnnnnnnnnnnnnnnnnnnnnnnnnnnnnnnnnnnnnnnnnnnnnnnnnnnnnnnnnnnnnnnnnnnnnnnnnnnnnnnnnnnnnnnnnnnnnnnnnnnnnnnnnnnnnnnnnnnnnnnnnnnnnnnnnnnnnnnnnnnnnnnnnnnnnnnnnnnnnnnnnnnnnnnnnnnnnnnnnnnnnnnnnnnnnnnnnnnnnnnnnnnnnnnnnnnnnnnnnnnnnnnnnnnnnnnnnnnnnnnnnnnnnnnnnnnnnnnnnnnnnnnnnnnnnnnnnnnnnnnnnnnnnnnnnnnnnnnnnnnnnnnnnnnnnnnnnnnnnnnnnnnnnnnnnnnnnnnnnnnnnnnnnnnnnnnnnnnnnnnnnnnnnnnnnnnnnnnnnnnnnnnnnnnnnnnnnnnnnnnnnnnnnnnnnnnnnnnnnnnnnnnnnnnnnnnnnnnnnnnnnnnnnnnnnnnnnnnnnnnnnnnnnnnnnnnnnnnnnnnnnnnnnnnnnnnnnnnnnnnnnnnnnnnnnnnnnnnnnnnnnnnnnnnnnnnnnnnnnngagcatgccagcgcctcggctaatgg

SEQ ID NO: 28030 - DNA, 785 bp, Macaca Mulatta
  misc_feature (1)...(785): n = A,T,C or G
agcaaacggatgtttcagaagacagcgatgatgatgtggatgaagatgaggtttttggtttcatcagccttttaaatttaactgaaagaaagnnnnnnnnnnnnnnnnnnnnnnnnnnnnnnnnnnnnnnnnnnnnnnnnnnnnnnnnnnnnnnnnnnnnnnnnnnnnnnnnnnnnnnnnnnnnnnnnnnnnnnnnnnnnnnnnnnnnnnnnnnnnnnnnnnnnnnnnnnnnnnnnnnnnnnnnnnnnnnnnnnnnnnnnnnnnnnnnnnnnnnnnnnnnnnnnnnnnnnnnnnnnnnnnnnnnnnnnnnnnnnnnnnnnnnnnnnnnnnnnnnnnnnnnnnnnnnnnnnnnnnnnnnnnnnnnnnnnnnnnnnnnnnnnnnnnnnnnnnnnnnnnnnnnnnnnnnnnnnnnnnnnnnnnnnnnnnnnnnnnnnnnnnnnnnnnnnnnnnnngaaggcaattctgaagttcaactactcagtgcaggaggagagcgacacttgtctgggaggcaaatggtcttttgatgacgtaccaatgacgcccttgcgaactgtgatgttaattccaggcgacaagatgaacgaaatcatggataaactgaaagaatatctatctatttaacccatttccagtggacagtgatgggcctgtttttgtaacattaccagaaaactcagtggagatttactgaaaaactcatgactttattcagattaaggtcctccacaaaaagtagggttctgtcccatgtgtctgtgacacatttacaaaatatcagtttt

SEQ ID NO: 28031 - DNA, 3140 bp, Macaca Mulatta
  misc_feature (1)...(3140): n = A,T,C or G
gagctcccccggggagtacgagtgggaatatgacgaagaggaggagaagaaccagctggagattgagagactggaggagcagnnnnnnnnnnnnnnnnnnnnnnnnnnnnnnnnnnnnnnnnnnnnnnnnnnnnnnnnnnnnnnnnnnnnnnnnnnnnnnnnnnnnnnnnnnnnnnnnnnnnnnnnnnnnnnnnnnnnnnnnnnnnngagctctggctggagtggctgcacgacgagatcagcatggcccaggatggcctggacagagagcatgtgtatgacctctttgagaaagctgtgaaggattacatttgtnnnnnnnnnnnnnnnnnnnnnnnnnnnnnnnnnnnnnnnnnnnnnnnnnnnnnnnnnnnnnnnnnnnnnnnnnnnnnnnnnnnnnnnnnnnnnnnnnnnnnnnnnnnnnnnnnnnnnnnnnnnnnnnnnnnnnnnnnnnnnnnnnnnnnnnnnnnnnnnnnnnnnnnnnnnnnnnnnnnnnnnnnnnnnnnnnnnnnnnnnnnnnnnnnnnnnnnnnnnnnnnnnnnnnnnnnnatatggaggccacatttgcagagtatgaagannnnnnnnnnnnnnnnnnnnnnnnnnnnnnnnnnnnnnnnnnnnnnnnnnnnnnnnnnnnnnnnnnnnnnnnnnnnnnnnnnnnnnnnnnnnnnnnnnnnnnnnnnnnnnnnnnnnnnnnnnnnnnnnnnnnnnnnnnnnnnnnnnnnnnnnnnnnnnnnnnnnnnnnnnnnnnnnnnnnnnnnnnnnnnnnnnnnnnnnnnnnnnnnnnnnnnnnnnnnnnnnnnnnnnnnnnnnnnnnnnnnnnnnnnnnnnnnnnnnnnnnnnnnnnnnnnnnnnnnnnnnnnnnnnnnnnnnnnnnnnnnnnnnnnnnnnnnnnnnnnnnnnnnnnnnnnnnnnnnnnnnnnnnnnnnnnnnnnnnnnnnnnnnnnnnnnnnnnnnnnnnnnnnnnnnnnnnnnnnnnnnnnnnnnnnnnnnnnnnnnnnnnnnnnnnnnnnnnnnnnnnnnnnnnnnnnnnnnnnnnnnnnnnnnnnnnnnnnnnnnnnnnnnnnnnnnnnnnnnnnnnnnnnnnnnnnnnnnnnnnnnnnnnnnnnnnnnnnnnnnnnnnnnnnnnnnnnnnnnnnnnnnnnnnnnnnnnnnnnnnnnnnnnnnnnnnnnnnnnnnnnnnnnnnnnnnnnnnnnnnnnnnnnnnnnnnnnnnnnnnnnnnnnnnnnnnnnnnnnnnnnnnnnnnnnnnnnnnnnnnnnnnnnnnnnnnnnnnnnnnnnnnnnnnnnnnnnnnnnnnnnnnnnnnnnnnnnnnnnnnnnnnnnnnnnnnnnnnnnnnnnnnnnnnnnnnnnnnnnnnnnnnnnnnnnnnnnnnnnnnnnnnnnnnnnnnnnnnnnnnnnnnnnnnnnnnnnnnnnnnnnnnnnnnnnnnnnnnnnnnnnnnnnnnnnnnnnnnnnnnnnnnnnnnnnnnnnnnnnnnnnnnnnnnnnnnnnnnnnnnnnnnnnnnnnnnnnnnnnnnnnnnnnnnnnnnnnnnnnnnnnnnnnnnnnnnnnnnnnnnnnnnnnnnnnnnnnnnnnnnnnnnnnnnnnnnnnnnnnnnnnnnnnnnnnnnnnnnnnnnnnnnnnnnnnnnnnnnnnnnnnnnnnnnnnnnnnnnnnnnnnnnnnnnnnnnnnnnnnnnnnnnnnnnnnnnnnnnnnnnnnnnnnnnnnnnnnnnnnnnnnnnnnnnnnnnnnnnnnnnnnnnnnnnnnnnnnnnnnnnnnnnnnnnnnnnnnnnnnnnnnnnnnnnnnnnnnnnnnnnnnnnnnnnnnnnnnnnnnnnnnnnnnnnnnnnnnnnnnnnnnnnnnnnnnnnnnnnnnnnnnnnnnnnnnnnnnnnnnnnnnnnnnnnnnnnnnnnnnnnnnnnnnnnnnnnnnnnnnnnnnnnnnnnnnnnnnnnnnnnnnnnnnnnnnnnnnnnnnnnnnnnnnnnnnnnnnnnnnnnnnnnnnnnnnnnnnnnnnnnnnnnnnnnnnnnnnnnnnnnnnnnnnnnnnnnnnnnnnnnnnnnnnnnnnnnnnnnnnnnnnnnnnnnnnnnnnnnnnnnnnnnnnnnnnnnnnnnnnnnnnnnnnnnnnnnnnnnnnnnnnnnnnnnnnnnnnnnnnnnnnnnnnnnnnnnnnnnnnnnnnnnnnnnnnnnnnnnnnnnnnnnnnnnnnnnnnnnnnnnnnnnnnnnnnnnnnnnnnnnnnnnnnnnnnnnnnnnnnnnnnnnnnnnnnnnnnnnnnnnnnnnnnnnnnnnnnnnnnnnnnnnnnnnnnnnnnnnnnnnnnnnnnnnnnnnnnnnnnnnnnnnnnnnnnnnnnnnnnnnnnnnnnnnnnnnnnnnnnnnnnnnnnnnnnnnnnnnnnnnnnnnnnnnnnnnnnnnnnnnnnnnnnnnnnnnnnnnnnnnnnnnnnnnnnnnnnnnnnnnnnnnnnnnnnnnnnnnnnnnnnnnnnnnnnnnnnnnnnnngagggggaagggaaggacgcagctgtctctactgcctcgtgccctgcagcgcccaagtgctgcagctcctcaggccgagaatggccctgccgcggctcctgcagttgccgcctcagcggccaccgaggcacccaagatgtccaatgctgattttgccaagctgtttctgagaaagtgaacgggactctgggagacaggaaatgccttacttcactctggcccggcggacctcccaccaccccgcggtgcactggggatggacaggcctggtgtgctgcccgctcgcaaccacagatggctcctctgctttagacagaaagggggaaggggttctaagtcaagagcctttcagtgctccctcatattgagggcagtggcagaaaagtgaccactctgcaggctccctgggcccaggatgtggtgtcccaagatacgtttgtgtcttaaagactgaggcacagaagcgaaacgagaacacggtttttgagatgcagttgtccaaatgtttctggccagctccggcccctttttgtatgacacttctcttctacactgcacagcacatgtgcccgtcattcttttaattttaaaagatgaaatggcagatgctagtaattcaccagaatggcctattacgggggtgagtctgagggaagtc

SEQ ID NO: 28032 - DNA, 344 bp, Macaca Mulatta
tgcctacatcaaggctaaggccatcccaatccctggggccaagtcttgatgaatcttcttaattctttgctcctttcggtacagttggagacctcctttctgtcttttaggctatttcatcactcttgagaaataaccattttgactctttgttaataaactttattctggcttagcaaatatgaccttgtgatgatttattttcatgttttccattagggaaagtggaatgcctacctaaacctgaacaacaagttaacacaccatccaagatttaccccaacagaataagagctctcatagtggaatttatcaaaaaaatagatactggttatttgtgatag

SEQ ID NO: 28033 - DNA, 1057 bp, Macaca Mulatta
  misc_feature (1)...(1057): n = A,T,C or G
ggggagaccttagttctctttcccatcttgcaagatggcgggtgaaaaagttgagaagccagatactaaagagaagaaacccgaagccaagaaggctgatgctggtggcaaggtgaaaaagggtaacctcaaggctaagaagcccaagaaggggaagccccattgcagccgcaaccctgtccttgtcagaggaattggcaggtattcccgatctgccatgtattccagaaaggccatgtacaagaggaagtactcagccgctaaatccaagnnnnnnnnnnnnnnnnnnnngaaggttcttgcaactcttacaaaaccagttggtggtgacaagaacggcggtacccgggtggttaaacttcgccaaatgcctaaatattatcccaactgaagaatgtgccatcgaaaagctgtttgaagcccacgggcaaaaaaaaccctttccggtccagacccggttgaataaaaaactggccgaagcccaatcccttttaccccccccggggggaacccattttcttggaatttcagtccccttctatcttggggaagcgtcctataccaagaggaggggccacaaagaaaaaggggggagaggagtatttttttatgcacccctggtgaaaacgaacaccctgggtccctttgtgggcccctttaaggttggaggtgccctttctgggtgtatcaccccatttagggtgtggaaaccctggagaggaacacaccatcccattggggggatcccctctcccagaacactcccggaaggtggttttccccctccccctacccccaaaacgacaaatacatcccccatcccgcaggaaaaaaattatcgaggttcccacatttggtgcgcacgcctcttgtcagcactccagaaaaaagctctgaattatatccactcccgaatatgggtacctacaaaaaatctccctacaaacataacaattctagtaaaaccgggaatgggcactttagagtattatacgaggaaaaggaaatgaaaatcctgcgccgggaaaagacctcccccttaacaccccactgtaat

SEQ ID NO: 28034 - DNA, 873 bp, Macaca Mulatta
ggggcagttcggcggtcccgcgggtctgtctcttgcttcaacagtgtttggacggaacagatccggggactctttcttccagcctccgagcgccctccgatttcctctccacttgcaacctccgggaccatcttctcggccatctcctgcttctgggacctgccagcaccgtttttgtggttagctccgtcttgccgaccaaccatgagctcccagattcgtcagaattattccaccgacgtggaggcagccgtcaacagcctggtcaatatgtacctgcaggcctcctacacctacctctctctgggcttctatttcgaccgcgatgatgtggctctggaaggcgtgagccacttcttccgcgaattggccgaggagaagcgcgagggctactagcgtctcctgaagatgcaaaaccagcgtggcggccgcgctctttttcaggacgtcaagaagccagcctgaagatgagtggggtaaaaaccccgggatgcccatgaaaagccgcccatgggcccttgggagaaaaaaaaactggaatccagtgcccctttttgggaatctttcatgccccccgggggtttcttgcccaacaccgggatccccccattcttcctggttgaactttccttgggaagaattccactttccctatagtttgaaaggaaagttgaaaagccttcaattccgacaaaaagaatggggggtggaacccaactctggaacacagaacccttccatacaagagggttgtggtcccgtggacccccagtaaaggctcttggggccattggctggccaaaaatataatcccctcctatacagataaggggttataacattttctataaatagcacactgtatattaataa

SEQ ID NO: 28035 - DNA, 956 bp, Macaca Mulatta
  misc_feature (1)...(956): n = A,T,C or G
aggccagtgtggcagactatgaagaaactgtaaagaaagcaaaagaagcatggaaaatctgggcagannnnnnnnnnnnnnnnnnnnnnnnnnnnnnnnnnnnnnnnnnnnnnnnnnnnnnnnnnnnnnnnnnnnnnnnnnnnnnnnnnnnnnnnnnnnnnnnnnnnnnnnnnnnnnnnnnnnnnnnnnnnnnnnnnnnnnnnnnnnnnnnnnnnnnnnnnnnnnnnnnnnnnnnnnnnnnnnnnnnnnnnnnnnnnnnnnnnnnnnnnnnnnnnnnnnnnnnnnnnnnnnnnnnnnnnnnnnnnnnnnnnnnnnnnnnnnnnnnnnnnnnnnnnnnnnnnnnnnnnnnnnnnnnnnnnnnnnnnnnnnnnnnnnnnnnnnnnnnnnnnnnnnnnnnnnnnnnnnnnnnnnnnnnnnnnnnnnnnnnnnnnnnnnnnnnnnnnnnnnnnnnnnnnnnnnnnnnnnnnnnnnnnnnnnnnnnnnnnnnnnnnnnnnnnnnnnnnnnnnnnnnnnnnnnnnnnnnnnnnnnnnnnnnnnnnnnnnnnnnnnnnnnnnnnnnnnnnnnnnnnnnnnnnnnnnnnnnnnnnnnnnnnnnnnnnnnnnnnnnnnnnnnnnnnnnnnnnnnnnnnnnnnnnnnnnnnnnnnnnnnnnnnnnnnnnnnnnnnnnnnnnnnnnnnnnnnnnnnnnnnnnnnnnnnnnnnnnnnnnnnnnnnnnnnnnnnnnnnnnnnnnnnnnnnnnnnnnnnnnnnnnnnnnnnnnnnnnnnnnnnnnnnnnnnnnnnnnnnnnnnnnnnnnnnnnnnnnnnnnnnnnnnnnnnnnnnnnnnnnnnnnnnnnnnnnnnnnnnnnnctaatgttctctatgggccactccacaccaagcaggcagtgagcatgtttcttggagcagtggaagaagcaaagaaagaaggtggcacagtggtctatgggggcaagg

SEQ ID NO: 28036 - DNA, 219 bp, Macaca Mulatta
aggtttttgtgtcaaaatgttctacattaagccaattaagtataaaggtcctgttaagaagggagaaaaacttggaactctattgcccttgcagaaagtttatcctggcatacagtcgcacgtgcactttgaaaactgtgacttgagtgaccctactgcataccctgtaaatggaaggccaatgggtcgaatcttcaaaataaaaagtcatcttaaaaa

SEQ ID NO: 28037 - DNA, 117 bp, Macaca Mulatta
tgagggaagaggagagagagaagggcgcttcagaggtgactttctctcagcctgcgagccttcttcccggggcgccataaacgcccccaatttcccagctgctaaaggaagaggaag

SEQ ID NO: 28038 - DNA, 2414 bp, Macaca Mulatta
  misc_feature (1)...(2414): n = A,T,C or G
gggtctggagctggctgccgtcctgacgcgtcctagagctgcaagcaggtngcaggtcctgccagagagccaccatggcctctcannnnnnnnnnnnnnnnnnnnnnnnnnnnnnnnnnnnnnnnnnnnnnnnnnnnnnnnnnnnnnnnnnnnnnnnnnnnnnnnnnnnnnnnnnnnnnnnnnnnnnnnnnnnnnnnnnnnnnnnnnnnnnnnnnnnnnnnnnnnnnnnnnnnnnnnnnnnnnnnnnnnnnnnnnnnnnnnnnnnnnnnnnnnnnnnnnnnnnnnnnnnnnnnnnnnnnnnnnnnncccagatccctcagtggtgtgcagagtttgtgctggccagagggttccagaaaggacaggttactgtcacgcagccctaccctcttgcagcccggagcctggctctgcgggttgctgatgagatggacctgaccctgggtcatgaagttggatacagcatcccccaggaggactgcacagggcccaacaccctgctcaggnnnnnnnnnnnnnnnnnnnnnnnnnnnnnnnnnnnnnnnnnnnnnnnnnnnnnnnnnnnnnnnnnnnnnnnnnnnnnnnnnnnnnnnnnnnnnnnnnnnnnnnnnnnnnnnnnnnnnnnnnnnnnnnnnnnnnnnnnnnnnnnnnnnnnnnggggacctcagagtggttgtggttactgacccagcccttgaacctaagctccaagctttctggggcaatcctcctattgtgcatatacccagagaggctggtgagagaccttcccccatctaccgggacaccatcccccctgatcgagtggaagctgcctgccaagcagtgcttgagttgtgtcggaaggaggctccaggagatgtgctagtgtacctgcccagtgaggaggnaggaaatttccctctgctgtgaatccttgtccagggaggtagagtccctgcctctccaaaggcttccaccacgagtactgccccttcacccagactgtggacaagccgttcaggctgtatatgaggacatggatgcnnnnnnnnnnnnnnnnnnnnnnnnnnnnnnnnnnnnnnnnnnnnnnnnnnnnnnnnnnnnnnnnnnnnnnnnnnnnnnnnnnnnnnnnnnnnnnnnnnnnnnnnnnnnnnnnnnnnnnnnnnnnnnnnnnnnnnnnnnnnnnnnnnnnnnnnnnnnnnnnnnnnnnnnnnnnnnnnnnnnnnnnnnnnnnnnnnnnnnnnnnnnnnnnnnnnnnnnnnnnnnnnnnnnnnnnnnnnnnnnnnnnnnnnnnnnnnnnnnnnnnnnnnnnnnnnnnnnnnnnnnnnnnnnnnnnnnnnnnnnnnnnnnnnnnnnnnnnnnnnnnnnnnnnnnnnnnnnnnnnnnnnnnnnnnnnnnnnnnnnnnnnnnnnnnnnnnnnnnnnnnnnnnnnnnnnnnnnnnnnnnnnnnnnnnnnnnnnnnnnnnnnnnnnnnnnnnnnnnnnnnnnnnnnnnnnnnnnnnnnnnnnnnnnnnnnnnnnnnnnnnnnnnnnnnnnnnnnnnnnnnnnnnnnnnnnnnnnnnnnnnnnnnnnnnnnnnnnnnnnnnnnnnnnnnnnnnnnnnnnnnnnnnnnnnnnnnnnnnnnnnnnnnnnnnnnnnnnnnnnnnnnnnnnnnnnnnnnnnnnnnnnnnnnnnnnnnnnnnnnnnnnnnnnnnnnnnnnnnnnnnnnnnnnnnnnnnnnnnnnnnnnnnnnnnnnnnnnnnnnnnnnnnnnnnnnnnnnnnnnnnnnnnnnnnnnnnnnnnnnnnnnnnnnnnnnnnnnnnnnnnnnnnnnnnnnnnnnnnnnnnnnnnnnnnnnnnnnnnnnnnnnnnnnnnnnnnnnnnnnnnnnnnnnnnnnnnnnnnnnnnnnnnnnnnnnnnnnnnnnnnnnnnnnnnnnnnnnnnnnnnnnnnnnnnnnnnnnnnnnnnnnnnnnnnnnnnnnnnnnnnnnnnnnnnnnnnnnnnnnnnnnnnnnnnnnnnnnnnnnnnnnnnnnnnnnnnnnnnnnnnnnnnnnnnnnnnnnnnnnnnnnnnnnnnnnnnnnnnnnnnnnnnnnnnnnnnnnnnnnnnnnnnngctggtggaattggcccctccatacttcctgagtaacttgcctcccagtgagagcagagacctcctgaaccagctaagggaaggaatggcagattcttcagcagggagcgaatcatcctcagtccaggagttcagagatccctgtgtcaaacagagacctgcctgcctatggaatggagctgggttcatctcatcacattagattctccctcagggtggcaccaaagcacccagacagatttagaagcccaaagtttagggttaaatataaaccctggaaagtgagtcccaagaaatggtaggctgggaatggagagaatggggtaaaccacagtctacat

SEQ ID NO: 28039 - DNA, 1133 bp, Macaca Mulatta
  misc_feature (1)...(1133): n = A,T,C or G
gcgcaatttgatgtgatgaacttcgggctgccatgaagggcctcgtgaactgatgaagacactctgattgagattttggcatcaagaactaacaaagaaatcagagacattaacagggtctacagagaggaactgaagagagatctggccaaagacataacctcagacacatctggagattttcggaacgctttgctttctcttgctaagggtgaccgatctgaggactttggtgtgaatgaagacttggctgattcagatgccagggccttgtatgaagcgggagaaaggagaaaggggacagatgtaaacgtgttcaataccatccttaccacccgaagctatccacatcttcgcagagtgtttcagaaatacaccaagtacagtaagcatgacatgaacaaagttctggacctggagttgaaaggtgacattgagaaatgcctcacagctatcgtgaagtgtgccacaagcaaaccagctttctttgcagagaaacttcatcaggccatgaaaggtgctggaactcgccataaggcattgatcaggattatggtttcacgttctgaaattgacatgaatgatatcaaagcattctatcagaagatgtatggtatctccctttgccaagccatcctggatgaaaccaagggagattatgaaaaaatcctggtggctctttgtggaggaaactaaacattcccttgatggtctcaagctatgatcagaagactttaattatatattttcatcctataagcttaaataggaaagtttcttcaacaggattacagtgtagctacctatatgctgaaaaatatagtctataaatcatttttatatggtaactctgtataatagagacaagttccttttttaaaaatgtttaccccaaaccataaaaccctatacaagttgttctagtaacaatacatgaaaaagatgtctatgtagctgaaaataaaatgacattacaagannnnnnnnnnnnnnnnnnnnnnnnnnnnnnnnnnnnnnnnnnnnnnnnnnnnnnnnnnnnnnnnnnnnnnnnnnnnnnnnnnnnnnnnnnnnnnnnnnnnnnnnnnnnnnnnnnnnnntggcgttaccaacttatcgcttgcagacatcccctt

SEQ ID NO: 28040 - DNA, 193 bp, Macaca Mulatta
atggaggtgccgccaccggcaccgcggagctttttctgtagagccttgtgtccatttccccgagtctttgctgccgaagctgtgactgcagattcggaagcccttgcggagcgtcagaagcggcctctctacgtcccagagccctattacccgcaatctggatgggaccgcctccaggagctgtttgccaaag

SEQ ID NO: 28041 - DNA, 531 bp, Macaca Mulatta
  misc_feature (1)...(531): n = A,T,C or G
tggcccagccgctggccttcatcctcgatgtccctgannnnnnnnnnnnnnnnnnnnnnnnnnnnnnnnnnnnnnnnnnnnnnnnnnnnnnnnnnnnnnnnnnnnnnnnnnnnnnnnnnnnnnnnnnnnnnnnnnnnnnnnnnnnnnnnnnnnnnnnnnnnnnnnnnnnnnnnnnnnnnnnnnnnnnnnnnnnnnnnnnnnnnnnnnnnnnnnnnnnnnnnnnnnnnnnnnnnnnnnnnnnnnnnnnnnnnnnnnnnnnnnnnnnnnnnnnnnnnnnnnnnnnnnnnnnnnnnnnnnnnnnnnnnnnnnnnnnnnnnnnnnnnnnnnnnnnnnnnnnnnnnnnnnnnnnnnnnnnnnnnnnnnnnnnnnnnnnnnnnnnnnnnnnnnnnnnnnnnnnnnnnnnnnnnnnnnnnnnnnnnnnnnnnnnngagaagcagagcctcctggtgaaggagctccagagcctggcggtggcacagcgggaccacatgctccgagggatgcccttaagcctggttgagaaacgcagcc

SEQ ID NO: 28042 - DNA, 2294 bp, Macaca Mulatta
  misc_feature (1)...(2294): n = A,T,C or G
aattcgtccaaactgaggatcacatgtctccacgttctgagtaggaggatgagggtctgagttaggatttgggccctgtagggcttgctgaggacatcccctgatggctaggattccacacggagcacatctggtgtgacagagctcactgcaagggtgaaggctccgccctatcagatagacaaccaggccaccgagaggcccagccctgcaaaccctggatttgcaacatcctcaaagaacagcaacgggccttgannnnnnnnnnnnnnnnnnnnnnnnnnnnnnnnnnnnnnnnnnnnnnnnnnnnnnnnnnnnnnnnnnnnnnnnnnnnnnnnnnnnnnnnnnnnnnnnnnnnnnnnnnnnnnnnnnnnnnnnnnnnnnnnnnnnnnnnnnnnnnnnnnnnnnnnnnnnnnnnnnnnnnnnnnnnnnnnnnnnnnnnnnnnnnnnnnnnnnnnnnnnnnnnnnnnnnnnnnnnnnnnnnnnnnnnnnnnnnnnnnnnnnnnnnnnnnnnnnnnnnnnnnnnnnnnnnnnnnnnnnnnnnnnnnnnnnnnnnnnnnnnnnnnnnnnnnnnnnnnnnnnnnnnnnnnnnnnnnnnnnnnnnnnnnnnnnnnnnnnnnnnnnnnnnnnnnnnnnnnnnnnnnnnnnnnnnnnnnnnnnnnnnnnnnnnnnnnnnnnnnnnnnnnnnnnnnnnnnnnnnnnnnnnnnnnnnnnnnnnnnnnnnnnnnnnnnnnnnnnnnnnnnnnnnnnnnnnnnnnnnnnnnnnnnnnnnnnnnnnnnnnnnnnnnnnnnnnnnnnnnnnnnnnnnnnnnnnnnnnnnnnnnnnnnnnnnnnnnnnnnnnnnnnnnnnnnnnnnnnnnnnnnnnnnnnnnnnnnnnnnnnnnnnnnnnnnnnnnnnnnnnnnnnnnnnnnnnnnnnnnnnnnnnnnnnnnnnnnnnnnnnnnnnnnnnnnnnnnnnnnnnnnnnnnnnnnnnnnnnnnnnnnnnnnnnnnnnnnnnnnnnnnnnnnnnnnnnnnnnnnnnnnnnnnnnnnnnnntgtcctcggccatcgaaaggaagagcctggacccttcagagnnnnnnnnnnnnnnnnnnnnnnnnnnnnnnnnnnnnnnnnnnnnnnnnnnnnnnnnnnnnnnnnnnnnnnnnnnnnnnnnnnnnnnnnnnnnnnnnnnnnnnnnnnnnnnnnnnnnnnnnnnnnnnnnnnnnnnnnnnnnnnnnnnnnnnnnnnnnnnnnnnnnnnnnnnnnnnnnnnnnnnnnnnnnnnnnnnnnnnnnnnnnnnnnnnnnnnnctttttgggcaagacggtctctgcgcatcctgtgacatacggattcgtgcctatgatatgactatgcgggtgaaagacaaagtgtatcacctgaaatgtttcaaatgtgccgcctgacataagcatttctgtgtaggtgacagatacctcctcatcaactccgacatagtgtgcgaacaggacatctacgagtggactaagatcaatgggatgatatatgcccgagtccccgggcatctttagagaggtgtccactgaagacaccgtctccatggcatcttcgtcttcactcttaggcactttggaggtttgagggtggggtaagggttttcttatgggatggtagacctttattgggnnnnnnnnnnnnnnnnnnnnnnnnnnnnnnnnnnnnnnnnnnnnnnnnnnnnnnnnnnnnnnnnnnnnnnnnnnnnnnnnnnnnnnnnnnnnnnnnnnnnnnnnnnnnnnnnnnnnnnnnnnnnnnnnnnnnnnnnnnnnnnnnnnnnnnnnnnnnnnnnnnnnnnnnnnnnnnnnnnnnnnnnnnnnnnnnnnnnnnnnnnnnnnnnnnnnnnnnnnnnnnnnnnnnnnnnnnnnnnnnnnnnnnnnnnnnnnnnnnnnnnnnnnnnnnnnnnnnnnnnnnnnnnnnnnnnnnnnnnnnnnnnnnnnnnnnnnnnnnnnnnnnnnnnnnnnnnnnnnnnnnnnnnnnnnnnnnnnnnnnnnnnnnnnnnnnnnnnnnnnnnnnnnnnnnnnnnggagacacattttggttgagaatggaaaccacaacttttaaccaaacaattatttaaagcaatgctgatgaaccactgtttttagacaccttcattttgaggtgaggagcttcacagattgtttgtatacaaatataaatcttaagaaaaaagttgttcaagtattttattatcctagattatatcaaagtatttgtggtgtgtannnnnnnnnnnnnnnngcaggcttaataaaaatgacagactgaaa

SEQ ID NO: 28043 - DNA, 1462 bp, Macaca Mulatta
  misc_feature (1)...(1462): n = A,T,C or G
tggaggtgcggtggtgcgtcacctcagacccggagcagcagaagtgcagcaacatgagcacggccttccgggaagcgggcatccagccctccctcctctgcgtccagggcacctcgcctgaccactgcatccagctcatcgcggnnnnnnnnnnnnnnnnnnnnnnnnnnnnnnnnnnnnnnnnnnnnnnnnnnnnnnnnnnnnnnnnnnnnnnnnnnnnnnnnnnnnnnnnnnnnnnnnnnnnnnnnnnnnnnnnnnnnnnnnnnnnnnnnnnnnnnnnnnnnnnnnnnnnnnnnnnnnnnnnnnnnnnnnnnnnnnnnnnnnnnnnnnnnnnnnnnnnnnnnnnnnnnnnnnnnnnnnnnnnnnnnnnnnnnnnnnnnnnnnnnnnnnnnnnnnnnnnnnnnnnnnnnnnnnnnnnnnnnnnnnnnnnnnnnnnnnnnnnnnnnnnnnnnnnnnnnnnnnnnnnnnnnnnnnnnnnnnnnnnnnnnnnnnnnnnnnnnnnnnnnnnnnnnnnnnnnnnnnnnnnnnnnnnnnnnnnnnnnnnnnnnnnnnnnnnnnnnnnnnnnnnnnnnnnnnnnnnnnnnnnnnnnnnnnnnnnnnnnnnnnnnnnnnnnnnnnnnnnnnnnnnnnnnnnnnnnnnnnnnnnnnnnnnnnnnnnnnnnnnnnnnnnnnnnnnnnnnnnnnnnnnnnnnnnnnnnnnnnnnnnnnnnnnnnnnnnnnnnnnnnnnnnnnnnnnnnnnnnnnnnnnnnnnnnnnnnnnnnnnnnnnnnnnnnnnnnnnnnnnnnnnnnnnnnnnnnnnnnnnnnnnnnnnnnnnnnnnnnnnnnnnnnnnnnnnnnnnnnnnnnnnnnnnnnnnnnnnnnnnnnnnnnnnnnnnnnnnnnnnnnnnnnnnnnnnnnnnnnnnnnnnnnnnnnnnnnnnnnnnnnnnnnnnnnnnnnnnnnnnnnnnnnnnnnnnnnnnnnnnnnnnnnnnnnnnnnnnnnnnnnnnnnnnnnnnnnnnnnnnnnnnnnnnnnnnnnnnnnnnnnnnnnnnnnnnnnnnnnnnnnnnnnnnnnnnnnnnnnnnnnnnnnnnnnnnnnnnnnnnnnnnnnnnnnnnnnnnnnnnnnnnnnnnnnnnnnnnnnnnnnnnnnnnnnnnnnnnnnnnnnnnnnnnnnnnnnnnnnnnnnnnnnnnnnnnnnnnnnnnnnnntgtgaccctgagcggcgaggacatttacacggcggggaagacgtacggcctggctccggcagcnnnnnnnnnnnnnnnnnggaagacagcagcaactcgtacttcgtggtggcggtggtgaggcgggacagctcccacgccttcaccttggatgagcttcggggcaagcgctcctgccacgctggcttcggcagccctgcaggctgggatatccccgtgggcgccctcattcggagaggcttcatccggcccaaggactgcgacgtcctcacag

SEQ ID NO: 28044 - DNA, 162 bp, Macaca Mulatta
ctttgccctcgcgacgccgccacctcggtaacaagccatggtggcggcggcggcgtggctgctcctgtgggctgtggcctgcgcgcagcgggagcaggacttctacgacttcaaggcggtcaacatccggggcaaactggtgtcgctggagaagtaccgcgg

SEQ ID NO: 28045 - DNA, 5812 bp, Macaca Mulatta
  misc_feature (1)...(5812): n = A,T,C or G
atgagttccgactctgagatggccgtttttggggaggctgctcctttcctccgaaagtctgaaaaggagcgaattgaagcgcagaacaagccttttgatgccaagacatcagtcttcgtggtggaccctaaggagtcctacgtgaaagcaacagtgcagagcagggaaggggggaaggtgacagccaagaccgaagctggagcnnnnnnnnnnnnnnnnnnnnnnnnnnnnnnnnnnnnnnnnnnnnnnnnnnnnnnnnnnnnnnnnnnnnnnnnnnnnnnnnnnnnnnnnnnnnnnnnnnnnnnnnnnnnnnnnnnnnnnnnnnnnnnnnnnnnnnnnnnnnnnnnnnnnnnnnnnnnnnnnnnnnnnnnnnnnnnnnnnnnnnnnnnnnnnnnnnnnnnnnnnnnnnnnnnnnnnnnnnnnnnnnnnnnnnnnnnnnnnnnnnnnnnnnnnnnnnnnnnnnnnnnnnnnnnnnnnnnnnnnnnnnnnnnnnnnnnnnnnnnnnnnnnnnnnnnnnnnnnnnnnnnnnnnnnnnnnnnnnnnnnnnnnnnnnnnnnnnnnnnnnnnnnnnnnnnnnnnnnnnnnnnnnnnnnnnnnnnnnnnnnnnnnnnnnnnnnnnnnnnnnnnnnnnnnnnnnnnnnnnnnnnnnnnnnnnnnnnnnnnnnnnnnnnnnnnnnnnnnnnnnnnnnnnnnnnnnnnnnnnnnnnnnnnnnnnnnnnnnnnnnnnnnnnnnnnnnnnnnnnnnnnnnnnnnnnnnnnnnnnnnnnnnnnnnnnnnnnnnnnnnnnnnnnnnnnnnnnnnnnnnnnnnnnnnnnnnnnnnnnnnnnnnnnnnnnnnnnnnnnnnnnnnnnnnnnnnnnnnnnnnnnnnnnnnnnnnnnnnnnnnnnnnnnnnnnnnnnnnnnnnnnnnnnnnnnnnnnnnnnnnnnnnnnnnnnnnnnnnnnnnnnnnnnnnnnnnnnnnnnnnnnnnnnnnnnnnnnnnnnnnnnnnnnnnnnnnnnnnnnnnnnnnnnnnnnnnnnnnnnnnnnnnnnnnnnnnnnnnnnnnnnnnnnnnnnnnnnnnnnnnnnnnnnnnnnnnnnnnnnnnnnnnnnnnnnnnnnnnnnnnnnnnnnnnnnnnnnnnnnnnnnnnnnnnnnnnnnnnnnnnnnnnnnnnnnnnnnnnnnnnnnnnnnnnnnnnnnnnnnnnnnnnnnnnnnnnnnnnnnnnnnnnnnnnnnnnnnnnnnnnnnnnnnnnnnnnnnnnnnnnnnnnnnnnnnnnnnnnnnggtgtacaatgcggtgggtgctctggccaaagccatctacgagaagatgttcctatggatggtcacccgcatcaaccagcagctggacaccaagcagcccaggcagtacttcatcggggtcttggacattgctggcttcgagatctttgatttcaacagcctggagcagctgtgcatcaacttcaccaacgagaaactgcaacagtttttcaaccaccacatgttcgtgctggagcaggaggagtacaagaaggaaggtatcgagtgggagttcattgacttcgggatggacctggctgcctgcannnnnnnnnnnnnnagcctatgggcatcttctccatcctggaagaggagtgcatgttccccaaggcaacagatacctccttcaagaacaagctgtatgaccagcatcttggaaaatccaacaacttccagaagcccaagcctgccaaaggcaagcctgaggctcacttctcgctggtgcactacgccggcaccgtggactacaacattgtcggctggcttgacaagaacaaggaccccctgaacgagactgtggtggggctgtaccagaagtctgcaatgaagactctggctttcctcttctctggggcacaaactgnnnnnnagagggtggtggtggaaagaaaggtggcaagaagaagggttcttctttccagacagtgtcagctcttttcaggnnnnnnnnnnnnnnnnnnnnnnnnnnnnnnnnnnnnnnnnnnnnnnnnnnnnnnnnnnnnnnnnnnnnnnnnnnnnnnnnnnnnnnnnnnnnnnnnnnnnnnnnnnnnnnnnnnnnnnnnnnnnnnnnnnnnnnnnnnnnnnnnnnnnnnnnnnnnnnnnnnnnnnnnnnnnnnnnnnnnnnnnnnnnnnnnnnnnnnnnnnnnnnnnnnnnnnnnnnnnnnnnnnnnnnnnnnnnnnnnnnnnnnnnnnnnnnnnnnnnnnnnnnnnnnnnnnnnnnnnnnnnnnnnnnnnnnnnnnnnnnnnnnnnnnnnnnnnnnnnnnnnnnnnnnnnnnnnnnnnnnnnnnnnnnnnnnnnnnnnnnnnnnnnnnnnnnnnnnnnnnnnnnnnnnnnnnnnnnnnnnnnnnnnnnnnnnnnnnnnnnnnnnnnnnnnnnnnnnnnnnnnnnnnnnnnnnnnnnnnnnnngagagtccatcttctgcattcagtacaacatccgtgctttcatgaatgtgaagcactggccctggatgaagctgtatttcaagatcaagcccctcctcaagagtgcagagacagagaaggagatggccaacatgaaggaagaatttgagaagaccaaagaagagctgactaagtcagaggcaaaaaggaaagaactagaagaaaagatggtgacgctaatgcaagagaaaaatgacttacaactccaagttcaagctgnnnnnnnnnnnnnnnnnnnnnnnnnnnnnnnnnnnnnnnnnnnnnnnnnnnnnnnnnnnnnnnnnnnnnnnnnnnnnnnnnnnnnnnnnnnnnnnnnnnnnnnnnnnnnnnnnnnnnnnnnnnnnnnnnnnnnnnnnnnnnnnnnnnnnnnnnnnnnnnnnnnnnnnnnnnnnnnnnnnnnnnnnnnnnnnnnnnnnnnnnnnnnnnnnnnnnnnnnnnnnnnnnnnnnnnnnnnnnnnnnnnnnnnnnnnnnnnnnnnnnnnnnnnnnnnnnnnnnnnnnnnnnnnnnnnnnnnnnnnnnnnnnnnnnnnnnnnnnnnnnnnnnnnnnnnnnnnnnnnnnnnnnnnnnnnnnnnnnnnnnnnnnnnnnnnnnnnnnnnnnnnnnnnnnnnnnnnnnnnnnnnnnnnnnnnnnnnnnnnnnnnnnnnnnnnnnnnnnnnnnnnnnnnnnnnnnnnnnnnnnnnnnnnnnnnnnnnnnnnnnnnnnnnnnnnnnnnnnnnnnnnnnnnnnnnnnnnnnnnnnnnnnnnnnnnnnnnnnnnnnnnnnnnnnnnnnnnnnnnnnnnnnnnnnnnnnnnnnnnnnnnnnnnnnnnnnnnnnnnnnnnnnnnnnnnnnnnnnnnnnnnnnnnnnnnnnnnnnnnnnnnnnnnnnnnnnnnnnnnnnnnnnnnnnnnnnnnnnnnnnnnnnnnnnnnnnnnnnnnnnnnnnnnnnnnnnnnnnnnnnnnnnnnnnnnnnnnnnnnnnnnnnnnnnnnnnnnnnnnnnnnnnnnnnnnnnnnnnnnnnnnnnnnnnnnnnnnnnnnnnnnnnnnnnnnnnnnnnnnnnnnnnnnnnnnnnnnnnnnnnnnnnnnnnnnnnnnnnnnnnnnnnnnnnnnnnnnnnnnnnnnnnnnnnnnnnnnnnnnnnnnnnnnnnnnnnnnnnnnnnnnnnnnnnnnnnnnnnnnnnnnnnnnnnnnnnnnnnnnnnnnnnnnnnnnnnnnnnnnnnnnnnnnnnnnnnnnnnnnnnnnnnnnnnnnnnnnnnnnnnnnnnnnnnnnnnnnnnnnnnnnnnnnnnaaacttcgagaaaatgtgccgcactctagaggaccagcttagtgaaataaaaacaaaggaagaggagcaacaacgcttaataaatgagttgtcagcccagaaggcacgtttacacacagaatcaggnnnnnnnnnnnnnnnnnnnnnnnnnnnnnnnnnnnnnnnnnnnnnnnnnnnnnnnnnnnnnnnnnnnnnnnnnnnnnnnnnnnnnnnnnnnnnnnnnnnnnnnnnnnnnnnnnnnnnnnnnnnnnnnnnnnnnnnnnnnnnnnnnnnnnnnnnnnnnnnnnnnnnnnnnnnnnnnnnnnnnnnnnnnnnnnnnnnnnnnnnnnnnnnnnnnnnnnnnnnnnnnnnnnnnnnnnnnnnnnnnnnnnnnnnnnnnnnnnnnnnnnnnnnnnnnnnnnnnnnnnnnnnnnnnnnnnnnnnnnnnnnnnnnnnnnnnnnnnnnnnnnnnnnnnnnnnnnnnnnnnnnnnnnnnnnnnnnnnnnnnnnnnnnnnnnnnnnnnnnnnnnnnnnnnnnnnnnnnnnnnnnnnnnnnnnnnnnnnnnnnnnnnnnnnnnnnnnnnnnnnnnnnnnnnnnnnnnnnnnnnnnnnnnnnnnnnnnnnnnnnnnnnnnnnnnnnnnnnnnnnnnnnnnnnnnnnnnnnnnnnnnnnnnnnnnnnnnnnnnnnnnnnnnnnnnnnnnnnnnnnnnnnnnnnnnnnnnnnnnnnnnnnnnnnnnnnnnnnnnnnnnnnnnnnnnnnnnnnnnnnnnnnnnnnnnnnnnnnnnnnnnnnnnnnnnnnnnnnnnnnnnnnnnnnnnnnnnnnnnnnnnnnnnnnnnnnnnnnnnnnnnnnnnnnnnnnnnnnnnnnnnnnnnnnnnnnnnnnnnnnnnnnnnnnnnnnnnnnnnnnnnnnnnnnnnnnnnnnnnnnnnnnnnnnnnnnnnnnnnnnnnnnnnnnnnnnnnnnnnnnnnnnnnnnnnnnnnnnnnnnnnnnnnnnnnnnnnnnnnnnnnnnnnnnnnnnnnnnnnnnnnnnnnnnnnnnnnnnnnnnnnnnnnnnnnnnnnnnnnnnnnnnnnnnnnnnnnnnnnnnnnnnnnnnnnnnnnnnnnnnnnnnnnnnnnnnnnnnnnnnnnnnnnnnnnnnnnnnnnnnnnnnnnnnnnnnnnnnnnnnnnnnnnnnnnnnnnnnnnnnnnnnnnnnnnnnnnnnnnnnnnnnnnnnnnnnnnnnnnnnnnnnnnnnnnnnnnnnnnnnnnnnnnnnnnnnnnnnnnnnnnnnnnnnnnnnnnnnnnnnnnnnnnnnnnnnnnnnnnnnnnnnnnnnnnnnnnnnnnnnnnnnnnnnnnnnnnnnnnnnnnnnnnnnnnnnnnnnnnnnnnnnnnnnnnnnnnnnnnnnnnnnnnnnnnnnnnnnnnnnnnnnnnnnnnnnnnnnnnnnnnnnnnnnnnnnnnnnnnnnnnnnnnnnnnnnnnnnnnnnnnnnnnnnnnnnnnnnnnnnnnnnnnnnnnnnnnnnnnnnnnnnnnnnnnnnnnnnnnnnnnnnnnnnnnnnnnnnnnnnnnnnnnnnnnnnnnnnnnnnnnnnnnnnnnnnnnnnnnnnnnnnnnnnnnnnnnnnnnnnnnnnnnnnnnnnnnnnnnnnnnnnnnnnnnnnnnnnnnnnnnnnnnnnnnnnnnnnnnnnnnnnnnnnnnnnnnnnnnnnnnnnnnnnnnnnnnnnnnnnnnnnnnnnnnnnnnnnnnnnnnnnnnnnnnnnnnnnngtgagatagcttgaaagtgaggtggaaagtgaacagaagcgcaatgttgaggctgtcaagggtcttcgcaaacatgagagaagagtgaaggaactcacttaccagnnnnnnnnnnnnnnnnnnnnnnnnnnnnnnnnnnnnnnnnnnnnnnnnnnnnnnnnnnnnnnnnnnnnnnnnnnnnnnnnnnnnnnnnnnnnnnnngaggaacaatccaatgtcaaccttgccaagttccgcaagctccagcacgagctggaggaggccgaggaacgggctgacattgctgagtcccaagtcaacaagctgagaatgaagagtcgggaggttcacacaaaagtcataagtgaagagta

SEQ ID NO: 28046 - DNA, 830 bp, Macaca Mulatta
gggcttttcggctctctgatcagcaccatggcggttggcaagaacaagcgccttacgaaaggcggcaaaaagggagccaagaagaaagtggttgatccattttctaagaaagattggtatgatgtgaaagcacctgctatgttcaatataagaaatattggaaagacgctcgtcaccaggacccaaggaaccaaaattgcatctgatggtctcaagggtcgtgtgtttgaagtgagtcttgctgatttgcagaatgatgaagttgcatttagaaaattcaagctgattactgaagatgttcagggcaaaaactgcctgactaacttccatggcatggatcttacccgtgacaaaatgtgttccatggtcaaaaagtggcagacaatgattgaagctcatgttgatgtcaagactaccgatggttacttgcttcgtctgttctgtgttggttttactaaaaccgcaacaatcagatacggaagacctcttatgctcagcaccaaccggtccgtccaatcccggaagaaaatgatgggaaatcatgacccgagagggggcagaaaaatggaccttgaaagaaagggggccacataaatttgaattccacaaacagcctttgggaaaacgacattcgtaaaagggcttggcccaaatcccatttttatccccccctcccaaggaacggcgcttccgggtaaaaaaaagagtaaaaaaagtgcgtgcggacaaaggcccacaagggccgtgggaatccgggcgaaaaaaagctccccacggggagaacctctttttgggggggaaagggcccacttccaattcctcctggcgaa

SEQ ID NO: 28047 - DNA, 168 bp, Macaca Mulatta
gctccagaataagaccaagctgactgtactggaaggagacattctggatgagccattcctgaagagagcctgccaggacgtctcggtcgtcatccacaccgcctgtatcattgatgtctttggtgtcactcacagagagtccatcatgaacgtcaatgtgaaaggtac

SEQ ID NO: 28048 - DNA, 638 bp, Macaca Mulatta
ggtgacaggagataagggggtgacaagaggagataagagagggacaggttctgtcgggggtgacaccaggagagagggacaggttctgtcaggggtgacatcaggagggacaggttctgttggggatgacaccaggagagagaacaggttctgttgggggtgacaccaggagagagggacaggttctgtcaggggtgacaccaggagagagggacaggttctgtcaggggtgacatcaggagagagggacaggttctgtcgggggtgacacaaggagatagggacaggttctgttgggggtgaccaggagaaagggacaggttctgttgggggtgacaccaggaaagggacagtttctgtcaggggtgacaccaggagagagggacagtttctgtcaggggtgacaccaggagggagggacaggttctgttgggggtgacaggagataagggggtgacaagaggagataagagagggacaggttctgtcgggggtgacaccagaagagagggacaggttctgttgggggtgacaccaggaggagggacaggttctgttgggggtgacaagaggagataaggacaggttctgtcaggagtgacaccaggagagagggaccggttctgtcgggggtgaca

SEQ ID NO: 28049 - DNA, 921 bp, Macaca Mulatta
gagcagcgtcgtcagtacctcctacgtttgaaaaacagccagctggagaagacctatggggagatggccaagatcgtggacgtccccaccaagcagcttcgagctgccaaccccatagactccatgctctgccacctctgccacaatgtcagctttccctgtaccagaaatggctgtgttgacatggagcacttcaaggtaattaagacccatcagatcgaggatgaaagggagaggcgggagaagaaattgtaccttgggtattctctcctgggtgcccaccccatcctgaaccaaaccatcggccggatgcagcgtgccaccgagggcaggaaagaagagctctttgccctctactctgctcatgatgtcactctgtcaccagttctcagtgccttgggcctttcagaagccagattcccaaggtttgcagccaggttgatctttgagctttggcaagacagagaaaagcccaatgaacattccgtccggattctttacaatggcgtcgatgtcacattccacacctctttctgccaagaccaccacaagcgttctcccaagcccatgtgcccgctggaaaacttggtccgctttgtcaaaagggacatgtttgtagccctgggtggcagtagtacaaattattatgatgcatgtcacagggaaggattctaaaaggtgtgcagtacagcagcatagaatctgtgccaatacagggcactgggaaaagtccacttctagttctgtctgttgctaagggtagaaaattattgctttttaaaggctaaatattgtttgtgggaaccacagatggttggggttgaacagtaagcatgttgctgtaatgtggtatgtgaatttcttggtataaaatggccagttcatagaggaatagaaagtattttgtcacagccagacttt

SEQ ID NO: 28050 - DNA, 283 bp, Macaca Mulatta
ccacctcaggccgctggggcaccgagctgccctggatggggggctggcacgccaactcttttaggaccctgttctgaaggcacctcctcatctcagaaactggtggtgctctcagggcaaaatcgtgttccccacccctggggcagaacccgtcttagaagcctctgagtccctctgcagaagaccaggcagcaaagcccccatctggaagtctgtctgcctttgttccttgaagaatgcagcattgcctttgtctgttcccaccacatggaggtgggggtgt

SEQ ID NO: 28051 - DNA, 608 bp, Macaca Mulatta
atgaagacattcgagagacgtatggttacgacatgaaggacacagccagtgtgaattcctctagtagtcttgaacccaatcttttttgtgatgaagagattcccatcaaatctgaggagttggtgactcacatgtggacagcaccttcattttgtgcagagcatgcttactcttctgcttccaagagttgttctcaaggttctagcaccccaaggaaacaacctcggaagagccctttggtgccccggagtttggaacctccggtgctggagttgtcacctggagctaaggcacaactggaagaacttatgatgtttggagacctcctagaagtatctctggacgagactcaacacatatggcggattttgcaggccacacacccaccatctgaagacagattcttgcatatcatggaggatgacagcatggaagagaaaccactaaaagtgaaaggaaaggactcttcagagaagaaacggaaacggaagttagaaaaggtagagcaactttttggagaaggaaaacagaagtccaaggagttaaagaaaatggacaaacctataaagaagaaattaaaattaagtgcagacaaatcaaaggagctg

SEQ ID NO: 28052 - DNA, 892 bp, Macaca Mulatta
  misc_feature (1)...(892): n = A,T,C or G
ggggacagcgcgtctgaggatgcgtagtaaggataacgggcccggaagtcggaagttcaatgccggccttcagctggactgacggccggcgctgactcccgccttagtgggcggagttgtgccgcgtctgatgcgcagttccctttctagcgctgcaagccgaatcctagaggctaacccggcaggtgggcgggagaaagtcggtttccgcaccaatagctgaggcgttcagggttgtccagggacgctatcctcacgtgtctggttccgagtgctgcgtttggctgtgctgggaagttgagtagacagtggcctcgagaccctgcctgcctgaggaggcctcggttggtcgcgaaggagctgcagcatccagagtagcacctacgaacacattcatggacccaaattgagggacattttgttccaggagacaagatgccaactggcaagcagctagctgaccttggctataagaccttctctgcctccatgatgctccttactgtgtatggggggtacctctgcagtgtcggaatctaccactatttccagcagcgcagggcccagcgccaggcggcagaagaacagaagacctcaggaatcctgtagatctggggggctttttctcctgagcagagaggcccaaggcatgctgtggagagacttcacctgccaccatttccaggtcaacaggactagagcgttgatggttttcaaactctgttggaagaaagtgtctgtaatttctctggttctgccagtctgtgccagtttgacagtttatggaggctgttgaatcgtaatancaatgtgagtgtgaggtacacctacagacattaaatattttgccannnnnnnnnnnnnnnnnnnnnnnnnnnnnnnnnnnnttgtc

SEQ ID NO: 28053 - DNA, 693 bp, Macaca Mulatta
  misc_feature (1)...(693): n = A,T,C or G
cgaggcggaagtgtgaagcattacttcctcattgtactcaagtcgtctcaaatgtaccttagggaagccttcttgaccaccttattttaaaatacctattactccactcgctatttccctttcctgttttatttttctccatagcacttacatcaacttgctctatatgtcttaggtctagttatttgtttattacctgtctctgccccaacccccaacccccacacttgctcacacactggaatacaagccctgtgtcatttttcattgctgtatccacagacctgactcattgtagatactgacattattaaatgaatgaatttctcaaatgcagtgtgaataatcataatatgaaagtaaataaggaaatcagctctctaaggcaatgctattctttttatactctcaggatagaagatcttggcgttgtggtagattgccttcctgtgctcaccaattggtaaaaacaatatttttcagaaaaaaagtaagattaaaggaggtcaaattatggctcatccatatttttataacttggtatttattttagtttacaggaagaaaaacaatatatctcacttggctgctgtgtagacttgttgcctctagtanagtcactacttaaaagcaaatttgacgagtaagtgctaatctggatcttgattcattttctttttcaacatccttgat

SEQ ID NO: 28054 - DNA, 805 bp, Macaca Mulatta
ctacaggtgctgagcgggatggggcctcggcaggagagcgtgcaggaacccccaccccacctgtcttccaggtgcggcctggcttgcctcccacaccagtggcccgcacctcgcggacagaggggcctgtcatccggattgacttgcctcgcaagaagtaccctgcgtgggatgctcattttattgaccgccggctccggaagaccatcctggcactggagtactcctcacctgccacgccccggttgcagtaccggagtgtggggaccacccaggagctgctggagtatgagaccacagtgtaggctgcagtgtccccgcacaaaagggacaggcttggctgatcccacatcggccacagtgttgagcccggaatttcagggccaccaggctaagggggagtggatctgttggttcaagagtagagcagccccacttttgggttctttcaggggacggggcagccttgcagaggccccagccctgggccccgttttcagccttgtggcccattccctaaattcccctgacccagggcctggggaatcatctggtgctacacttttcgagctgccctgctttcatggggcctccacacctctcccctgcctggtgttgcccatatgttgcccctgctggacttgccagagaaagggcactgtctggggtccatgacctagaccctgtgcccctccggggttgtggagagtgggctgcctctgtggtggcaaaagacctctgagaaggatggaggaggccgtggaagggatggggtgaggttggagcatcgtgtggacagggatgg

SEQ ID NO: 28055 - DNA, 813 bp, Macaca Mulatta
ggggttgccttagctgattgaaactgaaatcgacatacgagatactatgtctgtaagggagaggtttagtggctgaaggttagtgtattccacatccacaaagtcaagtattctgggctcttctttctccctctgcccccatttaagatgatgtcacttaccctccccttgtagtatcctgctcagccaagatctgcgtaagattatgattcaggggcattttggtgctgttcaaagcaagaaccgaatttagaagttcccttaaaaagaaacatgtaagacttaccaatggaggcatcgtgaatggttgcagtggagcttaggtgtaacatcatcaaatgtgttcacatgtggggttggtttaatggagtgtccacacggagataactgcgatactggaacacctgtgagagagattgttctatagggctggaatattcagagttacattcttggaagtttctgtttttacttgcatcgaacacccctctgttgttctccatcatctttaatagcaactgggaaatgaatttggggggttgggtaagaaggggtgcatttctcctcacaaagggggttttattggacttttctcctggcggaaaagctttctgaaaaacacagggcaggacggggaaaaagactaacctagtcacttttttgcctttccccagcccccccttttccaaggcccatcccttccattagttccttttccggggcctttcacctttcttttccccccctgggccccaattaacccatttttttggggttcctagtagccccccaagtggtggtgaagacaaataa

SEQ ID NO: 28056 - DNA, 212 bp, Macaca Mulatta
ggtgcagcaggagcgggacgagctctaccggaagttcactgcagccatccaggaggtgcagcagaagacaggcttcaagaacctggtgctagagcgcaagctacaggctctgagcgctgctgtggagaagaaggaggtgcagttcaacgaggtcctggctgcctctaacctggaccccgcagccctgacgctggtgtcccgcaagcttgagg

SEQ ID NO: 28057 - DNA, 690 bp, Macaca Mulatta
ctgaatgtatttcgcatccctgattttggaccacagtaaacgtaggagcactgttgaagtcatggaaaggagatcgaaggaggaagattgacttggttctttcttagtcctatatctgtagcatagatgacttggaataaaagctgtatgcatgggcattacccctcaggtcttaagaaataagtcctgaacgcatgtcgttccaaactaacactctgtaatttttcttttatgtcttattttccaagaatcatccattttttgcacccctcacccccaactctgttattcagtagagagaaatgtatggctttctgattggtgagtgaaagagtaacttgagacatgacctaagttgaagagtttagacttgctgaggtttagaagtgatggaaatgaagagagcatttcaataaaatgtgacttggctgtctttggaagagaagtgcaaggctttcctttgaataatttaaattagtctggtaggatgtcaggtgagactgtgtatgcaaaatgaatggcacaggtgatgctagggcctcatacttgggtctgatgtcttggcacagggtaagtaaaggttaattccagaagagaggaatgacttgaaggcaaaggaaacaaaggaaggcggttcggtgaagagaataggttgccatgagatttgatagattctagtttcccaatgtt

SEQ ID NO: 28058 - DNA, 451 bp, Macaca Mulatta
tctttttcttatttttgtattaattggtaagtgaaaactctgttaaagatcacaccacaaatattttcaggaaacatctgaaaagataaaacaaagaacaagtaactttcaatacttactgaaattgacactttttgaaatgtcagtctgaaaataattaagatatctctgctttgtatgagtttcttttatgaaacttgataccacaggagtccagtgatactggtcacaaaagccagagaaactaccaagcccagctttgttatcatagccactttctgcccagcttctgttatttttagtgttttttcagatataaatcggggtccaggaaatcctcaccagaatctggcactgcagccagaggtgacacttccagagttctagtaggctgctatggaatttctggcatgaaaattcctgacccctcacactttaccccctgtacagc

SEQ ID NO: 28059 - DNA, 253 bp, Macaca Mulatta
ataggcccagtgcagggaaatcagagggccaaagctagcgcaatttctcatcccgctgaccgtctgtgcccggcttacagaggagggcatcagcgcagggacagagcttcggagcccatgcgaatgcgaaagcctcgtggagttccagggccgcactctgggggcgctcgagagcctgacgctgaaccatatcctttggggctggtggcgcgggctggagggaaagtgaagggacctcggcgaaccccaacgg

SEQ ID NO: 28060 - DNA, 107 bp, Macaca Mulatta
  misc_feature (1)...(107): n = A,T,C or G
ctctttggatgatgacattttcatcttcaattttcctgggactggacattggactaattatctcagtagtttctgctttcttcatcaccagtgttcgttcacacagn

SEQ ID NO: 28061 - DNA, 497 bp, Macaca Mulatta
tcattctggagagaaaccttacaagtgtaatgagtgtgacaagacctttcgtcacaagtcatccctcacatgccatcgtagacttcatactggagagaaaccttgcaagtgtaatgagggtggcaagaacttcaatcaacagttaacccttaaatgccattgtagacttcatactggagagaaaccttacaaatgtgaagaatgtgacaaagcttacagtttcaaatcaaaccttgaaatacatcggaaaagtcatactggagagaatctttgcaagtgtaatgagtgtggcaagacctttagccggacatcatcccttacataccatcgtagagttcatactggagagaaaccttacaaatgtgaagaatgtgacaaagctttccgtttcaagtcaagccttgtaatacataggggaattcatactggagagaaactgtacaagtgtaatgagtgtggcaagacctttagtgagaagtcgtaccttagacgccatc

SEQ ID NO: 28062 - DNA, 739 bp, Macaca Mulatta
gagtctcagatccggcaggtgatccacctggtcctggaatgttatgcagacctctccttgccagataaaaacaaagtccttgcaggtatcctgcattcctgggggcgaaagggcctctctgaaaagttgatggcttatgtggaaggttgtcaggaagacctcaatacgacttttaaccagctcactcagagtgcctccgaacagggcttggcgaaagctgtggcctccgtggcccgcctgatcatagtgcacccggaagtcacggtgaagaaaatgtgcagcctggctgtggtcaatcttggcgcccacaagttcctggcccagattctcactgccttccctgcccttcggttcgtggaagagcagagtcccaattcatctgccacgttcatggtgtcatgcctcaaagaaaccgtctggatgaagttctctacacccaaggaagaaaagcaatttttagagctcctgaactgcctgatgcatcccgtgaagccccaggggattccagtagctgctcttcttgagccagaggaggtgctgagggagtttgtcctgcctttcttgaggttagatgttgaagaagtagacctcagtctgaagatcttcatccagactctagaagcagacacgtgccgagaggagtactggctccagacctgctccccgtttccactcctcttcagcttgtgccagatcttggatggcttcagcaaatactggcagctccccaaggagaagc

SEQ ID NO: 28063 - DNA, 785 bp, Macaca Mulatta
acttagaagatataaaaatgtgttaacagccatgattgtacttgttgtttgtttttaagtttacaaagccttttaaagggggaaatggtgaataacagactcactgaaaggattctaagatgaggaagtcacaaactctgatttcccaaatagtcactgggagaaatcagcgaaggcttctctgcatgctctctgcactcatttccaaacacccagagtgtgtgacgcctgtctgctcatctgctccacacccacgtcttcacgctccaggtcagaccagactgaaggattctcatgaacaataagggtggttgagatctcttgcaagcaaacctgttacagctacgacctcctgctgccagctacacggatagatagctttgcacttataactccataggagaccgagttctactctattattgtatttgcagttagacaactgtccctttgtgaaagaagcaatgctatgctgttttccccttttcttacccccatatcccttcagttgtccccacccccaaaggtagcataaggatggaacccacttctatttttctgttgttgcattggtgtttgtcgttattttgtttttatggattaagtctaagacaaccttcaaaactctaacgaaagagagaaagtgttgtggacaatcagaatatacttgtgtacttatattttgatagcttgctattttagggtataaattactcttttttaaataacttctttttttctatcatttacttttagcctttaaaataagaaaggaaatcatgggt

SEQ ID NO: 28064 - DNA, 202 bp, Macaca Mulatta
gctatttcagtagtatagaccagtgagttctaaatattttttctcatcaataattgttttttaagttttatgataatgttgtccatttttttggctactctgaaatgttgcagtgtggaacaatggaaagagcctgggtgtttgggtcagataaatgaagatcagaccgcagttccagcctcatttgcttgagactttgtgt

SEQ ID NO: 28065 - DNA, 332 bp, Macaca Mulatta
  misc_feature (1)...(332): n = A,T,C or G
gcggcgcctgtcgggggacaagggttccccgggagttgctggactaagacatgagcctcctactgcgtggttgggctcggtagcacatcgtgggnnnnnnnnnnnnnnnnnnnnnngtttggccctgcggtgaccagagcaacccaagccgccaccatggtgaaattgctagtggccaaaatcctttgcatggtgggcgtgttcttcttcatgctgcttggctccctgctccccgtgaagatcatcgagacagattttgagaaggcccatcgctccaaaaagatcctgtctctctgcaacacctttggaggaggggtgtttctggccacgtg

SEQ ID NO: 28066 - DNA, 3854 bp, Macaca Mulatta
  misc_feature (1)...(3854): n = A,T,C or G
aggtcactgttcatcatgttagatagccttaacagtctcgatggttctactagctctgtgggacaagcctggctgaaccaagtcctacaaagacatgatattgcacgagttttggaaccattgctattgctcctgcttcatccaaaaactcagagggtttcagtacagcgtgtacaagcagaacgttactggaataaggctccctgttatccaggagaggacaatgacaagcatttcatgcaaaatattgcctgcagcaatgnnnnnnnnnnnnnnnnnnnnnnnnnnnnnnnnnnnnnnnnnnnnnnnnnnnnnnnnnnnnnnnnnnnnnnnnnnnnnnnnnnnnnnnnnnnnnnnnnnnnnnnnnnnnnnnnnnnnnnnnnnnnnnnnnnnnnnnnnnnnnnnnnnnnnnnnnnnnnnnnnnnnnnnnnnnnnnnnnnnnnnnnnnnnnnnnnntctgactcgggatgttcacagtcctctgcaggggacaacttgagttatgaagttgatcctgaaaccgtgaatgcccaagaggattctcaaatgctaaaggaaagctccccagatgatgatgttcagcaggtagtgtttgacctgatatgtaaagttgtaagtggcctcgaagtggaatctgcatcagttacatctcaattagaaattgaagctatgcccccaaagtgcagtgatatagatccagatgaagagacaattaaaattgaagatgactctattcaacagagtcagaatgttttgctgagtaatgaaagttctcagtttctgtctgtgtctgcagagagaggccatgagtgtgtggcaaatggaatatccaggaatagctcctcaccttgtatttcaggaaccacacacactcttcatgactcttcttttgcttccatagaaaccaaatctagacaaaggagtcacagtagtattcaattcagcttcaaagaaaaattatcagaaaaagtttcggagaaggaaacaatagttaaggagtcaggtaaacaaccaggagcaaaacctaaagtaaaacttgccagaaaaaaggatgatgacaagaaaaaatcttccaatgaaaaactcaaacaaaccagtgtattctttagtgatggtctggatttagagaactggtatagctgtggagagggagacatttctgaaattgaaagtgacatgggttctccaggatctcggaaatctcacagtttcaacattcatccnnnnnnnnnnnnnnnnnnnnnnnnnnnnnnnnnnnnnnnnnnnnnnnnnnnnnnnnnnnnnnnnnnnnnnnnnnnnnnnnnnnnnnnnnnnnnnnnnnnnnnnnnnnnnnnnnnnnnnnnnnnnnnnnnnnnnnnnnnnnnnnnnnnnnnnnnnnnnnnnnnnnnnnnnnnnnnnnnnnnnnnnnnnnnnnnnnnnnnnnnnnnnnnnnnnnnnnnnnnnnnnnnnnnnnnnnnnnnnnnnnnnnnnnnnnnnnnnnnnnnnnnnnnnnnnnnnnnnnnnnnnnnnnnnnnnnnnnnnnnnnnnnnnnnnnnnnnnnnnnnnnnnnnnnnnnnnnnnnnnnnnnnnnnnnnnnnnnnnnnnnnnnnnnnnnnnnnnnnnnnnnnnnnnnnnnnnnnnnnnnnnnnnnnnnnnnnnnnnnnnnnnnnnnnnnnnnnnnnnnnnnnnnnnnnnnnnnnnnnnnnnnnnnnnnnnnnnnnnnnnnnnnnnnnnnnnnnnnnnnnnnnnnnnnnnnnnnnnnnnnnnnnnnnnnnnnnnnnnnnnnnnnnnnnnnnnnnnnnnnnnnnnnnnnnnnnnnnnnnnnnnnnnnnnnnnnnnnnnnnnnnnnnnnnnnnnnnnnnnnnnnnnnnnnnnnnnnnnnnnnnnnnnnnnnnnnnnnnnnnnnnnnnnnnnnnnnnnnnnnnnnnnnnnnnnnnnnnnnnnnnnnnnnnnnnnnnnnnnnnnnnnnnnnnnnnnnnnnnnnnnnnnnnnnnnnnnnnnnnnnnnnnnnnnnnnnnnnnnnnnnnnnnnnnnnnnnnnnnnnnnnnnnnnnnnnnnnnnnnnnnnnnnnnnnnnnnnnnnnnnnnnnnnnnnnnnnnnnnnnnnnnnnnnnnnnnnnnnnnnnnnnnnnnnnnnnnnnnnnnnnnnnnnnnnnnnnnnnnnnnnnnnnnnnnnnnnnnnnnnnnnnnnnnnnnnnnnnnnnnnnnnnnnnnnnnnnnnnnnnnnnnnnnnnnnnnnnnnnnnnnnnnnnnnnnnnnnnnnnnnnnnnnnnnnnnnnnnnnnnnnnnnnnnnnnnnnnnnnnnnnnnnnnnnnnnnnnnnnnnnnnnnnnnnnnnnnnnnnnnnnnnnnnnnnnnnnnnnnnnnnnnnnnnnnnnnnnnnnnnnnnnnnnnnnnnnnnnnnnnnnnnnnnnnnnnnnnnnnnnnnnnnnnnnnnnnnnnnnnnnnnnnnnnnnnnnnnnnnnnnnnnnnnnnnnnnnnnnnnnnnnnnnnnnnnnnnnnnnnnnnnnnnnnnnnnnnnnnnnnnnnnnnnnnnnnnnnnnnnnnnnnnnnnnnnnnnnnnnnnnnnnnnnnnnnnnnnnnnnnnnnnnnnnnnnnnnnnnnnnnnnnnnnnnnnnnnnnnnnnnnnnnnnnnnnnnnnnnnnnnnnnnnnnnnnnnnnnnnnnnnnnnnnnnnnnnnnnnnnnnnnnnnnnnnnnnnnnnnnnnnnnnnnnnnnnnnnnnnnnnnnnnnnnnnnnnnnnnnnnnnnnnnnnnnnnnnnnnnnnnnnnnnnnnnnnnnnnnnnnnnnnnnnnnnnnnnnnnnnnnnnnnnnnnnnnnnnnnnnnnnnnnnnnnnnnnnnnnnnnnnnnnnnnnnnnnnnnnnnnnnnnnnnnnnnnnnnnnngaattccagtgcccaatttagtggatagctgggcgtcactgttgatacttctgaaagactctatacaactgagtcttccagctccagggcagtttcttatacttgggngggttctgaatgagtttattatgaaaaaccctagtttggaaaataagaaagaccaaagagaccttcaggnaggatgtaactcacaaaatagtggatgcaattggtgtaattgctggttcttctctggaacaaacaacgtggctgcgacgaaatcttgaagttaagccttctcccaaaataatggtagatggaaccaatttggaatctgatgttgaagnnnnnnnnnnnnnnnnnnnnnnnnnnnnnnnnnnnnnnnnnnnnnnnnnnnnnnnnnnnnnnnnnnnnnnnnnnnnnnggttttggctcatcttttggatatggttttctatagtgatgaaaaggagcgggttattcctttacttgtaaatattatgcattatgttgtgccctacctcagaaatcacagnagtgcacataatgcccctagttatcgagcttgtgtccagctgctcagcagtcttagtgggtatcagtacacacggagagcttggaaaaaagaagcttttgacctctttatggatcccagtttctttcagannnnnnnnnnnnnnnnnnnnnnnnnnnnnnnnnnnnnnnnnnnnnnnnnnnnnnnnnnnnnnnnnnnnnnnnnnnnnnnnnnnnnnnnnnnnnnnnnnnnnnnnnnnnnnnnnnnnnnnnnnnnnnnnnnnnnnnnnnnnnnnnnnnnnnnnnnnnnnnnnnnnnnnnnnnnnnnnnnnnnnnnnnnnnnnnnnnnnnnnnnnnnnnnnnnnnnnnnnnnnnnnnnnnnnnnnnnagagagattggtcgagagtctccgtttgccacaggtgccaactctccattctcaagtgttcctgtttttcagagtattacttttaagaatgtcaccccaacatcttacctcac

SEQ ID NO: 28067 - DNA, 311 bp, Macaca Mulatta
  misc_feature (1)...(311): n = A,T,C or G
tcagtttacaacattatgctaatttatttattcgcatctctataaacaaagctgtgaaatgtacaaaaatgtgtagcttgctatccaaagacagtgagaggaacactgtaattaagttcgatgaagtgaagtatttttctgtacaggtnnnnnnnnnnnnnnnnnnnnnnnnnnnnnnnnnnnnnnnnnnnnnnnnnnnnnnnnnnnnnnnnnnnnnnnnnnnnnnnnnnnnnnnnnnnnnnnnnnnnnnnnnnnnnnnnnnnnnnnagaaagggtgcttcattgaagaagtccaagtgttgcatagaaac

SEQ ID NO: 28068 - DNA, 527 bp, Macaca Mulatta
cgtcccgggcagagccggtgcgcgacatccgctgtgagttctgcggtgagttcttcgagaaccgcaagggcctgtcgagtcatgcgcgctcacacctgcggcagatgggtgtgaccgagtggtcggtcaatggttcgcccatcgacacactgcgagaaatcctcaagaagaagtccaagccgtgcctcatcaagaaggagccaccggctggagacctggcccctgccttggctgaggatgggcctcccaccatggcccctgggcccgtgcagtccccactgccgttgtcacccctggctggccggccaggcaaaccaggtgcagggccggcgcaggttcctcgagagctcagcctgacgcccatcactggggccaagccctcagccactggctacctgggctcagtgacaaccaagcggcccctgcaggaggaccgcctcctcccagcagaggtcaaggccaagacctacatccagactgaactgcccttcaaggcaaagacccttcacgagaagacctcccactcc

SEQ ID NO: 28069 - DNA, 113 bp, Macaca Mulatta
gatatgccagcctctacttctgctgcgccatcgagggccaagacaatgacgctcatcacactggagctgatccaccgatacgtggagctcttagacaaatactttggcagtgt

SEQ ID NO: 28070 - DNA, 2555 bp, Macaca Mulatta
  misc_feature (1)...(2555): n = A,T,C or G
ggttatataccaccttataatgctacagtagttcagaagttgttggatcagggagctctactaatgggaaaaacaaatttagatgagtttgctatgggnnnnnnnnnnnnnnnnnnnnnnnnnnnnnnnnnnnnnnnnnnnnnnnnnnnnnnnnnnnnnnnnnnnnnnnnnnnnnnnnnnnnnnnnnnnnnnnnnnnnnnnnnnnnnnnnnnnnnnnnnnnnnnnnnnnnnnnnnnnnnnnnnnnnnnnnnnnnnnnnnnnnnnnnnnnnnnnnnnnnnnnnnnnnnnnnnnnnnnnnnnnnnnnnnnnnnnnnnnnnnnnnnnnnnnnnnnnnnnnnnnnnnnnnnnnnnnnnnnnnnnnnnnnnnnnnnnnnnnnnnnnnnnnnnnnnnnnnnnnnnnnnnnnnnnnnnnnnnnnnnnnnnnnnnnnnnnnnnnnnnnnnnnnnnnnnnnnnnnnnnnnnnnnnnnnnnnnnnnnnnnnnnnnnnnnnnnnnnnnnnnnnnnnnnnnnnnnnnnnnnnnnnnnnnnnnnnnnnnnnnnnnnnnnnnnnnnnnnnnnnnnnnnnnnnnnnnnnnnnnnnnnnnnnnnnnnnnnnnnnnnnnnnnnnnnnnnnnnnnnnnnnnnnnnnnnnnnnnnnnnnnnnnnnnnnnnnnnnnnnnnnnnnnnnnnnnnnnnnnnnnnnnnnnnnnnnnnnnnnnnnnnnnnnnnnnnnnnnnnnnnnnnnnnnnnnnnnnnnnnnnnnnnnnnnnnnnnnnnnnnnnnnnnnnnnnnnnnnnnnnnnnnnnnnnnnnnnnnnnnnnnnnnnnnnnnnnnnnnnnnnnnnnnnnnnnnnnnnnnnnnnnnnnnnnnnnnnnnnnnnnnnnnnnnnnnnnnnnnnnnnnnnnnnnnnnnnnnnnnnnnnnnnnnnnnnnnnnnnnnnnnnnnnnnnnnnnnnnnnnnnnnnnnnnnnnnnnnnnnnnnnnnnnnnnnnnnnnnnnnnnnnnnnnnnnnnnnnnnnnnnnnnnnnnnnnnnnnnnnnnnnnnnnnnnnnnnnnnnnnnnnnnnnnnnnnnnnnnnnnnnnnnnnnnnnnnnnnnnnnnnnaggattgccagcagtgagtatccctgttgcactctcaaaccaagggttgccaataggactgcagtttattggacgtgcgttttgtgaccagcagcttcttacagtagccaaatggtttgaaaaacaagtacagtttcctgttattcaacttcnnnnnnnnnnnnnnnnnnnnnnnnnnnnnnnnnnnnnnnnnnnnnnnnnnnnnnnnnnnnnnnnnnnnnnnnnnnnnnnnnnnnnnnnnnnnnnnnnnnnnnnnnnnnnnnnnnnnnnnnnnnnnnnnnnnnnnnnnnnnnnnnnnnnnnnnnnnnnnnnnnnnnnnnnnnnnnnnnnnnnnnnnnnnnnnnnnnnnnnnnnnnnnnnnnnnnnnnnnnnnnnnnnnnnnnnnnnnnnnnnnnnnnnnnnnnnnnnnnnnnnnnnnnnnnnnnnnnnnnnnnnnnnnnnnnnnnnnnnnnnnnnnnnnnnnnnnnnnnnnnnnnnnnnnnnnnnnnnnnnnnnnnnnnnnnnnnnnnnnnnnnnnnnnnnnnnnnnnnnnnnnnnnnnnnnnnnnnnnnnnnnnnnnnnnnnnnnnnnnnnnnnnnnnnnnnnnnnnnnnnnnnnnnnnnnnnnnnnnnnnnnnnnnnnnnnnnnnnnnnnnnnnnnnnnnnnnnnnnnnnnnnnnnnnnnnnnnnnnnnnnnnnnnnnnnnnnnnnnnnnnnnnnnnnnnnnnnnnnnnnnnnnnnnnnnnnnnnnnnnnnnnnnnnnnnnnnnnnnnnnnnnnnnnnnnnnnnnnnntgcattctgccataatgttcattataaagagtttacagtaaaaataagattagggataaacttttcaaaaagtgtatatctgtgtaactaaagcactaacaaaaacaaaaacatgaataatcttctagaggtaacctggatagcctaggcaggcaacttatcatgtggtgaaggccgcctcaggggttgttaaaaatgcatagaaacaattgagtgggattattggcttctgagtgctgagcaaagcaggtggaagaggaactctgagcacaggaggaaatgcaaccagtcagggcccagaatcatgcaaatctcaggggtatgcctctggggaggagccccaggtgcaggcactccttttatttccctaagaaagagctgaaatgactgagaactttcctttcctccttagagttacaattttacttctgctattccagagcccatacctagaagccagaataactccatgttacactgagttcatgctcctatttactgatcacaaatgagctcattgatgtcacagaaacgtttattgtaacctataacagaccatcacagattggaaacttggaagatagcagagcatggtattagggaaaaaagttccaaaacacaagtaacatacactgaaaaacgtgcagataatttgttgatgatgccaaagaggggatgcgcatggcaagatcttgccttaccc

SEQ ID NO: 28071 - DNA, 798 bp, Macaca Mulatta
  misc_feature (1)...(798): n = A,T,C or G
aaaattcgggctgccagcctctgcagaaccaaaagnnnnnnnnnnnnnnnnnnnnnnnnnnnnnnnnnnnnnnnnnnnnnnnnnnnnnnnnnnnnnnnnnnnnnnnnnnnnnnnnnnnnnnnnnnnnnnnnnnnnnnnnnnnnnnnnnnnnnnnnnnnnnnnnnnnnnnnnnnnnnnnnnnnnnnnnnnnnnnnnnnnnnnccaagtcaaccattcattgcagacctaaatattggtaaaaaggacagtgcagcccagcttggtaccctcacagaagtaactaatgactcaaagggagcagcaggaccccgctggaagangttcctgcgtaattcaagaaccccaccttttgtggagaatgagcagcctcaaccacctcagcctctgcaaatctggatcagatgcctgaggggatttaaagacaaggctcctccaggctcttatgtcctcaaagtgtccctgcttggtcgactgggaggctgtgtcttgcagtggcggcaaatggagcaactgaagaccagaacacgctccgtcaggcacaacggaaacttttatgacgtggggctgtatttccacgaaaacctttatgtggnggagcattactaataaaatcggtccctgttctatggactatgatcccaatctcttaaaagaagacnnnnnnnnnnnnnnnnagggagatagcctgacggatcattctgtgaaagaaaaatcaactgttttgagaactggagtagctgaagattattcacagggcatatcttacttggaggaactggaggaacaccgattttctgt

SEQ ID NO: 28072 - DNA, 897 bp, Macaca Mulatta
  misc_feature (1)...(897): n = A,T,C or G
gatatatattacattaaggaagtgtatctaaatggtattatatatttactttgtttaaacatacccctaatgttcttcaattntttgttaaaattcaaaatactttaattttctggaaatatagtagggggacatgacattccttccttgcctcatttatgggttcattcaggagcttattttccacttgtctcttctgattttctacaatgtagacagctagatgactctggatggcaagaccaaaattaagtactgtatttgctgaatgcattttcttgtgaaaataatgtcttttccttcccatgaggaagatctttcgattttcccatgaacttgatgtgtctttttttttaagttatgtttcatttttgtttgtttgtgtttatgcttctcttgtttctattgcagtttggccttggtattaccaacctacagtttttactatataaaagccaaactagaagagacaataactcaggccagatgtaagtactgtgaaagtgacttcagggtccatttgttatctcctagtaccagatgtttaaatacgtctagattttggaatacccaaggcttattaaatattttagtaggtgttattaccaaatctacagcaatgattctaacccattccaaacatgcaaggaacaagaaatattctacatggatagaatatgagcaggtactccagtctcactggcagtccccaccgcccttccctgccttgctatgtgctcatagaatcattgcagagatgtgtcctgttgctgtcgttttaagggtctgctagctggagcaaaatgtttcacatgctacttatcaacatagtctctactctcatggcactgtgctagtaaagcttttccttttctttccttttatttccttctggtt

SEQ ID NO: 28073 - DNA, 149 bp, Macaca Mulatta
tctgcccagatgaatagaacaggaatcttcctcctgcagggctgctgccagacaggctgaaagccccgggctatgcagagaagactgagccttgggtgaacagaggctgggactagaaattctcttgtgaaccaaatccccgctcagcc

SEQ ID NO: 28074 - DNA, 183 bp, Macaca Mulatta
cactacttaatgcactcagggactatgagggactattcagggactatgaatctgagccttcgtttcttgaactgaaaagcggagatgatgtaaactaccttgcaagattgtggagttgggtgaggtcatgaacataagggcctggcgcaaagggtgcgctgtaaataaacagacatccctcct

SEQ ID NO: 28075 - DNA, 782 bp, Macaca Mulatta
  misc_feature (1)...(782): n = A,T,C or G
ggnnnnnnnnnnnnnnnnnnnnnnnnnnnnnnnnnnnnnnnnnnnnnnnnnnnnnnnnnnnnnngtcnnnnnnnnnnnnnnnnnnnnnnnnnntggagcannnnnnnnnnnnnnnnnnnnnnnnnnnnnnnnnnnnngcgatgcccagtccatcacaaataagatcatcctagtttaaatctactctcacatggaccacagtatacatttctaagtgctgtgttttgtttgtttgtannnnnnnnnnnnnnnnnnnnnnnnnnnnnnnnnnnnnnnnnnnnnnnnnnnnnnnnnnnnnnnnnnnnnnnnnnnnnnnnnnnnnnnnnnnnnnnnnnnnnnnnnnnnnnnntgtgcccagcctgttctgtgttttttaagctgcaggagaatttttttaaaaactaattctcactatttgttcagtctgtcttcatcgaagtttgtggttgcagtttgaagttaaagtgacttttaaaggccacatcacctgagactagggtaatcatctttacttctggttcctgaaatcatattttttcagtgggccatcctccagtggttgtggttgttgagcatgcttttcgagcacctatgtggcttaaaacttcgcttatgttttctgttcaacactacctgtaatattttaaaactgattaatgtgatgtggaatacctttatgtaaaatttagttttaaattttgtaaataggcttataaatttgctatgggcaatggtttccttttatccaatcatccaaaaataaaccttttgccaaaaaaaaa

SEQ ID NO: 28076 - DNA, 2619 bp, Macaca Mulatta
  misc_feature (1)...(2619): n = A,T,C or G
atctgagcgctggccgtggtgcccggacactcccttggggggccggatggcggaccccggcccagatcccgaatctgagtcggaatcggtgttcccacgggaggtcgggctctttgcggactcttactcggagaagagccagttctgtttctgtgggcatgtgctgactatcactcagaactttgggtcccgcctcggggtggcggcgcgcgtgtgggacgcggnnnnnnnnnnnnnnnnnnnnnnnnnnnnnnnnnnnnnnnnnnnnnnnnnnnnnnnnnnnnnnnnnnnnnnnnnnnnnnnnnnnnnnnnnnnnnnnnnnnnnnnnnnnnnnnnnnnnnnnntaccatcactgacctacccctggccctcgttcagatccagggcaacgtccaggccaatgtgccagctgcatgccaggcccaggtgcgtgccttgtcctgggggattgaccatcatgtcttccctggagactatgacctggtgctgggggccgatatcgtgtacctggaacccaccttccctctgctgctggggaccctccaacacctgtgcaggccccatggcaccatctatctggcctccaagatgagagaggagcacgggacagagagcttctttcagcacctcctgccccagcatttccaactggagctggctcagcgggatgaggatgaaaatgtcaacatctatagggccaggcacagggaaccaagacctgcttgacatcacccctgctgttcttctcagtctcttgccctaatgaaggaactgggtatctcaaaaatcatgtttccagagccacaaacatgaagaccaaaaaggatggatttccctggcctctctcactttcttccttccctctttgttaccccagatactcttgggcaggtgcagtgagggacctgcttaccaggaatcccagagctctggcagcactagtgttagaacaccaaggaggttcctggctcctgttctcagaggaggaggatggtaaggtatctaggatttttaggggctaaggcaggtatatgggatatgagagcagtggttgtagagagactgtcactgatcacttccatttctgttgctgtttatacagaatggacttannnnnnnnnnnnnnnnnnnnnnnnnnnnnnnnnnnnntttgtttgagacagggtctcactctgtcacccaggcgggagtgcagatgcatgatcacagctcattacagcctcaacctctcaaggcccagatgatcttcctgcatcagctccccaagtagctgggactagaagcatgagccatcataccagctaatttttgtattttcagtagagaagggttttgccatgttgcccagggtggtgtcaaactcctgggctcaagtgatccaccnnnnnnnnnnnnnnnnnnnnnnnnnnnnnnnnnnnnnnnnnnnnnnnnnnnnnnnnnnnnnnnnnnnnnnnnnnnnnnnnnnnnnnnnnnnnnnnnnnnnnnnnnnnnnnnnnnnnnnnnnnnnnnnnnnnnnnnnnnnnnnnnnnnnnnnnnnnnnnnnnnnnnnnnnnnnnnnnnnnnnnnnnnnnnnnnnnnnnnnnnnnnnnnnnnnnnnnnnnnnnnnnnnnnnnnnnnnnnnnnnnnnnnnnnnnnnnnnnnnnnnnnnnnnnnnnnnnnnnnnnnnnnnnnnnnnnnnnnnnnnnnnnnnnnnnnnnnnnnnnnnnnnnnnnnnnnnnnnnnnnnnnnnnnnnnnnnnnnnnnnnnnnnnnnnnnnnnnnnnnnnnnnnnnnnnnnnnnnnnnnnnnnnnnnnnnnnnnnnnnnnnnnnnnnnnnnnnnnnnnnnnnnnnnnnnnnnnnnnnnnnnnnnnnnnnnnnnnnnnnnnnnnnnnnnnnnnnnnnnnnnnnnnnnnnnnnnnnnnnnnnnnnnnnnnnnnnnnnnnnnnnnnnnnnnnnnnnnnnnnnnnnnnnnnnnnnnnnnnnnnnnnnnnnnnnnnnnnnnnnnnnnnnnnnnnnnnnnnnnnnnnnnnnnnnnnnnnnnnnnnnnnnnnnnnnnnnnnnnnnnnnnnnnnnnnnnnnnnnncatttcctactcctttgctacatgtattggacctctggccaaattacaaaaaaagtactctttgttctctaaaaccacactaaagtttcctgacttctttctcactctttatgataatcctctgcctgaaaggctattgccacctgtcaaaatcttcattattctttgcctctttcctgagccccttgcttgaatgtgatttctttctccctgagaccctttaactgttcgtcttatgggaccttaatttgtcttgcattgacatttttgattttcattttctcaccattaaattaccttggaggatagggctgtgatttactcatgtctagtccccagaagcctaacacagttcctggcacacnnnnnnnnnnnacagatattgtgctcattcaataaatatttactcgctttgttcaatggattccacccctgcctttctaggcgaccttggacaaatttcagaacccattcaccaactacacaagtttgttgtgagtcataaatggataatgaatataaacgcgcattgaaaataaacataaaatgttacccac

SEQ ID NO: 28077 - DNA, 1201 bp, Macaca Mulatta
  misc_feature (1)...(1201): n = A,T,C or G
ggtcccgggcccgcctgtctctgaagccatgtatctgggacgagcctgaggatcttcttgcagggccctcctcagacctgcgtgcagaaggggctgtgatctcaagcctcaagggtccgagtgctcagagaatcagtccccgaaggagaaacaggaacactgaccagagcgtccgccaccagccatccctcaagcacaccaaaggtggcacccaagaggctgctgcagcggtctcagcaacgctgcgtgggccccgaggtgggcggcccttccagtgtgccgactgcgggatggtcttcacctgggtcacccacttcatcgagcaccagaagacccatcgcgaggaagggccctttccgtgccccgagtgtggcagggtcttcctgcacagctctgtccttgctgagcacggcaagatccacctgttggagccaccnnnnnnnnnnnnnnnnnnnnnnnnnnnnnnnnnnnnnnnnnnnnnnnnnnnnnnnnnnnnnnnnnnnnnnnnnnnnnnnnnnnnnnnnnnnnnnnnnnnnnnnnnnnnnnnnnnnnnnnnnnnnnnnnnnnnnnnnnnnnnnnnnnnnnnnnnnnnnnnnnnnnnnnnnnnnnnnnnnnnnnnnnnnnnnnnnnnnnnnnnnnnnnnnnnnnnnnnnnnnnnnnnnnnnnnnnnnnnnnnnnnnnnnnnnnnnnnnnnnnnnnnnnnnnnnnnnnnnnnnnnnnnnnnnnnnnnnnnnnnnnnnnnnnnnnnnnnnnnnnnnnnnnnnnnnnnnnnnnnnnnnnnnnnnnnnnnnnnnnnnnnnnnnnnnnnnnnnnnnnnnnnnnnnnnnnnnnnnnnnnnnnnnnnnnnnnnnnnnnnnnnnnnnnnnnnnnnnnnnnnnnnnnnnnnnnnnnnnnnnnnnnnnnnnnnnnnnnnnnnnnnnnnnnnnnnnnnnnnnnnnnnnnnnnnagcacctgactcaggggcagactctgccgctgggttttcatttcactgtggatatccctgaggccatgagggcgggagctggcctgggcagctccaactccagagaagggtacagctgaccccggctgccctcctgccagctcagcccccttggaacctaacagataaacaggnnnnnnnnnnnnnnnnnnnnnnnnnnnnnnnnnnnaacataaaatttaccatttcagtcattaaaaatgcacagttcagtgg

SEQ ID NO: 28078 - DNA, 1864 bp, Macaca Mulatta
  misc_feature (1)...(1864): n = A,T,C or G
ttcatctatatcattgtctcacctctctgtggtggatttacatggccaagctgtgtgaagaaataagaaaaagttatcattaaccaaggatatgagagaacaaggagttaaaagcaatccatgtgactcaagcctttcacatactgacagatggtatctgccagtctcttcaaccctcttnnnnnnnnnnnnnnnnnnnnnnnnnnnnnnnnnnnnnnnnnnnnnnnnnnnnnnnnnnnnnnnnnnnnnnnnnnnnnnnnnnnnnnnnnnnnnnnnnnnnnnnnnnnnnnnnnnnnnnnnnnnnnnnnnnnnnnnnnnnnnnnnnnnnnnnnnnnnnnnnnnnnnnnnnnnnnnnnnnnnnnnnnnnnnnnnnnnnnnnnnnnnnnnnnnnnnnnnnnnnnnnnnnnnnnnnnnnnnnnnnnnnnnnnnnnnnnnnnnnnnnnnnnnnnnnnnnnnnnnnnnnnnnnnnnnnnnnnnnnnnnnnnnnnnnnnnnnnnnnnnnnnnnnnnnnnnnnnnnnnnnnnnnnnnnnnnnnnnnnnnnnnnnnnnnnnnnnnnnnnnnnnnnnnnnnnnnnnnnnnnnnnnnnnnnnnnnnnnnnnnnnnnnnnnnnnnnnnnnnnnnnnnnnnnnnnnnnnnnnnnnnnnnnnnnnnnnnnnnnnnnnnnnnnnnnnnnnnnnnnnnnnnnnnnnnnnnnnnnnnnnnnnnnnnnnnnnnnnnnnnnnnnnnnnnnnnnnnnnnnnnnnnnnnnnnnnnnnnnnnnnnnnnnnnnnnnnnnnnnnnnnnnnnnnnnnnnnnnnnnnnnnnnnnnnnnnnnnnnnnnnnnnnnnnnnnnnnnnnnnnnnnnnnnnnnnnnnnnnnnnnnnnnnnnnnnnnnnnnnnnnnnnnnnnnnnnnnnnnnnnnnnnnnnnnnnnnnnnnnnnnnnnnnnnnnnnnnnnnnnnnnnnnnnnnnnnnnnnnnnnnnnnnnnnnnnnnnnnnnnnnnnnnnnnnnnnnnnnnnnnnnnnnnnnnnnnnnnnnnnnnnnnnnnnnnnnnnnnnnnnnnnnnnnnnnnnnnnnnnnnnnnnnnnnnnnnnnnnnnnnnnnnnnnnnnnnnnnnnnnnnnnnnnnnnnnnnnnnnnnnnnnnnnnnnnnnnnnnnnnnnnnnnnnnnnnnnnnnnnnnnnnnnnnnnnnnnnnnnnnnnnnnnnnnnnnnnnnnnnnnnnnnnnnnnnnnnnnnnnnnnnnnnnnnnnnnnnnnnnnnnnnnnnnnnnnnnnnnnnnnnnnnnnnnnnnnnnnnnnnnnnnnnnnnnnnnnnnnnnnnnnnnnnnnnnnnnnnnnnnnnnnnnnnnnnnnnnnnnnnnnnnnnnnnnnnnnnnnnnnnnnnnnnnnnnnnnnnnnnnnnnnnnnnnnnnnnnnnnnnnnnnnnnnnnnnnnnnnnnnnnnnnnnnnnnnnnnnnnnnnnnnnnnnnnnnnnnnnnnnnnnnnnnnnnnnnnnnnnnnnnnnnnnnnnnnnnnnnnnnnnnnnnnnnnnnnnnnnnnnnnnnnnnnnnnnnnnnnnnnnnnnnnnnnnnnnnnnnnnnnnnnnnnnnnnnnnnnnnnnnnnnnnnnnnnnnnnnnnnnnnnnnnnnnnnnnnnnnnnnnnnnnnnnnnnnnnnnnnnnnnnnnnnnnnnnnnnnnnnnnnnnnnnnnnnnnnnnnnnnnnnnnnnnnnnnnnnnnnnnnnnnnnnnnnnnnnnnnnnnnnnnnnnnnnnnnnnnnnnnnnnnnnnnnnnnnnnagggatcaataacctaactgttccttggtctatttatgtataagaatgctttttaaagcacatgtctcattttaaatgacgcacaaactgaagacgttaataaaattta

SEQ ID NO: 28079 - DNA, 798 bp, Macaca Mulatta
  misc_feature (1)...(798): n = A,T,C or G
gggtgtcatcccgggttatttagaattacagttaagaaggagaaacttctatagactgtatgaacgaggtgatatcttcatagtgggctattacaggcaggagaatgttttaactggtttacaaaatccatcaatacttgtgtcattccctgtaaaaggcaggagacatgtgattatgatcaggaaactgcacaaaattattgttttcagcccccgtgttattgtccttttgaannnnnnnnnnnnnnnnnnnaagccaaatttgtgtggtatatattcgtattccatgtgttagatggaagcatttgctatccagtgtgaataaaaagaacagttgtagtaaattattataaagccgatgagatttcatggcaggttattctaccaggctgtgcttgttggtttttcccatgactgtattgcttttataaatgtacaaatagttaccgaaatgacgagacccttgtttgcacagcattaataagaaccttgagaagaaccatagtctgttgatagccagctcagtttctggcctgaagcttggtgcaccctccagtgagacacaaggtctctccgtttaccaaagttaagaacagaagctggtgcatttaattaatagtccttggaatgtctgggccagtggggtaaacctccatgggtaacctatccaattgagaaatggggccagaaaaatggatactcttgaaattggttcaccattaccgcctaaaaaaatccccagaaccccttggtggtttcagaaatggcggaaggtataaaaaattcccacgtttaaac

SEQ ID NO: 28080 - DNA, 2334 bp, Macaca Mulatta
  misc_feature (1)...(2334): n = A,T,C or G
tgggaccgctgaccgcgctgctgctccgctctccccgctccaagcgccgacctgggcacccgccaccagcatggacgctcgccgcgtgccgnnnnnnnnnnnnnnnnnnnnnnnnnnnnnnnnnnnnnnnnnnnnnnnnnnnnnnnnnnnnnnnnnnnnnnnnnnnnnnnnnnnnnnnnnnnnnnnnnnnnnnnnnnnnnnnnnnnnnnnnnnnnnnnnnnnnnnnnnnnnnnnnnnnnnnnnnnnnnnnnnnnnnnnnnnnnnnnnnnnnnnnnnnnnnnnnnnnnnnnnnnnnnnnnnnnnnnnnnnnnnnnnnnnnnnnnnnnnnnnnnnnnnnnnnnnnnnnnnnnnnnnnnnnnnnnnnnnnnnnnnnnnnnnnnnnnnnnnnnnnnnnnnnnnnnnnnnnnnnnnnnnnnnnnnnnnnnnnnnnnnnnnnnnnnnnnnnnnnnnnnnnnnnnnnnnnnnnnnnnnnnnnnnnnnnnnnnnnnnnnnnnnnnnnnnnnnnnnnnnnnnnnnnnnnnnnnnnnnnnnnnnnnnnnnnnnnnnnnnnnnnnnnnnnnnnnnnnnnnnnnnnnnnnnnnnnnnnnnnnnnnnnnnnnnnnnnnnnnnnnnnnnnnnnnnnnnnnnnnnnnnnnnnnnnnnnnnnnnnnnnnnnnnnnnnnnnnnnnnnnnnnnnnnnnnnnnnnnnnnnnnnnnnnnnnnnnnnnnnnnnnnnnnnnnnnnnnnnnnnnnnnnnnnnnnnnnnnnnnnnnnnnnnnnnnnnnnnnnnnnnnnnnnnnnnnnnnnnnnnnnnnnnnnnnnnnnnnnnnnnnnnnnnnnnnnnnnnnnnnnnnnnnnnnnnnnnnnnnnnnnnnnnnnnnnnnnnnnnnnnnnnnnnnnnnnnnnnnnnnnnnnnnnnnnnnnnnnnnnnnnnnnnnnnnnnnnnnnnnnnnnnnnnnnnnnnnnnnnnnnnnnnnnnnnnnnnnnnnnnnnnnnnnnnnnnnnnnnnnnnnnnnnnnnnnnnnnnnnnnnnnnnnnnnnnnnnnnnnnnnnnnnnnnnnnnnnnnnnnnnnnnnnnnnnnnnnnnnnnnnnnnnnnnnnnnnnnnnnnnnnnnnnnnnnnnnnnnnnnnnnnnnnnnnnnnnnnnnnnnnnnnnnnnnnnnnnnnnnnnnnnnnnnnnnnnnnnnnnnnnnnnnnnnnnnnnnnnnnnnnnnnnnnnnnnnnnnnnnnnnnnnnnnnnnnnnnnnnnnnnnnnnnnnnnnnnnnnnnnnnnnnnnnnnnnnnnnnnnnnnnnnnnnnnnnnnnnnnnnnnnnnnnnnnnnnnnnnnnnnnnnnnnnnnnnnnnnnnnnnnnnnnnnnnnnnnnnnnnnnnnnnnnnnnnnnnnnnnnnnnnnnnnnnnnnnnnnnnnnnnnnnnnnnnnnnnnnnnnnnnnnnnnnnnnnnnnnnnnnnnnnnnnnnnnnnnnnnnnnnnnnnnnnnnnnnnnnnnnnnnnnnnnnnnnnnnnnnnnnnnnnnnnnnnnnnnnnnnnnnnnnnnnnnnnnnnnnnnnnnnnnnnnnnnnnnnnnnnnnnnnnnnnnnnnnnnnnnnnnnnnnnnnnnnnnnnnnnnnnnnnnnnnnnnnnnnnnnnnnnnnnnnnnnnnnnnnnnnnnnnnnnnnnnnnnnnnnnnnnnnnnnnnnnnnnnnnnnnnnnnnnnnnnnnnnnnnnnnnnnnnnnnnnnnnnnnnnnnnnnnnnnnnnnnnnnnnnnnnnnnnnnnnnnnnnnnnnnnnnnnnnnnnnnnnnnnnnnnnnnnnnnnnnnnnnnnnnnnnnnnnnnnnnnnnnnnnnnnnnnnnnnnnnnnnnnnnnnnnnnnnnnnnnnnnnnnnnnnnnnnnnnnnnnnnnnnnnnnnnnnnnnnnnnnnnnnnnnnnnnnnnnnnagcctgaaacaggaatttgaaatgcaggcataatatctggaaaatttgctgcctgccttctacttctcaaatctttcttataaaagtttccaattttttcactgaaacctgagttaagaatcttgatgatcagcctgtttcctaagaaactccaatcaagttaatcttagtagacatgtgtttctggagcatcacggaaggtatattactagttacactttgccctcagtttcttctctgttcccaacccccatctcatagcatccccctctatttccaatgcccctctccaaccacttagtttttgaatttcttttaaattacagttttatgaaagcatattttatttacttggtgttgaaatagccctgataaaacctaagcacttggaaacacaataaaagtattaactaactagatctattgaatttcagagaa

SEQ ID NO: 28081 - DNA, 3391 bp, Macaca Mulatta
  misc_feature (1)...(3391): n = A,T,C or G
tgatggaccctcaaccggagctgtggatagagtccaactacccccaggccccttgggagaacatcacgctttggtgccgaagcccctctcggatatcaagcaagttcctgttgctgaaggataagacacagatgacctggatccgcccttcccacaagaccttccaagtttcattccttataggtgcccttactgagtccaatgcaggtctttaccggtgctgctactggaaggagccaggctggtcaaagcccagtaaagttctagagttggaggcaccaggnggccagctgcccaagcccatcttctggattcaggctgagaccccccctcttcctggatgtaatgttaacatcctctgccatggctggnnnnnnnnnnnnnnnnnnnnnnnnnnnnnnnnnnnnnnnnnnnnnnnnnnnnnnnnnnnnnnnnnnnnnnnnnnnnnnnnnnnnnnnnnnnnnnnnnnnnnnnnnnnnnnnnnnnnnnnnnnnnnnnnnnnnnnnnnnnnnnnnnnnnnnnnnnnnnnnnnnnnnnnnnnnnnnnnnnnnnnnnnnnnnnnnnnnnnnnnaggactctaccccaaaccaactttgacagcccatcctgggcccatcatggcacctggagaaagcctgaatctcaggtgtcaagggccaatctatggaatgacctttgccctaatgagggttgaagacttggagaagtccttttaccacaagaagacaataaaaaacgaggcatatttcttcttccggtctttgaagatccaagatactggacattacctctgcttttactatgacatttcatatagaggttcactccttagtgatgtcctgaaannnnnnnnnnnnnnnnnnnnnnnnnnnnnnnnnnnnnnnnnnnnnnnnnnnnnnnnnnnnnnnnnnnnnnnnnnnnnnnnnnnnnnnnnnnnnnnnnnnnnnnnnnnnnnnnnnnnnnnnnnnnnnnnnnnnnnnnnnnnnnnnnnnnnnnnnnnnnnnnnnnnnnnnnnnnnnnnnnnnnnnnnnnnnnnnnnnnnnnnnnnnnnnnnnnnnnnnnnnnnnnnnnnnnnnnnnnnnnnnnnnnnnnnnnnnnnnnnnnnnnnnnnnnnnnnnnnnnnnnnnnnnnnnnnnnnnnnnnnnnnnnnnnnnnnnnnnnnnnnnnnnnnnnnnnnnnnnnnnnnnnnnnnnnnnnnnnnnnnnnnnnnnnnnnnnnnnnnnnnnnnnnnnnnnnnnnnnnnnnnnnnnnnnnnnnnnnnnnnnnnnnnnnnnnnnnnnnnnnnnnnnnnnnnnnnnnnnnnnnnnnnnnnnnnnnnnnnnnnnnnnnnnnnnnnnnnnnnnnnnnnnnnnnnnnnnnnnnnnnnnnnnnnnnnnnnnnnnnnnnnnnnnnnnnnnnnnnnnnnnnnnnnnnnnnnnnnnnnnnnnnnnnnnnnnnnnnnnnnnnnnnnnnnnnnnnnnnnnnnnnnnnnnnnnnnnnnnnnnnnnnnnnnnnnnnnnnnnnnnnnnnnnnnnnnnnnnnnnnnnnnnnnnnnnnnnnnnnnnnnnnnnnnnnnnnnnnnnnnnnnnnnnnnnnnnnnnnnnnnnnnnnnnnnnnnnnnnnnnnnnnnnnnnnnnnnnnnnnnnnnnnnnnnnnnnnnnnnnnnnnnnnnnnnnnnnnngaaatagtcatgccaacccctaagcctgagctgtgggcagagaccaactttcctctggccccgtggaagaacttaaccctctggtgcagaagcccttctggctcaactaaggagtttgtgctgctgaaggacgggaccgggtggattgcaactcgcccggcctcagagcaggtccgggctgcctttccccttggcgccctgacccagagccacaccgggagctaccactgccattcatgggaggagatggctgtatcggagcccagtgaggcacttgagctgctggggacagncagacatcctccccaaacctgtcatttctgcttcccnnnnnnnnnnnnnnnnnnnnnnnnnnnnnnnnnnnnnnnnnnnnnnnnnnnnnnnnnnnnnnnnnnnnnnnnnnnnnnnnnnnnnnnnnnnnnnnnnnnnnnnnnnnnnnnnnnnnnnnnnnnnnnnnnnnnnnnnnnnnnnnnnnnnnnnnnnnnnnnnnnnnnnnnnnnnnnnnnnnnnnnnnnnnnnnnnnnnnnnnnnnnnnnnnnnnnnnnnnnnnnnnnnnnnnnnnnnnnnnnnnnnagaaatgtaccctaagcccttcttcaagacatgggccagccccgtggtcactcctggtgcccgagtgactttcaattgctccaccccccaccagcatatgagctttattctttacaaagatggaagtgaaatagcatccagtgacaggtcctgggcaagtccaggggccagtgcagctcactttctaatcatttcggtgggcattggtgatggagggaattaccagctgccgatattatgacttttctatctggtctgagcccagcgaccctgtggagctcgtggtgacannnnnnnnnnnnnnnnnnnnnnnnnnnnnnnnnnnnnnnnnnnnnnnnnnnnnnnnnnnnnnnnnnnnnnnnnnnnnnnnnnnnnnnnnnnnnnnnnnnnnnnnnnnnnnnnnnnnnnnnnnnnnnnnnnnnnnnnnnnnnnnnnnnnnnnnnnnnnnnnnnnnnnnnnnnnnnnnnnnnnnnnnnnnnnnnnnnnnnnnnnnnnnnnnnnnnnnnnnnnnnnnnnnnnnnnnnnnnnnnnnnnnnnnnnnnnnnnnnnnnnnnnnnnnnnnnnnnnnnnnnnnnnnnnnnnnnnnnnnnnnnnnnnnnnnnnnnnnnnnnnnnnnnnnnnnnnnnnnnnnnnnnnnnnnnnnnnnnnnnnnnnnnnnnnnnnnnnnnnnnnnnnnnnnnnnnnnnnnnnnnnnnnnnnnnnnnnnnnnnnnnnnnnnnnnnnnnnnnnnnnnnnnnnnnnnnnnnnnnnnnnnnnnnnnnnnnnnnnnnnnnnnnnnnnnnnnnnnnnnnnnnnnnnnnnnnnnnnnnnnnnnnnnnnnnnnnnnnnnnnnnnnnnnnnnnnnnnnnnnnnnnnnnnnnnnncaggcttactccccaaacccagcctattagcccagcctggtcccatggtgtcccctggcgaaaatatgactcttcagtgtcaaggggaactgccagactcaacatttgtcctgttgaaggaggggactcaggagcccttagagcaacagaggccaagtgggtacagggctgacttctggatgccagcagtgagaggtgaagattctgggatctatagctgtgtttattatttggactctgctccctttgcagcttcaaatcacagtgactccggaaagatctgggtgactggtaa

SEQ ID NO: 28082 - DNA, 229 bp, Macaca Mulatta
ggtttaatttacatgattataaagatctgttgatgaaaatggaacatggtaactgtctctcattttattttgttaaagattcctctctatgttaaagtggaaaacatccttctgtttttaagccacaagttttctatgaaagttatttcagctctttcctcaggacaggggccagagatggctccatgaaatccctcatgaattcagcttattaagaataaaggaatag

SEQ ID NO: 28083 - DNA, 1559 bp, Macaca Mulatta
  misc_feature (1)...(1559): n = A,T,C or G
gaaggcaaatgtttgtcccaggagaaacccagggcctctggtcccttgaagtcacctgccagtctgaaagcccatacctgcaaacaggactttagcaataccacagaactagccacaatcagtaaggtaaatattgacatcttacctgcaaaagggagggattcagtgagtgatgacttcgttgaggagaatcagccaagacacttggatgcctctaatgagttaggaggtatatgctgtatttctcaagtgaaagaggagatgcttcagaacaacagtaaatccagtgcccagcctgaaaacctgattcccacatggtcctctgacattgtcgctggggaaaaaaatgaaccagtgaagcctctgcagcccctaatcaaagaacaaaagccaaaggaccagnnnnnnnnnnnnnnnnnnnnnnnnnnnnnnnnnnnnnnnnnnnnnnnnnnnnnnnnnnnnnnnnnnnnnnnnnnnnnnnnnnnnnnnnnnnnnnnnnnnnnnnnnnnnnnnnnnnnnnnnnnnnnnnnnnnnnnnnnnnnnnnnnnnnnnnnnnnnnnnnnnnnnnnnnnnnnnnnnnnnnnnnnnnnnnnnnnnnnnnnnnnnnnnnnnnnnnnnnnnnnnnnnnnnnnnnnnnnnnnnnnnnnnnnnnnnnnnnnnnnnnnnnnnnnnnnnnnnnnnnnnnnnnnnnnnnnnnnnnnnnnnnnnnnnnnnnnnnnnnnnnnnnnnnnnnnnnnnnnnnnnnnnnnnnnnnnnnnnnnnnnnnnnnnnnnnnnnnnnnnnnnnnnnnnnnnnnnnnnnnnnnnnnnnnnnnnnnnnnnnnnnnnnnnnnnnnnnnnnnnnnnnnnnnnnnnnnnnnnnnnnnnnnnnnnnnnnnnnnnnnnnnnnnnnnnnnnnnnnnnnnnnnnnnnnnnnnnnnnnnnnnnnnnnnnnnnnnnnnnnnnnnnnnnnnnnnnnnnnnnnnnnnnnnnnnnnnnnnnnnnnnnnnnnnnnnnnnnnnnnnnnnnnnnnnnnnnnnnnnnnnnnnnnnnnnnnnnnnnnnnnnnnnnnnnnnnnnnnnnnnnnnnnnnnnnnnnnnnnnnnnnnnnnnnnnnnnnnnnnnnnnnnnnnnnnnnnnnnnnnnnnnnnnnnnnnnnnnnnnnnnnnnnnnnnnnnnnnnnnnnnnnnnnnnnnnnnnnnnnnnnnnnnnnnnnnnnnnnnnnnnnnnnnnnnnnnnnnnnnnnnnnnnnnnnnnnnnnnnnnnnnnnnnnnnnnnnnnnnnnnnnnnnnnnnnnnnnnnnnnnnnnnnnnnnnnnnnnnnnnnnnnnnnnnnnnnnnnnnnnnnnnnnnnnnnnnnnnnnnnnnnnnnnnnnnnnnnnnnnnnnnnnnnnnnnnnnnnnnnnnnnnnnnnnnnnnnnnnnnnnnnnnnnnnnnnnnnnnnnnnnnnnnnnnnnnnnnnnnnnnnnnnnnnnnnnnnnnnnnnnnnaggtacatttgcgggagcacatgggtgaaaagtatacaacttacagtgtgaaagctcgccagttgaaattttttgaagaaaacatgaatttttg

SEQ ID NO: 28084 - DNA, 475 bp, Macaca Mulatta
atgtttggaaactcagctctctttctggggtagttatgattgtggtcatcactgggcaagatgccctgtttcttcctttgacagctactgcatggaagatgtcctgtgaggtcttttcacctaggagaaggtagggcttgggtgtatttaagtgatagctcaaagacatatgaatgccccaaccagcactcacttcgcacagagcaggggaatgatatttgtcttgtgattttgatactgacccaggaaagtggctagtggatttagaggaggtttatctcagttttccttgttgggtcccccaacattatcatcaaacacttccctctgtctctcctcccactagctccaagaattcccacctgtggctagttcctcttacacacccagcacaggcaggtgtggagaggaatgctgctgccattgtggatggctggcctccttgtgctcctctctctgccttctggccaggtgg

SEQ ID NO: 28085 - DNA, 180 bp, Macaca Mulatta
cagccagttctggtgactcagtcctcagctatagttccagtaagaactaaaaaacgtttcacacctcctgtttatcaacctaaatttaaaacagaaaaagagtttatggaacatgcccggaaagcaggattggatattcctccagaaaaattggaccatcccatacatctggcctgtaca

SEQ ID NO: 28086 - DNA, 898 bp, Macaca Mulatta
tcctgtacgagagccgccagaggcgctacctcagctcttcgctggagggcagcaggttctgcagcaaggaccgattcatggcttacccctgtgctgtaggccagacgaccttctcctctgggaggcactactgggaggtgggcatgaacatcaccggggatgcgctgtgggccctgggtgtgtgcagagacaacgtgagcaggaaagacagggtccccaagtgccccgaaaatggcttctgggtggtgcagctgtccaagggaaccaagtacttatccaccttgtctgccccaatcccggttatgctgatggagcctcccagccatgtgggcgtcttcctggacttcgaggccggggaggtgtcattctacagcgtgagcgatggatcccacctgcacacctactcccaggctaccttcccgggccccctgcagcctttcttctgcctaggggctccgaagtctggtcagatggtcatctccacagtgaccatgtgggtgaagggatagagatgcaggccggggaactcgggcattgcccctggctctgcagaaggtgtgggccttctgcttactacaggccacctaccagggttctctggcatcaggctggcagccattagacatgcaggggggtttctcaaagtctaaatataattgtgattaaaactgtcaaacattaagagggtatatattgacagatgcttcctagaggaaacttttgaaagcccctgcattctgagtggaccatttctaaatccatatctatacaccaggaacagcatggtcacgttttctttagccacgcccccgcccccactttggaatggcacaaatctgtggctcccagccgcccccaggggtttaggttactctgtcaaagaagcagaaatatccta

SEQ ID NO: 28087 - DNA, 255 bp, Macaca Mulatta
tcgccttggccaggaaccagcagatcaactgccttttgtgagacctttccttccctatccccaactttaaaggtgcaagagtattaggaaacgtgagcagcatatggcttttgatcaatttttcatccaatgaacaagatcctacaagctgtacaggcaaaacctagcagggaaaaaaaaaacacgcataaagaaaaatggccgggctaggtcattggctgggaagtctcagccatgcacggacttgtttccaga

SEQ ID NO: 28088 - DNA, 922 bp, Macaca Mulatta
aatctcactaatgatacacagatagataaagcaagtctatcaacattaaaaatactaaaaaataaagacacacacagagcattttagtgacatctgctacttattgccgctataagttagagtctatcagtgttcttgttataaccccctattttcagggggttaaaaataagctttaaaaaatacataaaaatttcatcttaaagcactttcattttataccaacgtgaaaagtgccatttttagaataactttaaagcttaacaggtttccttttaatatcctttttttgtgtgctctttacctacacaatggctttgttttgctttttcagccacaccccttatgtgaactagtgcctttgggtatcatgtaaaattttttccaaagggttactttaaaaatctgttaccacaattatgagataatctttaagcgataaattaaacttgttgtataaattctgcccagatctctccacaagagctgagggtttaataactttatggcttaataaatgtatgacactgaaaagatttgagtgtgaatctactgaaatcactataatgcacattgaagctgtgatggtatttgagtagtgaggttacttttgatcagagcaacataatgctcatagaatcttctagaagaagagaaacaaagggattgataaaatgctgagagctagtgattatattttttttgtatttacctgacatttattttaatgttcaaaaagtaaacgcattaagtttgatgtgttttactctctcactgttttaagtaattaccaactcagaatacatcactcttaggctgaaatttgtctttccattttttaaggtgaaatagtactaccttacatgatagcatacaaagaagaaagctctagaaacagaaattatggagaatgattatttaa

SEQ ID NO: 28089 - DNA, 465 bp, Macaca Mulatta
  misc_feature (1)...(465): n = A,T,C or G
ttggagatcatgctcctcagtctgctgttcccgcagatacaaccgctgccccggaggcggggccagtgctgcgacctctctatatggatgtacaagctacaactcctctggnnnnnnnnnnnnnnnnnnnnnnnnnnnnnnnnnnnnnnnnnnnnnnnnnnnnnnnnnnnnnnnnnnnnnnnnnnnnnnnnnnnnnnnnnnnnnnnnnnnnnnnnnnnnnnnnnnnnnnnnnnnnnnnnnnnnnnnnnnnnnnnnnnnnnnnnnnnnnnnnnnnnnnnnnnnnnnnnnnnnnnnnnnnnnnnnnnnnnnnagggggtggcccgattctacaggtcacggaaaaagcacttgatcaccacccagacagaacacaaatgtgtcttggactcctgccgttcactggaagctgagggctttcaggtcacctacctcccagtgcagaagagtgggatcattgacctaaag

SEQ ID NO: 28090 - DNA, 1076 bp, Macaca Mulatta
  misc_feature (1)...(1076): n = A,T,C or G
agttccttatttggtagcttttgacaggactggcctttcttgcaactaagcatcttgacatacattattcattaagccctggagctcgggagagaaaaatgcagacccttagatctttagctattcctttatcacgtggattttctttattcagaatagttgctgaattttgtgccattctggagtcttacaaatggcatgtattcgatgggaagacagctggatgggatttaatgcgaggctttcttatgtgtacttaattaccaaaaatctttaaaaactcatactctgcgtggcttgtggaggttgttaaagtagcgagattttgaagctaaatacattttaaagcttannnnnnnnnnnnnnnnnnnnnnnnnacatataatcaatcaaaaatgcctgaagcaaactatttactgtcagtgtcttggggctacataaannnnnnnnnnnnnnnnnnnnnnnnnnnnnnnnnnnnnnnnnnnnnnnnnnnnnnnnnnnnnnnnnnnnnnnnnnnnnnnnnnnnnnnnnnnngataagcaacatgaagtggaaattccttctccaactcagaaggaaaaggagaaaaagaaaagaccaatgtctcagatcagtggagtcaagaaattgatgcacagctctagcctgactaattcaagtattccaaggtttggagttaaaactgaacaagaagatgtccttgccaaggnnnggaactagaagatgtgaacaaatggggtcttcatgttttcagaatagcagagttgtctggtaaccggcccttgactgttatcatgcacaccatttttcaggnnnnnnnnnnnnnnnnnnnnnnnnnnnnnnnnnnnnnnnnnnnnnnnnnnnnnnnnnnnnnnnnnnnnnnnnnnnnnnnnnnnnnnnnnnnnnnnnnnnnnnnnnnnnnnnnnnnnnnnnnnnnnnnnnnnnnnnnnnnnnnnnnnnnnnnnnnnnnnnnnnaggccgtgtttacagatttggagattcttgcagcaatttttgccagtgcaatacatgatgtagatcatcctggtgtgtccaatcaatttctgatcaataca

SEQ ID NO: 28091 - DNA, 510 bp, Macaca Mulatta
agctaccggcccctatgcagccaacatcacctgtcagccagcatgtgacttctccaagattccctttaccacccactgttgaccttggtgctcaatttttcctgctttctctgtgttcccaggctcaacaaggggcttggtctgttcttgcagattagtattctgccagtgaacagaacttcgtgttgggaactgcgtcatcggtggtatcagcttcacatactgctgctcgcttgtagattaacgttctactgtccaagagaatgtcatggggggaaagtcatcatcggtggtgtgagcttcacatgcttctgcagctgagcttgcagaacagagaaaaataagttcataatttgctttgagagctacaggaaatggttgtttctcctatactttgtccttaacatctttctcgaccctaaataaatatcttgtaacaagatttctttgtttactccctctttaaagtttgaaaggtgcgtgtgtcaagacactagaaagcaactgcca

SEQ ID NO: 28092 - DNA, 1225 bp, Macaca Mulatta
  misc_feature (1)...(1225): n = A,T,C or G
cacgacctcagaacccgagaatgcctccttggcctggcccccggatgccaccctgggcaatgtgtcagcggccccaagcccagcagggctggctgtcagtggcgttctgatccccctggtctacctggtggtgtgcgtggtgggcctgctgggtaactctctggtcatctatgtggtcctgccgcacacggggagcccaacagtcaccaacgtctacatcctcaacctggcactggnnnnnnnnnnnnnnnnnnnnnnnnnnnnnnnnnnnnnnnnnnnnnnnnnnnnnnnnnnnnnnnnnnnnnnnnnnnnnnnnnnnnnnnnnnnnnnnnnnnnnnnnnnnnnnnnnnnnnnnnnnnnnnnnnnnnnnnnnnnnnnnnnnnnnnnnnnnnnnnnnnnnnnnnnnnnnnnnnnnnnnnnnnnnnnnnnnnnnnnnnnnnnnnnnnnnnnnnnnnnnnnnnnnnnnnnnnnnnnnnnnnnnnnnnnnnnnnnnnnnnnnnnnnnnnnnnnnnnnnnnnnnnnnnnnnnnnnnnnnnnnnnnnnnnnnnnnnnnnnnnnnnnnnnnnnnnnnnnnnnnnnnnnnnnnnnnnnnnnnnnnnnnnnnnnnnnnnnnnnnnnnnnnnnnnnnnnnnnnnnnnnnnnnnnnnnnnnnnnnnnnnnnnnnnnnnnnnnnnnnnnnnnnnnnnnnnnnnnnnnnnnnnnnnnnnnnnnnnnnnnnnnnnnnnnnnnnnnnnnnnnnnnnnnnnnnnnnnnnnnnnnnnnnnnnnnnnnnnnnnnnnnnnnnnnnnnnnnnnnnnnnnnnnnnnnnnnnnnnnnnnnnnnnnnnnnnnnnnnnnnnnnnnnnnnnnnnnnnnnnnnnnnnnnnnnnnnctgccctacgccaacagctgtgccaaccccatcctttatggcttcctctcctaccgcttcaagcagggcttccgcagggtcctgctgcggccctcccgccgcgtgtgcagccaggagcccactgtggggcccccggagaagacnnnnnnnnnnnnnnnnnnnnnnnnnnnnnnnnnnnnnnnnnnnnnnnnnnnnnnnngaaggagatgaacggccgggtcagccagatcacacagcctggcaccagtggacagcagcggccacccagcagagtggccagcaaggagcagcagctcctaccccaagaggcctccactggggagaagtccagcaccatgcgcatcagctacctgta

SEQ ID NO: 28093 - DNA, 701 bp, Macaca Mulatta
atggtggactgtatctctcacgtctgaagcagctaatcctctttcccacatagccatcatcttgtgtgtgtagtaagaggcccatttctcagctgtcttttaaatatctaaaggtagttcctgtaacaactagttttaatgagtaaaaagtcaaagcctcagctctagttgatatccaagttatgatttattttgcaactacctcaggacagaaaagatttatggggatttaaaaatcattgaataactagttaaatgaaattttagctacacactgcctcccaaatattagttgtgcctggttcttgtaatttgattttacagaaaaggaaatgacacttgagatccttggaatgaacacagcttctatagtgtgcatatacttttttaacgtctcttcttccattacaatgtgtgttttgcaaggacaggttcatttttttagcccactttgtgaactccattgtgcttttttctggtgttttatgcaagttgactactaatgactaatgagaacaataatgaatgcattgttgctgcattagtgtaatgtggtgtggttttgcacttaaaagaggtattcatgctctagttgtaaatgttcatgaaaatccacttctgtactagtcgaactgcttttagtgtctcaccagtggttttacatctgcagaagttttgagggctgtgctgacctttgagag

SEQ ID NO: 28094 - DNA, 841 bp, Macaca Mulatta
agttttcccccccgggcggtttttttattgggggggaaatcccaagcccactttttctcggccccagggtttcccttaggaaaaacagcttatggccacatttttccaacttacccaactggggcccgcggcgccaaaaagaaatgtgttttgaaaaggtttcttgaagggcccagggccggcccaccaaatgaaatatttcgttgtaccactacttgcgaaaactttttatcgccatataaaaaaaaattgtgcattccgataataaaatccatttgaacaaaaaaaaaaatgtcactctgattaaactccattacagcctgcaggacaccttggggccagctggttttactcaagatttcactgtcgtcccacccccacttcttcccaccccacttcttccttcaccaacatgcaagttctttccttccctgccagccagatagacagatgggaaaggcaggcgcggccttcgttgtcagtagttctttgatgtgaaaggggcagcacagtcatttaaacttgatccaacctctttgcatcttacaaagttaaacagctaaaagaagtaaaataagaaggcaatgcttgtggaatgtacagtgcatattggcggcgcacgcctcattacgattcgcctgcttgcttctcctgttcaatcgtttctttggaaggcagtggatttttctcttgcgtctctgtcttcttcagtttcgacttatcgaatttctcgatctcagccatatcgggtttgtcagacatggttgcggaggaaaagcggagcgaggcgcacgaaaacgagcgaagtctggtctgaacagtggccaccaccgagttcccc

SEQ ID NO: 28095 - DNA, 122 bp, Macaca Mulatta
  misc_feature (1)...(122): n = A,T,C or G
atgattgttgccagcccaacagaaaatggacaggtacttcgtgtaattccatctacccagacagcaatggcacaagtgattatacctcaggggcaacttgtggatgtgaatagtcctcgggn

SEQ ID NO: 28096 - DNA, 4401 bp, Macaca Mulatta
  misc_feature (1)...(4401): n = A,T,C or G
ccaaggaatctgaaatcgcagttcatgacgtcagcataaaccgacagtacctttttgtttgtattgacccagctcaaattataaaatcacatgagtaataaaacacaaaatacaggtgttgtcactgaaaagcctaaaatgtaactaaacgcgttttcccccctcgcggtggtatcatttactctgtatctcaacgtttctgtctccctaagactctccctttatatcgtgagcacacatttttgcatcatgctcacacattcattagctaggactgaggagtgtgtacgattccaacgggccctcagcgttagctgttagatgcacaaaccttcacttcctttccacatctactgcacttgaggttcaacagaggatccttgcaagaacagtgcccagagagcattcttgacagatgcgcgcttagctccagcaacccgctctgctgggaagtttcttctaaccactaacacccacctccaatcccccaagctgtcacgacgcaggctggctgggtcccgtcttgacgggggaagggttttacacacatcctgctaggctgccccacatcacaaccaagctcgcagggcaaactcctccaagcctggcggacaagctgtcccaggcgctctggcgcttcctgaacaccaaggtcccctccgcgctcaagggagctagcgcactgttacgcagggaaccccggcactgcaggtcgaggggatgccgagggagcgggggcgcagcaggcagccgactgctgtaggcaaacggcgcgcaggaggcaaacgaggcgcaggagccggtgcgagagcgagtgggcgctgagagagggggcggggccccaggggggaggcgagcgcgggagggggcacgggagaacagggaccaggaaccagcgggcgcaggaaggggtgcgtccgcaagaacccgcgggcgcacgggaggcactagctccacgatcagctcgggactctcaggagccgctcaattgccaacgggagggggctgcggggagttggaggttgggggggctgaccagacgggggcgtgcctttgcccggattggctgcaggaggctgacgcgaggccccgggggttggcttggggagtgggagcggggtggggtgggtgctgggtgccggagctgcgggcccggcgcgctcagaaacatgctgaggtcccggcggctcttccagcagcggcagcggctccagcagcannnnnnnnnnnnnnnnnnnnnnnagcgacagcgctcggctccggcgggaaaggcgcccggcgcccatgcctccggccccgggccgcggctgccctgacccggccgcgacctccctctgcgcaccccgccgtccaggcttctggggtgttccccaaccaaggcccagccctgccacaccccccgcctccggcctccgcaactcggcatgggcgcgggggcgctcgtcctgggcgcctccgagcccggtaacctgtcgtcggccgcaccgctccccgacggcgtggccaccgcggcgcggctgctggtgcccgcgtcgccgcccgcctcgttgctgcctcccgccagcgaaggccccgagccgctgtcgcagcagtggacggcgggcatgggtctgctgatggcgctcatcgtgctgctcatcgtggcgggcaacgtgctggtgatcgtggccatcgccaagacgccgcggctgcagacgctcaccaacctcttcatcatgtccctggccagcgccgacctggtcatggggctgctggtggtgccgttcggggccaccatcgtggtgtggggccgctgggagtacggctccttcttctgcgagctgtggacctcggtggacgtgctgtgcgtgacggccagcatcgagaccctgtgtgtcatcgccctggaccgctacctcgccatcacctcgcccttccgctaccagagcctgctgacgcgcgcgcgggcgcggggcctcgtgtgcaccgtgtgggccatctcagccctggtgtccttcctgcccatcctcatgcattggtggcgggcggagagcgacgaggcgcgccgctgctacaacgaccccaagtgctgcgatttcgtcaccaaccgggcctacgccatcgcctcgtccgtggtctccttctacgtgcccctgtgcatcatggccttcgtgtacctgcgggtgttccgcgaggcccagaagcaggtgaagaagatcgacagctgcgagcgccgtttcctcggcggccccgcgcggccgccctcgccctcgccctcgccctcgccctcgccggtccccgcgccgccgcccggacctccgcgccccgccgccgccgctgccaccaccgccccgctggtcaacggacgtgcgggtaagcggcggccctcgcgcctcgtggccctgcgcgagcagaaggcgctcaagacgctgggcatcatcatgggcgtgttcacgctctgttggctgcccttcttcctggccaacgtggtgaaggccttccaccgcgagctggtgcccgaccgcctcttcgtcttcttcaactggctgggctacgccaactcggccttcaaccccatcatctactgccgcagccccgacttccgcaacgccttccagcgactgctctgctgcgcgcgcagggctgcccgccggcgccacgcggcccacggagaccggccgcgcgcctcgggctgtctggcccggcccggacccccgccgtcgcccggggccgcctcggacgacgacgacgacgatgtcgtcggggccacgcagcccgcgcgcctgctggagccctgggccggctgcaacggcggggcggcggcggacagcgactcgagcctggacgagccgtgccgccccggattcgcctcggagtccaaggtgtagggcccggcgccgggcgaggacgccgggcaccccgggaggaggagagcccgggcgccccggaacgacttcccgggggaacgaggagatctgtgtttactcaagaccgaaagcaggtgaactcgaagcccacaatcctcgtctgaatcatccgaggcaaacagaaaagccacggaccattgcacaaaaaggaaagtttggggagggatgggagagtggcttgctgatgttccttggnnnnnnnnnnnnnnnnnnnnnnnnnnnnnnnnnnnnnnnnnnntgtggtccggccttcttttgtatgtgcgtgtgatgcatctttagattttttttcccccacgttggtttttgacactctctgcgaggaccggagtggaagttgggtgggttacgggaaggaagaagcattaggaggggattaaaatcgatcagcgtggctcctatccctttcccaggaacaggagcagtctaccagccagagggaggagaatgacagtttgtcaagacgtatttcttttgctttccagataaatttcattttaatttctaagtaatgagttctgctgtcatgaaagcaaagagaaaggatggannnnnnnnnnnnnnnnnnnacgtttcaagaaatgttaagctcttcttggaacaagccccaccttgctttccttgtgtagggcaaaccggccgtcccccgcgcgcctgggtggtcaggctgagggatttctacctcacactgtgcgtttgcacagcagatagaacgacttgtttatattaaacagcttatttatgtatcaatattagttggaaggaccaggcgcagagcctctctctgtgacatgtgactctgtcaattgaagacaggacattagagagagagaaacagttcagattactgcacatgtggannnnnnnnnnnnnnnnnnnnnnnggagtggttcaaaatgccatttttgcacagtgttaggaattacaaagtccacaggagatgttacttgcacaaaaagaaattaaatattttttaaagggggaggggctgggcagatcttaaaaactaaaataaaattcaaactctacttctgttgtctagtatgttattgagctaatgatttattggggaaaatacctttttatactcctttatcatggtactgtaactgtatccatattataaatataattatcttaaggnnnnnnnnnnnnnnnnnnnnnnngtccaagtgcccacgtgaatttgctggtgaaagttagcacttgtgtgtgaactctacttcctcttgtgtgttttaccaagtatttatactctggtgcaactaactactgtgtgaggaattggtccatgtgcaataaataccaatgaagcacaatcaagattatgtactgtgtgtctgtaaagggtcagtgataatgaaaaagacagtttgttttgttcaaaatatagactggatttcccatagagctcttttaatagactttcatgactcaataacatagcaaaatgcctccagacctaaataaggtgtttacctactgagagctgcag

SEQ ID NO: 28097 - DNA, 844 bp, Macaca Mulatta
  misc_feature (1)...(844): n = A,T,C or G
atgggctcccgtggacagggactcttgctggcgtactgcctgctcctggcctttgcctctggcccggtcctgagccgtgtgccccatgtccagggggaacagcaggagtgggaggggactgaggagctgccctccccgccggaccatgctgagagnnnnnnnnnnnnnnnnnnnnnnnnnnnnnnnnnnnnnnnnnnnnnnnnnnnnnnnnnnnnnnnnnnnnnnnnnnnnnnnnnnnnnnnnnnnnnnnnnnnnnnnnnnnnnnnnnnnnnnnnnnnnnnnnnnnnnnnnnnnnnnnnnnnnnnnnnnnnnnnnnnnnnnnnnnnnnnnnnnnnnnnnnnnnnnnnnnnnnnnnnnnnnnnnnnnnnnnnnnnnnnnnnnnnnnnnnnnnnnnnnnnnnnnnnnnnnnnnnnnnnnnnnnnnnnnnnnnnnnnnnnnnnnnnnnnnnnnnnnnnnnnnnnnnnnnnnnnnnnnnnnnnnnnnnnnnnnnnnnnnnnnnnnnnnnnnnnnnnnnnnnnnnnnnnnnnnnnnnnnnnnnnnnnnnnnnnnnnnnctactgctacgtgcccggcatctacttctttagcctcaacgtgcacacctggaaccagaaggagacgtacctgcacatcatgaagaatgaggaggaggtggtgatcttgttcgcgcaggtgggcgaccgcagcatcatgcaaagccagagcctgatgctggagctgcgggagcaggaccaggtgtgggtgcgtctctacaagggcgagcgcgagaacgccatcttcagcgaggagctggacacctacatcaccttcagtggctacctggtcaagcacgccaccgagcccta

SEQ ID NO: 28098 - DNA, 462 bp, Macaca Mulatta
tatacctgcctaagttgtacaatttcagaatgcaattttcattataatgagttccaatgactcaatgatggggaaaaaaatctctgctcattaatatttcaaggtaaagaacaaatgttcctttgaacgcttgcttttgtgtgttagtataatttttagaattgattgagaattctgttccaaaactttagttgaattcatctacatttgtttaatactaacttaatctattctcttgtattataatgatggttctgtcaaatgaaagggtgaaatacctagatgaagtttaggttttcttcctattgtaaacttttgaatctggtttcattgttttaaataaattaaggggacactaaagtcctatcattcatttgcttcattgctgaacaggtaagatataatattacatgaatgattactatattttgttcacactaataaagcttgtgctcagaaatg

SEQ ID NO: 28099 - DNA, 112 bp, Macaca Mulatta
ttcgggatgcagtcacctacaccgagcacgccaagttgccgacaatcacagccatggatgtggtgtacgcgctcaagcgccaggggcgctactgcacggcttcggaggctag

SEQ ID NO: 28100 - DNA, 1175 bp, Macaca Mulatta
  misc_feature (1)...(1175): n = A,T,C or G
atggagtccgagaccgaacccgaacccgtcacgctcctggtgaagagccccaaccagcgccaccgcgacttggagctgagtggagaccgcagctggagcgtgggccacctcaaggcccacctgagccgcgtctaccccgagcgtccnnnnnnnnnnnnnnnnnnnnnnnnnnnnnnnnnnnnnnnnnnnnnnnnnnnnnnnnnnnnnnnnnnnnnnnnnnnnnnnnnnnnnnnnnnnnnnnnnnnnnnnnnnnnnnnnnnnnnnnnnnnnnnnnnnnnnnnnnnnnnnnnnnnnnnnnnnnnnnnnnnnnnnnnnnnnnnnnnnnnnnnnnnnnnnnnnnnnnnnnnnnnnnnnnnnnnnnnnnnnnnnnnnnnnnnnnnnnnnnnnnnnnnnnnnnnnnnnnnnnnnnnnnnnnnnnnnnnnnnnnnnnnnnnnnnnnnnnnnnnnnnnnnnnnnnnnnnnnnnnnnnnnnnnnnnnnnnnnnnnnnnnnnnnnnnnnnnnnnnnnnnnnnnnnnnnnnnnnnnnnnnnnnnnnnnnnnnnnnnnnnnnnnnnnnnnnnnnnnnnnnnnnnnnnnnnnnnnnnnnnnnnnnnnnnnnnnnnnnnnnnnnnnnnnnnnnnnnnnnnnnnnnnnnnnnnnnnnnnnnnnnnnnnnnnnnnnnnnnnnnnnnnnnnnnnnnnnnnnnnnnnnnnnnnnnnnnnnnnnnnnnnnnnnnnnnnnnnnnnnnnnnnnnnnnnnnnnnnnnnnnnnnnnnnnnnnnnnnnnnnnnnnnnnnnnnnnnnnnnnnnnnnnnnnnnnnnnnnnnnnnnnnnnnnnnnnnnnnnnnnnnnnnnnnnnnnnnnnnnnnnnnnnnnnnnnnnnnnnnnnnnnnnnnnnnnnnnnnnnnnnnnnnnnnnnnnnnnnnnnnnnnnnnnnnnnnnnnnnnnnnnnnnnnnnnnnnnnnnnnnnnnnnnnnnnnnnnnnnnnnnnnnnnnnnnnnnnnnnnnnnnnnnnnnnnnnnnnnnnnnnaggaaggcaccgatcctgaaactgaagaccccaaccacctccctccagacagggacgtgctagatggcgagcagaccagcccctcatttatgagcacagcatggcttgtcttcaagactttctttgcctctcttcttccagaaggccccccagccatcgcaaactga

SEQ ID NO: 28101 - DNA, 385 bp, Macaca Mulatta
  misc_feature (1)...(385): n = A,T,C or G
tgcactactcggcgctgcccggctcgcggcccacgggccacgggatagtcttcggctcgtcggctgtgcgcgggggcgtccactcggagaatctattgtcttacgatatgcacgttcaccacgaccggggccccatgtaagaagagctcaatgcgttttttcataactgagacttcgcgccggctcccttctttttattttgcctttnnnnnnnnnnnnnnnnnnnnnnnnnnnnnnnnnnnnnnnnnnnnnnnnnnnnnngcgccgggcgcggggagcgggccaccggtcctgccgctctcttggggcagcgcagtcctgttacctgtgggtggcccgtgccaaaggcctcgcttcccccaggggactcgccttctctctcccc

SEQ ID NO: 28102 - DNA, 1253 bp, Macaca Mulatta
atggagggcgagctcgcagccaactggagcaccgaggcagtcaactccagcgccgcgccgccgggggccgagggcaactgcaccgccggacccccgcggcgcaacgaggccctggcgcgcgtggaggtggcggtgctctgtctcatcctgtttctggcgctgagcgggaatgcgtgtgtgctgctggcgctgcgcaccacgcgccacaagcactcgcgcctcttcttcttcatgaagcacctgagcatcgccgacctggtggtggcagtcttccaggtgctgccgcagttgctgtgggacatcaccttccgcttctacgggcccgacctgctgtgccgtctggtcaagtacttgcaggtggtgggcatgttcgcctccacctacctgctgctactcatgtccctggaccgctgcctggccatctgccagccgctgcgctcgctgcgccgccgcacggaccgcctggcagtgctcgccacgtggctcggctgcctggtggccagcgcgccgcaggtgcacatcttctctctgcgcgaggtggctgacggcgtcttcgactgctgggcggtcttcatccagccctggggacccaaggcctacatcacgtggatcacgctagctgtctacatcgtgccggtcatcgtgctcgctgcctgctatggccttatcagcttcaagatctggcagaatttgcggctcaagaccgctgcagctgcggcggcagaggcgccagagggcgcggcggctggcgatggggggcgcatggccctggcacgtgtcagcagcgtcaagctcatctccaaggccaagatccgcacggtcaagatgactttcatcatcgtgctggccttcatcgtgtgctggacacctttcttcttcgtgcagatgtggagcgtctgggatgccaatgcgcccaaggaagcctcggccttcatcatcgtcatgctcctggccagcctcaacagctgctgcaacccctggatctacatgctgttcacgggtcacctcttccacgaactcgtgcagcgcttcctgtgctgctccgccagctacctaaagggcaaccgcctaggagagacaagtaccagcaaaaagagcaactcgtcttcctttgtcctgagccatcgcagctccagccagaggagctgctcccaaccatccacggcatgacctaccagccagggccagggctgcctcctgaggttcgggctgtgctggcataagtggtctgcccctaggtgatggcgtatgtt

SEQ ID NO: 28103 - DNA, 473 bp, Macaca Mulatta
gacagacaaggataaggtattcctaaataaaaggtcagaaagtagtgtgggctgaaaattgtgtactgaccttttggtttctttgtgaatctccacctaatgaaggcaatagaaagccccttgagaaaatggaatccaagacacacttaaaatctttttctacaatccctttcttcctacgttagagcaccagggcttctaaaactggattccctattggagtatgtttttgacatgtcaagtaataagttactgtgtggggagggagagtgacctcaggattagatagcccaggagaaatagattttctctcctggatgtgttaatttatcctagattctagcaaaactgctaattaaatatggtgagcatagacagtttaattagagatcgtggcaattctacagttatcatggcagtcttttgagggcacaatctgagatactcctggatcctttcaaatttggttaaat

SEQ ID NO: 28104 - DNA, 564 bp, Macaca Mulatta
  misc_feature (1)...(564): n = A,T,C or G
tctgacttctcccttaccccattccccttttccaccagggaaggctctgtgatgctgcaggttgatgtagacacagtaaaaggagggctgaagttgaaccccaacttcctggtggacttcgggaaggagcctctaggcccagccctcgcccatgaactccgctaccctgggggcgattgtagctctgacatctggatttgaactccaccctcatcaccctcagtccatattttgagccctcacttccttggggacctggcttcattctgctctctcttggcacccaacccttggcagcatgtaccacacagccaagctgagactgtggcaacgtgttgagtggtatccatttaccgaccactgttgcttgttgctcactgtgcttcttttccatgagctcttggaggcaccaagaaataaactgttgaccctgttcttcagatggncttgtctttggnggcctgaggcctgtgtctcctcttctgtctacgctttgtatcttgtacaaganaaggctaaagaggcctctgggggggttatggtaactagttcacaccagtgatg

SEQ ID NO: 28105 - DNA, 1451 bp, Macaca Mulatta
  misc_feature (1)...(1451): n = A,T,C or G
ttttgtggaatagaattgatcgctgtctcctccgcaaagcgttttaactcgaataagcaaatgccgcctctgtttgaacgttttggtatttacaagaaagaaatcattttacctaagagaactaattgaattggcagcatccttgaaatacctccggacaaggatctaggggtgggggtggaaaatcaactgcgaaatagcagacggagaaattcctttggaagttattccgtagcataagagctgaaacttcagagcaagttttcattgggcaaaatggggnnnnnnnnnnnnnnnnnnnnnnnnnnnnnnnnnnnnnnnnnnnnnnnnnnnnnnnnnnnnnnnnnnnnnnnnnnnnnnnnnnnnnnnnnnnnnnnnnnnnnnnnnnatgacagcacaagaaatgtgtataggataatcagtttagatggctcaaaggnaggcaataataaatagtaccatcaccccaaacatgacatttactaaaacatctcagaagtttggccagtgggctgatagccgggcaaacaccgtttatggattgggattctcctctgagcatcatctttcgaaantttgcagagaagtttcaggaatttaaagaagctgctcgactagcaaaggaaaaatcacaagagaagatggaacttaccagtacaccttcacaggnaggaatccgcaggtggggatcttcagtctcctttaacaccagaaagtatcaacgggacagacgatgaaagaacacctgatgtgacacagaactcagagccaagggctgaaccaactcagaatgcattgccattttcacatagnagttcagcaatcagcaaacattgggaggctgaactggctaccctcaaaggaaataatgccaaactcactgcagccctgctggagtccactgccaatgtgaaacaatggaaacagcaactcgctgcctatcaagaggaagcagaacgtctgcacaagcgggtnggtgactgaacttggatgtgttagtagccaagcaaacgcagtacatactcataagacagaattaaatcagacaatacaagaactggaagagacactgaaagtgaaggaagaggnaggaaatagaaagattaaaacaagaaattgataatgccagagaactacaagaacagagggactctttgactcagaaactacaggnaggaagtagaaattcggaaacaaagacctggagggacaactgtctgacttagagcaacgtctggagaaaagtcagaatgaacaagaagcttttcgcaataacctgaagacactcttagaaattctggatggaaaaatatttgaactaacagaattacgagataacttggccaagctactagaatgcagctaaggaaagtgaaatttcagtgccaattaattaaaagatacactgtctctcttcataggactgtttaggctctgcatcaagattgcac

SEQ ID NO: 28106 - DNA, 1852 bp, Macaca Mulatta
  misc_feature (1)...(1852): n = A,T,C or G
atctccatcatcaccttctgcttggagaccctgcccgagttcagggatgaacgcgagctgctccgccaccccccagcgccccaccagcctcccgcgcccgcccctgggaccaacggcagcggggtcatggccccgccctctggccctacggtggcaccgctcctgcccaggaccctggccgaccccttcttcatcgtggagaccacgtgcgtcatctggttcaccttcgagctgctcgtgcgcttcttcgcctgccccagcaaggcagggttctcccggaacatcatgaacatcatcgatgtggtggccatcttcccttacttcatcaccctgggcaccgagctggcagagcaacagccagggggcggaggaggcagccagaatgggcagcaggccatgtccctggccatcctcagagtcatccgcctggtccgggtgttccgcatcttcaagctctcccgccactccaaggggctgcagatcctgggcaagaccttgcaggcctccatgagggagctggggttgctcatcttcttcctgttcatcggggtcatcctcttctccagtgccgtctacttcgcagaggctgacaaccaggggacccatttctctagcatccctgatgccttctggtgggcagtggtcaccatgaccactgtgggctacggggacatgaggcccatcannnnnnnnnnnnnnnnnnnnnnnnnnnnnnnnnnnnnnnnnnnnnnnnnnnnnnnnnnnnnnnnnnnnnnnnnnnnnnnnnnnnnnnnnnnnnnnnnnnnnnnnnnnnnnnnnnnnnnnnnnnnnnnnnnnnnnnnnnnnnnnnnnnnnnnnnnnnnnnnnnnnnnnnnnnnnnnnnnnnnnnnnnnnnnnnnnnnnnnnnnnnnnnnnnnnnnnnnnnnnnnnnnnnnnnnnnnnnnnnnnnnnnnnnnnnnnnnnnnnnnnnnnnnnnnnnnnnnnnnnnnnnnnnnnnnnnnnnnnnnnnnnnnnnnnnnnnnnnnnnnnnnnnnnnnnnnnnnnnnnnnnnnnnnnnnnnnnnnnnnnnnnnnnnnnnnnnnnnnnnnnnnnnnnnnnnnnnnnnnnnnnnnnnnnnnnnnnnnnnnnnnnnnnnnnnnnnnnnnnnnnnnnnnnnnnnnnnnnnnnnnnnnnnnnnnnnnnnnnnnnnnnnnnnnnnnnnnnnnnnnnnnnnnnnnnnnnnnnnnnnnnnnnnnnnnnnnnnnnnnnnnnnnnnnnnnnnnnnnnnnnnnnnnnnnnnnnnnnnnnnnnnnnnnnnnnnnnnnnnnnnnnnnnnnnnnnnnnnnnnnnnnnnnnnnnnnnnnnnnnnnnnnnnnnnnnnnnnnnnnnnnnnnnnnnnnnnnnnnnnnnnnnnnnnnnnnnnnnnnnnnnnnnnnnnnnnnnnnnnnnnnnnnnnnnnnnnnnnnnnnnnnnnnnnnnnnnnnnnnnnnnnnnnnnnnnnnnnnnnnnnnnnnnnnnnnnnnnnnnnnnnnnnnnnnnnnnnnnnnnnnnnnnnnnnnnnnnnnnnnnnnnnnnnnnnnnnnnnnnnnnnnnnnnnnnnnnnnnnnnnnnnnnnnnnnnnnnnnnnnnnnnnnnnnnnnnnnnnnnnnnnnnnnnnnnnnnnnnnnnnnnnnnnnnnnnnnctccaagcctctgtcttttcccggatgtggtattggtgctttgtgtctagggcagagaatgttcttgaagaaaggcaaatctgactttttctgtgcgccttaaacaattcttgtaactttcttcaaaaagcatttgaatgatattggaggaatacttctgataatttattctctttatttttaatcccaggaaataaaaggttaccttgttg

SEQ ID NO: 28107 - DNA, 110 bp, Macaca Mulatta
  misc_feature (1)...(110): n = A,T,C or G
aggggttggtggacaccgcaaagaagaactttggcggcgggaacacggcttgggaggaaaagacgctgtccaagtatgagtccagncagcgagattcgcctgctggagat

SEQ ID NO: 28108 - DNA, 875 bp, Macaca Mulatta
  misc_feature (1)...(875): n = A,T,C or G
gggattcaggggcggccggctttgttgggtgtgcttggtttggtgtccctgcggctgaccgtgattggtgattcgcagcatcttcgtaaccgctaacaggtcaaaatgcagatcttcgtgaagaccctgaccggcaagaccatcacccttgaggtggagcccagnnnnnnnnnnnnnnnnnnnnnnnnnnnnnnnnnnnnnnnnnnnnnnnnnnnnnnnnnnnnnnnnnnnnnnnnnnnnnnnnnnnnnnnnnnnnnnnnnnnnnnnnnnnnnnnnnnnnnnnnnnnnnnnnnnnnnnnnnnnnnnnnnnnnnnnnnnnnnnnnnnnnnnnnnnnnnnnnnnnnnnnnnnnnnnnnnnnnnnnnnnnnnnnnnnnnnnnnnnnnnnnnnnnnnnnnnnnnnnnnnnnnnnnnnnnnnnnnnnnnnnnnnnnnnnnnnnnnnnnnnnnnnnnnnnnnnnnnnnnnnnnnnnnnnnnnnnccaccaactggaaaatggccgcactcttttctgactacaacatcgagaaggagtcggaccctgcacctgggtccctggcccttgaaagggggcatgcgaaatttttctggaaaaccctgaccgtcaagaccatccacccctgaaggggggagcccccacgatccacctctgaaaattgggcagggcactggatccgagaaatatggaagggactgtccttctgaactgcccctagggccttttccttttgtcgcggccaaagttccctcggaaacgatgggcctgcggctcctttcttggcccttgcgtcttcgcccccagcgtggtgttgcaacttctggcatctgtgagtctatcccatgtgctttcgcgtggggtgggcgcttcggcccctatt

SEQ ID NO: 28109 - DNA, 962 bp, Macaca Mulatta
  misc_feature (1)...(962): n = A,T,C or G
gggccgaattctgaatcatcttaaaaataagattccaaccacaaaaacaattagccatttctttacnnnnnnnnnnnnnnnnnntctgttttataattacagatttttagacaaatttcttgtatcaggaagaaatacaaattttgtcatgtttctcaagcagtttttctgagtagtttctgaggaggaacaaattacgagtgtgcccaataactgaaaatgttttaactcactctcatttgtaagcagtccacatagtagacaatgggttttccaagctgggcaaggtacatttaatcagtaaatcagtttcctatcatgtatcgtgatgtttcagtgtgagacacaaaaacaatggcttgaaacttgtgtatcatatgtgattttgaaatgaacaccttgaatagcactaatttttatttgtgatatttttctataacaaaacaagtagcactaggaaaagaggttttattttgtaaacgatcatttgtgacctcagacactctctggctaatattttaataagctcacagcagattattctgagatcatggatgaggggtggtgcatgttgagatttaaattggcataaagctgcatcctttttgtctagctgtttgatttcattgtttaatatggtgtgccaatttcgtgactgttaccatgtgaaagtcctgttgaaatgaacaatcatgtctgccccacaatcaaggatgcctgtgtgaagtgtgagtcaatctcatacccaatgtcagacttttacatgtcaatgattttctccaagaacataagaaaagtcaataaaatcctcttaattttcncnnnnnnnnnnnnnnnnnnnnnnnnnnnnnnnnnnnnnnnnnnnnnnnnnnnnnnnnnnnnnnnnnnnnnnnnnnnnnnnnnnnnnnnnnnnnngggggggcacccttgagcccctaaaaaaagtacttctaaaaaaattt

SEQ ID NO: 28110 - DNA, 5252 bp, Macaca Mulatta
  misc_feature (1)...(5252): n = A,T,C or G
actctaaccgtcagggaagaccaagtcttccctatgaaccctcggaaaatatgacaaaattgaggacatnnnnnnnnnnnnnnnnnnnnnnnnnnnnnnnnnnnnnnnnnnnnnnnnnnnnnnnnnnnnnnnnnnnnnnnnnnnnnnnnnnnnnnnnnnnnnnnnnnnnnnnnnnnnnnnnnnnnnnnnnnnnnnnnnnnnnnnnnnnnnnnnnnnnnnnnnnnnnnnnnnnnnnnnnnnnnnnnnnnnnnnnnnnnnnnnnnnnnnnnnnnnnnnnnnnnnnnnnnnnnnnnnnnnnnnnnnnnnnnnnnnnnnnnnnnnnnnnnnnnnnnnnnnnnnnnnnnnnnnnnnnnnnnnnnnnnnnnnnnnnnnnnnnnnnnnnnnnnnnnnnnnnnnnnnnnnnnnnnnnnnnnnnnnnnnnnnnnnnnnnnnnnnnnnnnnnnnnnnnnnnnnnnnnnnnnnnnnnnnnnnnnnnnnnnnnnnnnnnnnnnnnnnnnnnnnnnnnnnnnnnnnnnnnnnnnnnnnnnnnnnnnnnnnnnnnnnnnnnnnnnnnnnnnnnnnnnnnnnnnnnnnnnnnnnnnnnnnnnnnnnnnnnnnnnnnnnnnnnnnnnnnnnnnnnnnnnnnnnnnnnnnnnnnnnnnnnnnnnnnnnnnnnnnnnnnnnnnnnnnnnnnnnnnnnnnnnnnnnnnnnnnnnnnnnnnnnnnnnnnnnnnnnnnnnnnnnnnnnnnnnnnnnnnnnnnnnnnnnnnnnnnnnnnnnnnnnnnnnnnnnnnnnnnnnnnnnnnnnnnnnnnnnnnnnnnnnnnnnnnnnnnnnnnnnnnnnnnnnnnnnnnnnnnnnnnnnnnnnnnnnnnnnnnnnnnnnnnnnnnnnnnnnnnnnnnnnnnnnnnnnnnnnnnnnnnnnnnnnnnnnnnnnnnnnnnnnnnnnnnnnnnnnnnnnnnnnnnnnnnnnnnnnnnnnnnnnnnnnnnnnnnnnnnnnnnnnnnnnnnnnnnnnnnnnnnnnnnnnnnnnnnnnnnnnnnnnnnnnnnnnnnnnnnnnnnnnnnnnnnnnnnnnnnnnnnnnnnnnnnnnnnnnnnnnnnnnnnnnnnnnnnnnnnnnnnnnnnnnnnnnnnnnnnnnnnnnnnnnnnnnnnnnnnnnnnnnnnnnnnnnnnnnnnnnnnnnnnnnnnnnnnnnnnnnnnnnnnnnnnnnnnnnnnnnnnnnnnnnnnnnnnnnnnnnnnnnnnnnnnnnnnnnnnnnnnnnnnnnnnnnnnnnnnnnnnnnnnnnnnnnnnnnnnnnnnnnnnnnnnnnnnnnnnnnnnnnnnnnnnnnnnnnnnnnnnnnnnnnnnnnnnnnnnnnnnnnnnnnnnnnnnnnnnnnnnnnnnnnnnnnnnnnnnnnnnnnnnnnnnnnnnnnnnnnnnnnnnnnnnnnnnnnnnnnnnnnnnnnnnnnnnnnnnnnnnnnnnnnnnnnnnnnnnnnnnnnnnnnnnnnnnnnnnnnnnnnnnnnnnnnnnnnnnnnnnnnnnnnnnnnnnnnnnnnnnnnnnnnnnnnnnnnnnnnnnnnnnnnnnnnnnnnnnnnnnnnnnnnnnnnnnnnnnnnnnnnnnnnnnnnnnnnnnnnnnnnnnnnnnnnnnnnnnnnnnnnnnnnnnnnnnnnnnnnnnnnnnnnnnnnnnnnnnnnnnnnnnnnnnnnnnnnnnnnnnnnnnnnnnnnnnnnnnnnnnnnnnnnnnnnnnnnnnnnnnnnnnnnnnnnnnnnnnnnnnnnnnnnnnnnnnnnnnnnnnnnnnnnnnnnnnnnnnnnnnnnnnnnnnnnnnnnnnnnnnnnnnnnnnnnnnnnnnnnnnnnnnnnnnnnnnnnnnnnnnnnnnnnnnnnnnnnnnnnnnnnnnnnnnnnnnnnnnnnnnnnnnnnnnnnnnnnnnnnnnnnnnnnnnnnnnnnnnnnnnnnnnnnnnnnnnnnnnnnnnnnnnnnnnnnnnnnnnnnnnnnnnnnnnnnnnnnnnnnnnnnnnnnnnnnnnnnnnnnnnnnnnnnnnnnnnnnnnnnnnnnnnnnnnnnnnnnnnnnnnnnnnnnnnnnnnnnnnnnnnnnnnnnnnnnnnnnnnnnnnnnnnnnnnnnnnnnnnnnnnnnnnnnnnnnnnnnnnnnnnnnnnnnnnnnnnnnnnnnnnnnnnnnnnnnnnnnnnnnnnnnnnnnnnnnnnnnnnnnnnnnnnnnnnnnnnnnnnnnnnnnnnnnnnnnnnnnnnnnnnnnnnnnnnnnnnnnnnnnnnnnnnnnnnnnnnnnnnnnnnnnnnnnnnnnnnnnnnnnnnnnnnnnnnnnnnnnnnnnnnnnnnnnnnnnnnnnnnnnnnnnnnnnnnnnnnnnnnnnnnnnnnnnnnnnnnnnnnnnnnnnnnnnnnnnnnnnnnnnnnnnnnnnnnnnnnnnnnnnnnnnnnnnnnaggagctagaggaaaaaatggtcactctcttaaaagagaaaaatgacctgcaactccaggttcagtctggaagcagatagcttggcggatgcagaggaaaggtgtgagcaactgattaaaaacaaaatccaacttgaggccaaaatcaaagaggtgactgagagagctgaggaggaggaagagatcaatgctgagctgacagccaagaagaggaaactggaggatgaatgttcagaactcaagaaagacattgatgaccttgagctgacactggccaaggttgagaaggagaaacatgccacagagaacaaggnnnnnnnnnnnnnnnnnnnnnnnnnnnnnnnnnnnnnnnnnnnnnnnnnnnnnnnnnnnnnnnnnnnnnnnnnnnnnnnnnnnnnnnnnnnnnnnnnnnnnnnnnnnnnnnnnnnnnnnnnnnnnnnnnnnnnnnnnnnnnnnnnnnnnnnnnnnnnnnnnnnnnnnnnnnnnnnnnnnnnnnnnnnnnnnnnnnnnnnnnnnnnnnnnnnnnnnnnnnnnnnnnnnnnnnnnnnnnnnnnnnnnnnnnnnnnnnnnnnnnnnnnnnnnnnnnnnnnnnnnnnnnnnnnnnnnnnnnnnnnnnnnnnnnnnnnnnnnnnnnnnnnnnnnnnnnnnnnnnnnnnnnnnnnnnnnnnnnnnnnnnnnnnnnnnnnnnnnnnnnnnnnnnnnnnnnnnnnnnnnnnnnnnnnnnnnnnnnnnnnnnnnnnnnnnnnnnnnnnnnnnnnnnnnnnnnnnnnnnnnnnnnnnnnnnnnnnnnnnnnnnnnnnnnnnnnnnnnnnnnnnnnnnnnnnnnnnnnnnnnnnnnnnnnnnnnnnnnnnnnnnnnnnnnnnnnnnnnnnnnnnnnnnnnnnnnnnnnnnnnnnnnnnnnnnnnnnnnnnnnnnnnnnnnnnnnnnnnnnnnnnnnnnnnnnnnnnnnnnnnnnnnnnnnnnnnnnnnnnnnnnnnnnnnnnnnnnnnnnnnnnnnnnnnnnnnnnnnnnnnnnnnnnnnnnnnnnnnnnnnnnnnnnnnnnnnnnnnnnnnnnnnnnnnnnnnnnnnnnnnnnnnnnnnnnnnnnnnnnnnnnnnnnnnnnnnnnnnnnnnnnnnnnnnnnnnnnnnnnnnnnnnnnnnnnnnnnnnnnnnnnnnnnnnnnnnnnnnnnnnnnnnnnnnnnnnnnnnnnnnnnnnnnnnnnnnnnnnnnnnnnnnnnnnnnnnnnnnnnnnnnnnnnnnnnnnnnnnnnnnnnnnnnnnnnnnnnnnnnnnnnnnnnnnnnnnnnnnnnnnnnnnnnnnnnnnnnnnnnnnnnnnnnnnnnnnnnnnnnnnnnnnnnnnnnnnnnnnnnnnnnnnnnnnnnnnnnnnnnnnnnnnnnnnnnnnnnnnnnnnnnnnnnnnnnnnnnnnnnnnnnnnnnnnnnnnnnnnnnnnnnnnnnnnnnnnnnnnnnnnnnnnnnnnnnnnnnnnnnnnnnnnnnnnnnnnnnnnnnnnnnnnnnnnnnnnnnnnnnnnnnnnnnnnnnnnnnnnnnnnnnnnnnnnnnnnnnnnnnnnnnnnnnnnnnnnnnnnnnnnnnnnnnnnnnnnnnnnnnnnnnnnnnnnnnnnnnnnnnnnnnnnnnnnnnnnnnnnnnnnnnnnnnnnnnnnnnnnnnnnnnnnnnnnnnnnnnnnnnnnnnnnnnnnnnnnnnnnnnnnnnnnnnnnnnnnnnnnnnnnnnnnnnnnnnnnnnnnnnnnnnnnnnnnnnnnnnnnnnnnnnnnnnnnnnnnnnnnnnnnnnnnnnnnnnnnnnnnnnnnnnnnnnnnnnnnnnnnnnnnnnnnnnnnnnnnnnnnnnnnnnnnnnnnnnnnnnnnnnnnnnnnnnnnnnnnnnnnnnnnnnnnnnnnnnnnnnnnnnnnnnnnnnnnnnnnnnnnnnnnnnnnnnnnnnnnnnnnnnnnnnnnnnnnnnnnnnnnnnnnnnnnnnnnnnnnnnnnnnnnnnnnnnnnnnnnnnnnnnnnnnnnnnnnnnnnnnnnnnnnnnnnnnnnnnnnnnnnnaggcatctcttgaacatgaagaaggaaagattctgcgtattcagcttgagttaaaccaagtcaagtctgaagttgatagaaaaattgcagaaaaagatgaggaaattgaccagctgaagagaaaccacactagagtcgtggagaccatgcagagcacgctggatgcagagattagaagcagaaatgatgctctgagagtcaagaagaaaatggaaggagatctgaatgaaatggaaatccagctgaatcatgccaatcgcttagctgcggagagtttaaggaactacaggaacacccaaggaatcctgaagnnnnnnnnnnnnnnnnnnnnnnnnnnnnnnnnnnnnnnnnnnnnnnnnnnnnnnnnnnnnnnnnnnnnnnnnnnnnnnnnnnnnnnnnnnnnnnnnnnnnnnnnnnnnnnnnnnnnnnnnnnnnnnnnnnnnnnnnnnnnnnnnnnnnnnnnnnnnnnnnnnnnnnnnnnnnnnnnnnnnnnnnnnnnnnnnnnnnnnnnnnnnnnnnnnnnnnnnnnnnnnnnnnnnnnnnnnnnnnnnnnnnnnnnnnnnnnnnnnnnnnnnnnnnnnnnnnnnnnnnnnnnnnnnnnnnnnnnnnnnnnnnnnnnnnnnnnnnnnnnnnnnnnnnngctgccatgatggctgaggagctgaagaaggaacaggacaccagcgcccacctggagcggatgaagaagaacctggagcagacggtgaaggacctgcagcaccgtctagatgaggccgagcagctggcactgaagggtgggaagaagcagatccagaaactggaggccaggg

SEQ ID NO: 28111 - DNA, 667 bp, Macaca Mulatta
gggggccctcaggacatcctctccaatccaggggacaccaccttacccctctgctggcaagaggggagctgattcatcctcacgctaaacacccattctacccaactgattgagacagaacagaagataaactgaaacttctctgccttcgcactgcaagagtgaatgagcgattcctctcaactgactcaaaatgtttgcctcacccaggagatggagctcgcgaaggccttctctggccagcggacactcctatctgccgtcctcagcatgctatcactcagcttctccacaatatccctgttcagcaactactggtttgtgggcacacagaaggtgcccaagcccctgtgcgagaaaggtctggcagccaagtgctttgacatgccagtgtccctggaatggagataccacccaacacatcaacccaggaggtggtaaaatacaactgggagactggggaatgaccggttcttccttccggagcttccggagtggcatatgggctatcctgtgaggaaaatgtggaagaatcaggggagaggtgccgaattttctttgaactcacaccaccaaccgagagaggtgagaaggactactgtaatttgccacgttgcaaggcccttgtcacccattctccgatttgagggagacggttgatggacaa

SEQ ID NO: 28112 - DNA, 695 bp, Macaca Mulatta
  misc_feature (1)...(695): n = A,T,C or G
tttgatgtgtattttcctcagatatcccagtcaccccctcttgtgaaatctagagacaactggtggtcatagcgtgcgattcaatccaaagctttataatgacggcaaggtttgtttaagcatcttaaacacgtggcatggaagaccagaagagaagtggaatcctcagacctcaagctttttgcaagtgttggtgtctgtccagtcccttatattagtagctgagccttattttaatgaaccgggatacgaacgatctagaggcactcccagtggcacacagagttctcgagaatatgatggaaacattcgacaagcaacagttaagtgggcaatgctagaacaaatcagaaacccttcaccatgttttaaagaggtaatacacaaacatttttacttgaaaagagttgagataatggcccagtgtgaggagtggattgcggatatccagcagtacagcagtgataagcgggtaggcaggactatgtctcaccatgcagcagctctcaagcgtcacactgctcagcttcgtgaagagttgctaaaacttccctgccctgaaggcttggatcctgacactgacgatgccccagaggtgtgcaggancacaacaggtgctgaggagactctaatgcacgatcaggttaaaaccagcagcagcaaagaactccccagtgacttccagttatgagctg

SEQ ID NO: 28113 - DNA, 89 bp, Macaca Mulatta
ctcaggtttctttttattgcttatacacatgttggctctgtgctgaaacttggattcaatggcatggcattagatcttctcaagcccag

SEQ ID NO: 28114 - DNA, 241 bp, Macaca Mulatta
gtcaggttcttaatggctgcaaattgatgagcaatgtatttggtgcttcagataaacatctaaaaaacaaaactcaaaacacatgtaggccttgtttacaaggagcttatagctttaaaggtgagacagcaaacatgcagaataacaatatggacagtgtagaaataagtacaataatcataagcatgtgatgaaagcagaaatggatcagaaatggggaaaaggagaagggtgggcagag

SEQ ID NO: 28115 - DNA, 405 bp, Macaca Mulatta
atgagtcctgggcttctccactggatggccctttgtctccttggaacaggtcatggggatgtcatggtcatccagaacccaagataccaggttactcagttggaaaagccagtgaccttgagttgttctcagaatctgaaccataaggtcatgtactggtaccagcagaagccaagtcaggccccaaagctgctgttccactactatgacaaagattttaacaatgaagcagacacccctgataacttccaatccaggaggccaaacacttctttctgctttcttgacatccgctcaccaggcctggaggatgcagctgtgtacctgtgtgccagcagcaacccagggtgggcggagacccagtacttcggaccaggcacgcggctcctggtgctcgaggacctg

SEQ ID NO: 28116 - DNA, 1717 bp, Macaca Mulatta
  misc_feature (1)...(1717): n = A,T,C or G
tcacagtgtgcctacgccgggaagggcagactgtgtaccagcaagtcctgtccctggagcgcccaagtgtcctccgcagctggaactggggcctgtgtgggtactttgctttctaccacgccctctatccctgagcctggactgtctatcagcttcctggccaggatgtcaccctcacctgccgtcagatcacacccatcttgccccatgactaccaggnnnnnnnnnnnnnnnnnnnnnnnnnnnnnnnnnnnnnnnnnnnnnnnnnnnnnnnnnnnnnnnnnnnnnnnnnnnnnnnnnnnnnnnnnnnnnnnnnnnnnnnnnnnnnnnnnnnnnnnnnnnnnnnnnnnnnnnnnnnnnnnnnnnnnnnnnnnnnnnnnnnnnnnnnnnnnnnnnnnnnnnnnnnnnnnnnnnnnnnnnnnnnnnnnnnnnnnnnnnnnnnnnnnnnnnnnnnnnnnnnnnnnnnnnnnnnnnnnnnnnnnnnnnnnnnnnnnnnnnnnnnnnnnnnnnnnnnnnnnnnnnnnnnnnnnnnnnnnnnnnnnnnnnnnnnnnnnnnnnnnnnnnnnnnnnnnnnnnnnnnnnnnnnnnnnnnnnnnnnnnnnnnnnnnnnnnnnnnnnnnnnnnnnnnnnnnnnnnnnnnnnnnnnnnnnnnnnnnnnnnnnnnnnnnnnnnnnnnnnnnnnnnnnnnnnnnnnnnnnnnnnnnnnnnnnnnnnnnnnnnnnnnnnnnnnnnnnnnnnnnnnnnnnnnnnnnnnnnnnnnnnnnnnnnnnnnnnnnnnnnnnnnnnnnnnnnnnnnnnnnnnnnnnnnnnnnnnnnnnnnnnnnnnnnnnnnnnnnnnnnnnnnnnnnnnnnnnnnnnnnnnnnnnnnnnnnnnnnnnnnnnnnnnnnnnnnnnnnnnnnnnnnnnnnnnnnnnnnnnnnnnnnnnnnnnnnnnnnnnnnnnnnnnnnnnnnnnnnnnnnnnnnnnnnnnnnnnnnnnnnnnnnnnnnnnnnnnnnnnnnnnnnnnnnnnnnnnnnnnnnnnnnnnnnnnnnnnnnnnnnnnnnnnnnnnnnnnnnnnnnnnnnnnnnnnnnnnnnnnnnnnnnnnnnnnnnnnnnnnnnnnnnnnnnnnnnnnnnnnnnnnnnnnnnnnnnnnnnnnnnnnnnnnnnnnnnnnnnnnnnnnnnnnnnnnnnnnnnnnnnnnnnnnnnnnnnnnnnnnnnnnnnnnnnnnnnnnnnnnnnnnnncagatgatgaaccatggctccgggtcaatgcatatttgatccacgatactgctgactggaaggacctgaacctgaagtttgtgctgcaggtttatcgggactattacctgacgggtgatcaaaacttcctgaaggacatgtggcctgtgtgtctnnnnnnnnnnnnnnnnnnnnnnnnnnnnnnnnnnnnnnnnnnnnnnnnnnnnnnnnnnnnnnnnnnnnnnnnnnnnnnnnnnnnnnnnnnnnnnnnnnnnnnnnagtgcttactgtggagggctgtggctggcagctgtggctgtgatggtccagatggctgctctgtgtggggcacaggacattcaggataagttttcttccatcctccaccggggccaagaagcctatgagagactgctgtggaatggnggccgctattacaactatgacagcagctctcagcctcagtctcgtagtgttatgtctgaccagtgtgctggacagtggttcctgaagg

SEQ ID NO: 28117 - DNA, 784 bp, Macaca Mulatta
  misc_feature (1)...(784): n = A,T,C or G
ggtagggcggtttaagtgttgttggtccccctcaatgcgttgtgaagtatactctgagatggcttccccnnnnnnnnnnnnnnnnnngctattggtggccagagatttccccccatttcgggttcggatcaagagcttcgatcggagtcggctttttactttccctgggttagggcgctggaatttcatggcttgaaccgtttctttctcttcagctagttgtgccactttcgtttcattctcctgttctttgtctatcatgcgctgctttccagcccgggtgggggaatggccactctgtttccgtttcctggttctcccttggnnnnnnnnnnnnnnnnnnngagccagggagctctgactggaatctggagagcgagggctctgggaggtggttgtgacctctgctggttctggctcctcctcagtcagccaagccagcgaagcagggtcaagagtggtaaaggtttttgattcttcctcttcatttccaggaggtgagacataggtacccccaatttcgtctgaagacaggacctcttgcaggtcctcataccaggcttccagctcccagctggacagtgtcccgaaggagaaaggcaatgactcagctgccatctctgcagttggatcagtctgctttcaggtgtggtgatgtatgaagatacacttccttcttgaacactctctcctcaggttccagctctgattttggctctgtcgctgccacccgctcatcttcaacatgatacgctcagtgccttagacttaagcctctgacccc

SEQ ID NO: 28118 - DNA, 2518 bp, Macaca Mulatta
  misc_feature (1)...(2518): n = A,T,C or G
tctcggcctccggctcggagacctcctgggagggcccgggggcgcctccgccgcccccacggctggcagcaaagtgctgctgggcttcagctcggacgagtcggacgtggaggccagtccccgggaccaggccggcggcggcgcgaggaaagaccgggcttcgctccagtaccgcgggctcaaagcgccgccggcgcccctggccgccagcgaggtgactaacagcaactctgccgagcgaaggaagccccactcgtggtggggggccaggaggccggcgggccccgacctgcagaccccgccggggaaagatggagcagtggaggacgaggaagnnnnnnnnnnnnnnnnnnnnnnnnnnnnnnnnnnnnnnnnnnnnnnnnnnnnnnnnnnnnnnnnnnnnnnnnnnnnnnnnnnnnnnnnnnnnnnnnnnnnnnnnnnnnnnnnnnnnnnnnnnnnnnnnnnnnnnnnnnnnnnnnnnnnnnnnnnnnnnnnnnnnnnnnnnnnnnnnnnnnnnnnnnnnnnnnnnnnnnnnnnnnnnnnnnnnnnnnnnnnnnnnnnnnnnnnnnnnnnnnnnnnnnnnnnnnnnnnnnnnnnnnnnnnnnnnnnnnnnnnnnnnnnnnnnnnnnnnnnnnnnnnnnnnnnnnnnnnnnnnnnnnnnnnnnnnnnnnnnnnnnnnnnnnnnnnnnnnnnnnnnnnnnnnnnnnnnnnnnnnnnnnnnnnnnnnnnnnnnnnnnnnnnnnnnnnnnnnnnnnnnnnnnnnnnnnnnnnnnnnnnnnnnnnnnnnnnnnnnnnnnnnnnnnnnnnnnnnnnnnnnnnnnnnnnnnnnnnnnnnnnnnnnnnnnnnnnnnnnnnnnnnnnnnnnnnnnnnnnnnnnnnnnnnnnnnnnnnnnnnnnnnnnnnnnnnnnnnnnnnnnnnnnnnnnnnnnnnnnnnnnnnnnnnnnnnnnnnnnnnnnnnnnnnnnnnnnnnnnnnnnnnnnnnnnnnnnnnnnnnnnnnnnnnnnnnnnnnnnnnnnnnnnnnnnnnnnnnnnnnnnnnnnnnnnnnnnnnnnnnnnnnccaacagggagtttcagtgcccactacttgtcgatgtttctcttaactgctgcctgcttatttttcctaatactgggactgacatacctaggaatgagagggacaggagtatctcaaggatggaaaactcagcannnnnnnnnnnnnnnnnnnnnnnnnnnnnnnnnnnnnnnnnnnnnnnnnnnnnnnnnnnnnnnnnnnnnnnnnnnnnnnnnnnnnnnnnnnnnnnnnnnnnnnnnnnnnnnnnnnnnnnnnnnnnnnnnnnnnnnnnnnnnnnnnnnnnnnnnnnnnnnnnnnnnnnnnnnnnnnnnnnnnnnnnnnnnnnnnnnnnnnnnnnnnnnnnnnnnnnnnnnnnnnnnnnnnnnnnnnnnnnnnnnnnnnnnnnnnnnnnnnnnnnnnnnnnnnnnnnnnnnnnnnnnnnnnnnnnnnnnnnnnnnnnnnnnnnnnnnnnnnnnnnnnnnnnnnnnnnnnnnnnnnnnnnnnnnnnnnnnnnnnnnnnnnnnnnnnnnnnnnnnnnnnnnnnnnnnnnnnnnnnnnnnnnnnnnnnnnnnnnnnnnnnnnnnnnnnnnnnnnnnnnnnnnnnnnnnnnnnnnnnnnnnnnnnnnnnnnnnnnnnnnnnnnnnnnnnnnnnnnnnnnnnnnnnnnnnnnnnnnnnnnnnnnnnnnnnnnnnnnnnnnnnnnnnnnnnnnnnnnnnnnnnnnnnnnnnnnnnnnnnnnnnnnnnnnnnnnnnnnnnnnnnnnnnnnnnnnnnnnnnnnnnnnnnnnnnnnnnnnnnnnnnnnnnnnnnnnnnnnnnnnnnnnnnnnnnnnnnnnnnnnnnnnnnnnnnnnnnnnnnnnnnnnnnnnnnnnnnnnnnnnnnnnnnnnnnnnnnnnnnnnnnnnnnnnnnnnnnnnnnnnnnnnnnnnnnnnnnnnnnnnnnnnnnnnnnnnnnnnnnnnnnnnnnnnnnnnnnnnnnnnnnnnnnnnnnnnnnnnnnnnnnnnnnnnnnnnnnnnnnnnnnnnnnnnnnnnnnnnnnnnnnnnnnnnnnnnnnnnnnnnnnnnnnnnnnnnnnnnnnnnnnnnnnnnnnnnnnnnnnnnnnnnnnnnnnnnnnnnnnnnnnnnnnnnnnnnnnnnnnnnnnnnnnnnnnnnnnnnnnnnnnnnnnnnnnnnnnnnnnnnnnnnnnnnnnnnnnnnnnnnnnnnnnnnnnnnnnnnnnnnnnnnnnnnnnnnnnnnnnnnnnnnnnnnnnnnnnnnnnnnnnnnnnnnnntcacttccaacactccattgaagccatcaaataaacatatgaactctatgtctcatcttcgtcttcggactggcctaaccaattctcaaggaagttcctgaaaagatttccttccatttctaagactgttacttataataggaaaattcctgtttggctttttgtcttcctttttaagtgctttttgtatgtaatatttttattgatgaata

SEQ ID NO: 28119 - DNA, 326 bp, Macaca Mulatta
ttcagtgaaggtcgagaaagggctcacgaactacgtcacagaaggcatcatcaccatttacccaaacctcaccttgaattaccacatcatcctggactaccaactcaccagaagccgttcattataaagccccataaatgtccatacaaacgctgtaggcctaggcctccaccttcagttcataacccccacaaattcccaaatcctccccagccatctaaacatccagatactagcagtgtggtcaaccctaccttagtgactacaactcaaattccatctgtgacttctccatctgcttccaccaaaattactacccttccaaa

SEQ ID NO: 28120 - DNA, 453 bp, Macaca Mulatta
gttgtgtttgtcacacaaagtaattctcaagaatgcaattaactggaattgtgagtacatgtgttgggggtagaatttcaaaactgtttctcagtctcactaaataggacatttttaagcttgaaatagaacttagaggggaaagaactttactaaccaatattaatctaaataattaggatacaaatacaccagataaaatatagtatttttcatcaactctatatttcactttgtcacacaaactatatatattttttgtcacataaagtatatataatagatttagttatttagtaatgattttgaaaattcaattttgaagaatttcttataagttattgaaatactaaaacatcttgtggttttatagaaatttaagagtaaaactggaattttttgaatctggcaatttgctctgataggaaaattgccttcattatattattacac

SEQ ID NO: 28121 - DNA, 6300 bp, Macaca Mulatta
  misc_feature (1)...(6300): n = A,T,C or G
ggagcagcaccctgaggaggaactgatcaagactaagcaggatgaagtcaatgcagcctggcagcggctgaagggcttggctctgcagaggcaggggaagctctttnnnnnnnnnnnnnnnnnnnnnnnnnnnnnnnnnnnnnnnnnnnnnnnnnnnnnnnnnnnnnnnnnnnnnnnnnnnnnnnnnnnnnnnnnnnnnnnnnnnnnnnnnnnnnnnnnnnnnnnnnnnnnnnnnnnnnnnnnnnnnnnnnnnnnnnnnnnnnnnnnnnnnnnnnnnnnnnnnnnnnnnnnnnnnnnnnnnnnnnnnnnnnnnnnnnnnnnnnnnnnnnnnnnnnnnnnnnnnnnnnnnnnnnnnnnnnnnnnnnnnnnnnnnnnnnnnnnnnnnnnnnnnnnnnnnnnnnnnnnnnnnnnnnnnnnnnnnnnnnnnnnnnnnnnnnnnnnnnnnnnnnnnnnnnnnnnnnnnnnnntcaccagctgggtgactgagatgaaagccctcatcaatgcagatgagcttgccaatgatgtggctggggctgaagccctgctagatagacaccaagagcacaagnnagggtgaaattgatgctcatgaagacagcttcaaatctgcagatgaatctgggcaggcactgcttgctgctggtcattacgcctcagatgaagtgagggagaannnnnnnnnnnnnnnnnnnnnnnnnnnnnnnnnnnnnnnnnnnnnnnnnnnnnnnnnnnnnnnnnnnnnnnnnnnnnnnnnnnnnnnnnnnnnnnnnnnnnnnnnnnnnnnnnnnnnnnnnnnnnnnnnnnnnnnnnnnnnnnnnnnnnnnnnnnnnnnnnnnnnnnnnnnnnnnnnnnnnnnnnnnnnnnnnnnnnnnnnnnnnnnnnnnnnnnnnnnnnnnnnnnnnnnnnnnnnnnnnnnnnnnnnnnnnnnnnnnnnnnnnnnnnnnnnnnnnnnnnnnnnnnnnnnnnnnnnnnnnnnnnnnnnnnnnnnnnnnnnnnnnnnnnnnnnnnnnnnnnnnnnnnnnnnnnnnnnnnnnnnnnnnnnnnnnnnnnnnnnnnnnnnnnnnnnnnnnnnnnnnnnnnnnnnnnnnnnnnnnnnnnnnnnnnnnnnnnnnnnnnnnnnnnnnnnnnnnnnnnnnnnnnnnnnnnnnnnnnnnnngatccatccaacctacaaggaaaagtacagaagcatcaggcttttgaggctgagctctcagcaaaccagagccgaattgatgccttggagaaagctggccaaaaactgattgatgtcaaccactatgccaaggatgaagtagcagctcgtatgaatgaggtgatcagtttgtggaagaaactgctagaggccactgaactgaaagnnnnnnnnnnnnnnnnnnnnnnnnnnnnnnnnnnnnnnnnnnnnnnnnnnnnnnnnnnnnnnnnnnnnnnnnnnnnnnnnnnnnnnnnnnnnnnnnnnnnnnnnnnnnnnnnnnnnnnnnnnnnnnnnnnnnnnnnnnnnnnnnnnnnnnnnnnnnnnnnnnnnnnnnnnnnnnnnnnnnnnnnnnnnnnnnnnnnnnnnnnnnnnnnnnnnnnnnnnnnnnnnnnnnnnnnnnnnnnnnnnnnnnnnnnnnnnnnnnnnnnnnnnnnnnnnnnnnnnnnnnnnnnnnnnnnnnnnnnnnnnnnnnnnnnnnnnnnnnnnnnnnnnnnnnnnnnnnnnnnnnnnnnnnnnnnnnnnnnnnnnnnnnnnnnnnnnnnnnnnnnnnnnnnnnnnnnnnnnnnnnnnnnnnnnnnnnnnnnnnnnnnnnnnnnnnnnnnnnnnnnnnnnnnnnnnnnnnnnnnnnnnnnnnnnnnnnnnnnnnnnnnnnnnnnnnnnnnnnnnnnnnnnnnnnnnnnnnnnnnnnnnnnnnnnnnnnnnnnnnnnnnnnggccattttgctgcagaggatgtgaaggccaagcttcacgagctgaaccaaaagtgggaagcgctgaaagccaaagcctcccagcgtcggcaggacctggaggactctctgcaggcccagcagtactttgctgatgctaatgaggccgaatcctggatgcgggagaaagaacccattgtgggcagcactgactatggaaaggacgaagactctgctgaggnnnnnnnnnnnnnnnnnnnnnnnnnnnnnnnnnnnnnnnnnnnnnnnnnnnnnnnnnnnnnnnnnnnnnnnnnnnnnnnnnnnnnnnnnnnnnnnnnnnnnnnnnnnnnnnnnnnnnnnnnnnnnnnnnnnnnnnnnnnnnnnnnnnnnnnnnnnnnnnnnnnnnnnnnnnnnnnnnnnnnnnnnnnnnnnnnnnnnnnnnnnnnnnnnnnnnnnnnnnnnnnnnnnnnnnnnnnnnnnnnnnnnnnnnnnnnnnnnnnnnnnnnnnnnnnnnnnnnnnnnnnnnnnnnnnnnnnnnnnnnnnnnnnnnnnnnnnnnnnnnnnnnnnnnnnnnnnnnnnnnnnnnnnnnnnnnnnnnnnnnnnnnnnnnnnnnnnnnnnnnnnnnnnnnnnnnnnnnnnnnnnnnnnnnnnnnnnnnnnnnnnnnnnnnnnnnnnnnnnnnnnnnnnnnnnnnnnnnnnnnnnnnnnnnnnnnnnnnnnnnnnnnnnnnnnnnnnnnnnnnnnnnnnnnnnnnnnnnnnnnnnnnnnnnnnnnnnnnnnnnnnnnnnnnnnnnnnnnnnnnnnnnnnnnnnnnnnnnnnnnnnnnnnnnnnnnnnnnnnnnnnnnnnnnnnnnnnnnnnnnnnnnnnnnnnnnnnnnnnnnnnnnnnnnnnnnnnnnnnnnnnnnnnnnnnnnnnnnnnnnnnnnnnnnnnnnnnnnnnnnnnnnnnnnnnnnnnnnnnnnnnnnnnnnnnnnnnnnnnnnnnnnnnnnnnnnnnnnnnnnnnnnnnnnnnnnnnnnnnnnnnnnnnnnnnnnnnnnnnnnnnnnnnnnnnnnnnnnnnnnnnnnnnnnnnnnnnnnnnnnnnnnnnnnnnnnnnnnnnnnnnnnnnnnnnnnnnnnnnnnnnnnnnnnnnnnnnnnnnnnnnnnnnnnnnnnnnnnnnnnnnnnnnnnnnnnnnnnnnnnnnnnnnnnnnnnnnnnnnnnnnnnnnnnnnnnnnnnnnnnnnnnnnnnnnnnnnnnnnnnnnnnnnnnnnnnnnnnnnnnnnnnnnnnnnnnnnnnnnnnnnnnnnnnnnnnnnnnnnnnnnnnnnnnnnnnnnnnnnnnnnnnnnnnnnnnnnnnnnnnnnnnnnaggtaaactcccttggtgaaacagcagagcgcctgatccagtcccatcccgagtcagcagaggacctccaggaaaagtgcacagagttaaaccaggcctggagcagcctggggaaacgtgcagatcagcgcaaggcaaagttgggcgactcccacgacctgcagcgctttcttagcgatttccgnnnnnnnnnnnnnnnnnnnnnnnnnnnnnnnnnnnnnnnnnnnnnnnnnnnnnnnnnnnnnnnnnnnnnnnnnnnnnnnnnnnnnnnnnnnnnnnnnnnnnnnnnnnnnnnnnnnnnnnnnnnnnnnnnnnnnnnnnnnnnnnnnnnnnnnnnnnnnnnnnnnnnnnnnnnnnnnnnnnnnnnnnnnnnnnnnnnnnnnnnnnnnnnnnnnnnnnnnnnnnnnnnnnnnnnnnnnnnnnnnnnnnnnnnnnnnnnnnnnnnnnnnnnnnnnnnnnnnnnnnnnnnnnnnnnnnnnnnnnnnnnnnnnnnnnnnnnnnnnnnnnnnnnnnnnnnnnnnnnnnnnnnnnnnnnnnnnnnnnnnnnnnnnnnnnnnnnnnnnnnnnnnnnnnnnnnnnnnnnnnnnnnnnnnnnnnnnnnnnnnnnnnnnnnnnnnnnnnnnnnnnnnnnnnnnnnnnnnnnnnnnnnnnnnnnnnnnnnnnnnnnnnnnnnnnnnnnnnnnnnnnnnnnnnnnnnnnnnnnnnnnnnnnnnnnnnnnnnnnnnnnnnnnnnnnnnnnnnnnnnnnnnnnnnnnnnnnnnnnnnnnnnnnnnnnnnnnnnnnnnnnnnnnnnnnnnnnnnnnnnnnnnnnnnnnnnnnnnnnnnnnnnnnnnnnnnnnnnnnnnnnnnnnnnnnnnnnnnnnnnnnnnnnnnnnnnnnnnnnnnnnnnnnnnnnnnnnnnnnnnnnnnnnnnnnnnnnnnnnnnnnnnnnnnnnnnnnnnnnnnnnnnnnnnnnnnnnnnnnnnnnnnnnnnnnnnnnnnnnnnnnnnnnnnnnnnnnnnnnnnnnnnnnnnnnnnnnnnnnnnnnnnnnnnnnnnnnnnnnnnnnnnnnnnnnnnnnnnnnnnnnnnnnnnnnnnnnnnnnnnnnnnnnnnnnnnnnnnnnnnnnnnnnnnnnnnnnnnnnnnnnnnnnnnnnnnnnnnnnnnnnnnnnnnnnnnnnnnnnnnnnnnnnnnnnnnnnnnnnnnnnnnnnnnnnnnnnnnnnnnnnnnnnnnnnnnnnnnnnnnnnnnnnnnnnnnnnnnnnnnnnnnnnnnnnnnnnnnnnnnnnnnnnnnnnnnnnnnnnnnnnnnnnnnnnnnnnnnnnnnnnnnnnnnnnnnnnnnnnnnnnnnnnnnnnnnnnnnnnnnnnnnnnnnnnnnnnnnnnnnnnnnnnnnnnnnnnnnnnnnnnnnnnnnnnnnnnnnnnnnnnnnnnnnnnnnnnnnnnnnnnnnnnnnnnnnnnnnnnnnnnnnnnnnnnnnnnnnnnnnnnnnnnnnnnnnnnnnnnnnnnnnnnnnnnnnnnnnnnnnnnnnnnnnnnnnnnnnnnnnnnnnnnnnnnnnnnnnnnnnnnnnnnnnnnnnnnnnnnnnnnnnnnnnnnnnnnnnnnnnnnnnnnnnnnnnnnnnnnnnnnnnnnnnnnnnnnnnnnnnnnnnnnnnnnnnnnnnnnnnnnnnnnnnnnnnnnnnnnnnnnnnnnnnnnnnnnnnnnnnnnnnnnnnnnnnnnnnnnnnnnnnnnnnnnnnnnnnnnnnnnnnnnnnnnnnnnnnnnnnnnnnnnnnnnnnnnnnnnnnnnnnnnnnnnnnnnnnnnnnnnnnnnnnnnnnnnnnnnnnnnnnnnnnnnnnnnnnnnnnnnnnnnnnnnnnnnnnnnnnnnnnnnnnnnnnnnnnnnnnnnnnnnnnnnnnnnnnnnnnnnnnnnnnnnnnnnnnnnnnnnnnnnnnnnnnnnnnnnnnnnnnnnnnnnnnnnnnnnnnnnnnnnnnnnnnnnnnnnnnnnnnnnnnnnnnnnnnnnnnnnnnnnnnnnnnnnnnnnnnnnnnnnnnnnnnnnnnnnnnnnnnnnnnnnnnnnnnnnnnnnnnnnnnnnnnnnnnnnnnnnnnnnnnnnnnnnnnnnnnnnnnnnnnnnnnnnnnnnnnnnnnnnnnnnnnnnnnnnnnnnnnnnnnnnnnnnnnnnnnnnnnnnnnnnnnnnnnnnnnnnnnnnnnnnnnnnnnnnnnnnnnnnnnnnnnnnnnnnnnnnnnnnnnnnnnnnnnnnnnnnnnnnnnnnnnnnnnnnnnnnnnnnnnnnnnnnnnnnnnnnnnnnnnnnnnnnnnnnnnnnnnnnnnnnnnnnnnnnnnnnnnnnnnnnnnnnnnnnnnnnnnnnnnnnnnnnnnnnnnnnnnnnnnnnnnnnnnnnnnnnnnnnnnnnnnnnnnnnnnnnnnnnnnnnnnnnnnnnnnnnnnnnnnnnnnnnnnnnnnnnnnnnnnnnnnnnnnnnnnnnnnnnnnnnnnnnnnnnnnnnnnnnnnnnnnnnnnnnnnnnnnnnnnnnnnnnnnnnnnnnnnnnnnnnnnnnnnnnnnnnnnnnnnnnnnnnnnnnnnnnnnnnnnnnnnnnnnnnnnnnnnnnnnnnnnnnnnnnnnnnnnnnnnnnnnnnnnnnnnnnnnnnnnnnnnnnnnnnnnnnnnnnnnnnnnnnnnnnnnnnnnnnnnnnnnnnnnnnnnnnnnnnnnnnnnnnnnnnnnnnnnnnnnnnnnnnnnnnnnnnnnnnnnnnnnnnnnnnnnnnnnnnnnnnnnnnnnnnnnnnnnnnnnnnnnnnnnnnnnnnnnnnnnnnnnnnnnnnnnnnnnnnnnnnnnnnnnnnnnnnnnnnnnnnnnnnnnnnnnnnnnnnnnnnnnnnnnnnnnnnnnnnnnnnnnnnnnnnnnncgcaaacaccaggaaatccgagccatgagaagtcagctcaaaaagattgaggacctggggaatgccatggaggaggccctcatcctggacaacaagtacacggagcacagcaccgtgggcctggcccagcagtgggaccaactggaccagctgggcatgcgcatgcagcacaacctggagcagcagatccaggccag

SEQ ID NO: 28122 - DNA, 391 bp, Macaca Mulatta
ctcatgtgcatttttcttgaattgattctgtgtactgcatttgttctgtgaagcaccttagtgaatagaagattttgctctttccactccagaggcttttgaccccaagttatgctctttgacaatggagagttattgcataaaaagtgacaataaaatcttgacatttcatatctgcaaattttcacttaaaaaaaaggtagatttgataggagtaagtcacaaaggaaaatccataatgtcagtgctaataactgataagattaaatctggaagggaaattgtaagtgcatagcactcattgaaatatttgattcaatcaactaattagtagcaaattcaaaacaaaattggaaatagttatataaaataagacaatttgttgatcaaa

SEQ ID NO: 28123 - DNA, 153 bp, Macaca Mulatta
aagaagcagaagcgtttgcttattatcgccggacacacactgccaatgagcggcggcggcgtggtgaaatgagagatctctttgagaaattaaagatcacattgggattacttcattcttccaaggtttctaaaagtctcattcttactcgag

SEQ ID NO: 28124 - DNA, 893 bp, Macaca Mulatta
gcagtggcaagactctcagctacctcctgccgctgtttcaacggctcatggtccagccaagcctggactcccttcgtatccccgctccccgaggcctagtccttgttccttcccgagaactggcccaacaggtgcaggctgtggcccaacccttgggccgctccttgggcctgctggtgcgggacctggagggaggccacggcatgtgtaggatcaggatgcaattggccagacagccttcagcagatgtgctagtggccactccaggggctctgtggaaggccctgaaaagtcgactgattagtctggagcaactctcgttcttggtgttggatgaggcagacacactgctggatgaaagcttcctggaactggtggactgcatcttagagaagagccacatagcagacggcccagctgacttggaagaccgcttcaatcccaaagctcagttagtgctggtaggagccacatttcccgaaggtgtaggccagttgctggataaagtcgccagcccagatgctgtcaccaccatcaccagctccaatctccactgtatcatgcctcatgtgaaacagacatttctgagactgaagggagcagataaggtagccgagctggtgcacattctcaagcatcataacagagcagaaaggactggcccctcaggaactgttctggtgttctgtaatagctccagcactgtgaactggctgggatatattctggatgatcacaaaatccaacacctaaggttgcaggggcaaatgccggccttaatgagggcaggaatcttccagtccttccagaagagctcccgagacatacttctctgcacagacatagcctctcggggccctggacagcaccggtgtggagctggttgtcaatta

SEQ ID NO: 28125 - DNA, 1479 bp, Macaca Mulatta
  misc_feature (1)...(1479): n = A,T,C or G
tgtttccacttttcagtatgatcgtttctttgagaaaaaaattgatgagaaaaagaatgaccacacctatcgagtttttaaaactgtgaaccggcgagcacacatcttcccgatggcagatgactattcagactccctcatcaccaaaaagcaggtgtcagtctggtgcagtaatgactacctaggaatgagtcgccacccacgggtgtgtggggcagatatggacactttgaaacaacatggtgctggggccaggtggtactagaaatatttctggaactagtaaattccatgtggacttagagcaggagctggcagacctccatgggaaagatgctgcactcttgttttcctcgtgctttgtggccaatgactcaaccctcttcaccctggctaagatgatgccaggnnaggctgtgagatttactctgattctgggaaccatgcctccatgatccaagggattcgaaacagccgagtgccaaagtacatcttccgccannnnnnnnnnnnnnnnnnnnnnnnnnnnnnnnnnnnnnnnnnnnnnnnnnnnnnnnnnnnnnnnnnnnnnnnnnnnnnnnnnnnnnnnnnnnnnnnnnnnnnnnnnnnnnnnnnnnnnnnnnnnnnnnnnnnnnnnnnnnnnnnnnnnnnnnnnnnnnnnnnnnnnnnnnnnnnnnnnnnnnnnnnnnnnnnnnnnnnnnnnnnnnnnnnnnnnnnnnnnnnnnnnnnnnnnnnnnnnnnnnnnnnnnnnnnnnnnnnnnnnnnnnnnnnnnnnnnnnnnnnnnnnnnnnnnnnnnnnnnnnnnnnnnnnnnnnnnnnnnnnnnnnnnnnnnnnnnnnnnnnnnnnnnnnnnnnnnnnnnnnnnnnnnnnnnnnnnnnnnnnnnnnnnnnnnnnnnnnnnnnnnnnnnnnnnnnnnnnnnnnnnnnnnnnnnnnnnnnnnnnnnnnnnnnnnnnnnnnnnnnnnnnnnnnnnnnnnnnnnnnnnnnnnnnnnnnnnnnnnnnnnnnnnnnnnnnnnnnnnnnnnnnnnnnnnnnnnnnnnnnnnnnnnnnnnnnnnnnnnnnnnnnnnnnnnnnnnnnnnnnnnnnnnnnnnnnnnnnnnnnnnnnnnnnnnnnnnnnnnnnnnnnnnnnnnnnnnnnnnnnnnnnnnnnnnnnnnnnnnnnnnnnnnnnnnnnnnnnnnnnnnnnngagaatctgctggtcacgtggaagcaagtggggctggaactgaagccacattcctcagctgagtgcaacttctgcaggaggccactgcattttgaagtgatgagtgaaagagagaagtcctatttctcaggcttgagcaagttggtatctgctcaggcctgagcatgacctcagttattccacttaaccccaggccattatcatatccagatagtcttcagagttgtctttatatgtgaattaagttatattaaattttaatctatagtaaaaacatagtcctggaaataa

SEQ ID NO: 28126 - DNA, 1043 bp, Macaca Mulatta
  misc_feature (1)...(1043): n = A,T,C or G
aggtgattgacttgggttccggtaaaggctatctaagctcctttttgtccttgaagtatggctttaaagtttatggaattgattcctcaaatactaatactcatggagctgaggagagaaacagaaaactgaagaaacattggaaactctgtcatgctcagtcaagattagatgtcaatggactagcannnnnnnnnnnnnnnnnnnnnnnnnnnnnnnnnnnnnnnnnnnnnnnnnctgatattgaggaagcgtttaacagcagtcttacaaatcaagaaaagatgtctacctcagatatttcgcctgatttttctggctctgtaatttctaatatcagaaaccaaatgcaaacccttcattctcaaccacatcaagaagaaaatttgtgttttgaaaattccttttctcttataaaccttttgcctattaatgccgtagagcctacttcttcacagcaaatacccaacagagaaacatctgaagccaataaagagagaagaaaaatgacatcaaagtcaagtgaatctaatgtatattcacctttaacctcttttatcactgctgattcagaactccatgacattatnnnnnnnnnnnnnnnnnnnnnnnnnnnnnnnnnnnnnnnnnnnnnnnnnnnnnnnnnnnnnnnnnnnnnnnnnnnnnnnnnnnnnnnnnnnnnnnnnnnnnnnnnnnnnnnnnnnnnnnnnnnnnnnnnnnnnnnnnnnnnnnnnnnnnnnnnnnnnnnnnnnnnnnnnnnnnnnnnnnnnnnnnnnnnnnnnnnnnnnnnnnnnnnnnnnnnnnnnnnnnnnnnnnnnnnnnnnnnnnnnnnnnnnnnnnnnnnnnnnnnnnnnnnnnnnnnnnnnnnnnnnnnnnnnnnnnnnnnnnnnnnnnnnnnnnnnnnnnnnnnnnnnnnnnnnnnnnnnnnnnnnnnnnnnnnnnnnnnnngtgatcggcatgttggtaaaatttattccaaatgttcttcatttctggattatgtcagacggtctctaaagaagcttggattagatgagtccaag

SEQ ID NO: 28127 - DNA, 1213 bp, Macaca Mulatta
  misc_feature (1)...(1213): n = A,T,C or G
agcgtgatcttgctgggtcggcacaacccgtattatcctgaagacacgggccaggtgtttcaggtcagccacagcttcccacacccgctctacaacatgagcctcctgaagaatcgatacctcgggccaggtgatgactccagccacgacctcatgctgctccgcctgtcagagcctgccgagatcacagatgctgtgcaggtcctggacctgcccacctgggagccagagctggggaccacgtgctacgcctcaggctggggcagcannnnnnnnnnnnnnnnnnnnnnnnnnnnnnnnnnnnnnnnnnnnnnnnnnnnnnnnnnnnnnnnnnnnnnnnnnnnnnnnnnnnnnnnnnnnnnnnnnnnnnnnnnnnnnnnnnnnnnnnnnnnnnnnnnnnnnnnnnnnnnnnnnnnnnnnnnnnnnnnnnnnnnnnnnnnnnnnnnnnnnnnnnnnnnnnnnnnnnnnnnnnnnnnnnnnnnnnnnnnnnnnnnnnnnnnnnnnnnnnnnnnnnnnnnnnnnnnnnnnnnnnnnnnnnnnnnnnnnnnnnnnnnnnnnnnnnnnnnnnnnnnnnnnnnnnnnnnnnnnnnnnnnnnnnnnnnnnnnnnnnnnnnnnnnnnnnnnnnnnnnnnnnnnnnnnnnnnnnnnnnnnnnnnnnnnnnnnnnnnnnnnnnnnnnnnnnnnnnnnnnnnnnnnnnnnnnnnnnnnnnnnnnnnnnnnnnnnnnnnnnnnnnnnnnnnnnnnnnnnnnnnnnnnnnnnnnnnnnnnnnnnnnnnnnnnnnnnnnnnnngacatctcactcagtttctttgaggacccagataggcttggggagnctgtgttgtttgtggggtacagagatgaaggaggggtggggtccacactgagagagtatacattgacacgtgctggatgctgtccatgaagcactgagcagatgctggaggcgcaacgcaccagacactcacagcaaggatggagctgaaaacataatccactctgtcttggaggcactgggaagcctagagaaggctgcgaactgaggagggagggtcttcctgtggcatgggatggggatgaagtaaggagagggactggactccctggaagctgattcattttgtttgagaggtgtgtcaaggtcccccagacaaccctcagatttgatgatttcctagtacaactcacagaaataaagagctgttatactgtg

SEQ ID NO: 28128 - DNA, 705 bp, Macaca Mulatta
  misc_feature (1)...(705): n = A,T,C or G
cgcacacggcgccgcctggccgcggcacacagcggccactcacacagcgacactcgtctgaatcctcctctgaactgtcctcatctctccggggcttccccagcagcagggggctcgtgtcccagaaggaattgctttcgctctgcgatgtcgggcactgggaccccgctccgcgcggcgggcacgggcggcactgggcgccccagccgcggccctggcggcagcagcagtcgtcgaaggtaagggcaggcccggcctgggggcccgcgcacatgccgtcctctccgcgctgactccagcacacgtcgcgccgctccggggcgcgctcggccgggctctcggggagctggcaatcgcggccggcgggcccgggcacccagggcgggcgacactcgcagcggtaggagcccggcaggttgacgcagcggccagggcggcaggctgccgggtcctgacactcgtccacgtccatctcttccgggctcaggcactggcgctgcgcaggactgtactccgctgggggcgtgcaggcacagcggtagccgccgcgcgtgttctcacacactccgttccggcagttggactcgtccaggcattcgtccacgtccacgcattccagcaggttcccgtcgtagtagaagccctgcttgcagtagcactgtagcccaggctgtgtngttcacgcacttgcccggcacgagcctc

SEQ ID NO: 28129 - DNA, 111 bp, Macaca Mulatta
agtgataacgatttgttaactcaaactaggacaattgcaatgtcattggtgaaatgtgccagcagtgacacgcaggaccagtacaagctggtcaaagatatatctttctga

SEQ ID NO: 28130 - DNA, 391 bp, Macaca Mulatta
agcaccaagtttcagagattaaagagctcatggcaattctgtttactgcttcctcagatagctacagctatttctcagattttgtactagtatcttaatttcctttctttctaaaaacatcttaaaaccaaatagctttttagataaccctacatattgaataccttattcacccacatcgtacaaaaatagctggaaggaaatggcacctgtccatgccagagcagggctgagtgcgggcctgtctctgtttccaaagtgtttgcttggccttgtgcctccccgtcacagtggcagtgcacgcagggcagggtggcggctctgctcacaccctcttccccacaaaaagacccctgaccactcaagcctcacacgcctgtcacacagcaga

SEQ ID NO: 28131 - DNA, 1115 bp, Macaca Mulatta
  misc_feature (1)...(1115): n = A,T,C or G
gttgattttgtgtgaatgtttgtatcnnnnnnnnnnnnnnnnnnnnnnnnnnnnnnnnnnnnnnnnnnnnntagttacttgcttggtttttagaaattacatattaaaaatgcccttagcatgaaggcagcatggtgtggcagttaagagatgggttgtgcagcccatcctgagctccagttctgagtttgctacttacttctgtggcctctggaacctcatccaacctctcagtgcctcagtattaatacatctgtgaagttagaatttataataattgtacctacctcccaggggtaactaagtgaataaatataagtaaagaacttgcagtggttcctggcacaaactcaacactctctcagtgttgccatgactatttttagnatcagtagtagtgattgcttggatcanttatttagcggtggactaatggaagctacagagcagggaagggaagcagacctagggaggaaggcagttttgatttgaggaggtttnnnnnnnnnnnnnnnnnnnnnnnnnnnnnnnnnnnnnnnnnnnnnnnnnnnnnnnnnnnnnnnnnnnnnnnnnnnnnnnnnnnnnnnnnnnnnnnnnnnnnnnnnnnnnnnnnnnnnnnnntgggagccttcttgatgatctcaaaagtaatagctattcaagaaaatcaccaagtcactgaaaccgggagtttggaaggctgatgagaacacatgggagcaacatgaatgttctacaaaactttaaagcagagactgtttcaaacagatgtagcagatactactgaaaaccaaaggagagtgagattgtgtaagaatgtgatttcatgtttgtagtgcttacaattttgtgcaccaactggatggctagaaagggtaaaataatttaattaatagctcatattttatgtgtgaaaacatattagtgaacatatataatcaaaatagatttcattgctattgcatagtctgatacatagaatgattttgcttttctcttttattatactcgctttaaaatacttgaaatagattttgtattaaatgcatttcaagttaaatgtgttaaatgtatacattagatgttgtgctttaaaatgcataaaatacgttgaa

SEQ ID NO: 28132 - DNA, 1178 bp, Macaca Mulatta
  misc_feature (1)...(1178): n = A,T,C or G
actttaccccgggtggcggcgaggacgagtctgtgctccatcagcggccgcacccgccgcctcccgcccccaaaccccatccctgcggttgagccacgatgagcggcagagtcggggatctgagccccaagcagaaggaggcactggccaagnnnnnnnnnnnnnnnnnnnnnnnnnnnnnnnnnnnnnnnnnnnnnnnnnnnnnnnnnnnnnnnnnnnnnnnnnnnnnnnnnnnnnnnnnnnnnnnnnnnnnnnnnnnnnnnnnnnnnnnnnnnnnnnnnnnnnnnnnnnnnnnnnnnnnnnnnnnnnnnnnnnnnnnnnnnnnnnnnnnnnnnnnnnnnnnnnnnnnnnnnnnnnnnnnnnnnnnnnnnnnnnnnnnnnnnnnnnnnnnnnnnnnnnnnnnnnnnnnnnnnnnnnnnnnnnnnnnnnnnnnnnnnnnnnnnnnnnnnnnnnnnnnnnnnnnnnnnnnnnnnnnnnnnnnnnnnnnnnnnnnnnnnnnnnnnnnnnnnnnnnnnnnnnnnnnnnnnnnnnggtggagaccgtcaccataatttatgactgtgaggggcttggcctcaagcatctctggaagcctgctgtggaggcctatggagagngtttctctgcatgggtgaggaaaattatccctaaacactgaagcgtctttttgttgttaaagnnnnnnnnnnnnnnnnnnnnnnnnnnnnnnnnnnnnnnnnnnnnnnnnnnnnnnnnnnnnnnnnnnnnnnnnnnnnnnnnnngcaaattggaaggaggttttactgaaacatatcagccctgaccaggtgcctgtggagtatgggggtaccatgactgaccctgatggaaaccccaagtgcaaatccaagnnnnnnnnnnnnnnnnnnnnnnnnnnnnnnnnnnnnnnnnnnnnnnnnnnnnnnnnnnnnnnnnnnnnnnnnnnnnnnnnnnnnnnnnnnnnnnnnnnnnnnnnnnnnnnnnnnnnnnnnnnnnnnnnnnnnnnnnnnnnnnnnnnnnnnnnnnnnnnnnnnnnnnnnnnnnnnnnnnnnnnnnnnnnnnnnnnnnnnnnnnnnnnnnnnnnnnnnnnnnnnnnnnnnnnnnnnnnnnnnnnnnnnnnnnnnnnnnnnnnnnnnnnnnnnnnnnnnnnnnnnnnnntcacctgcagtgatcctggcatc

SEQ ID NO: 28133 - DNA, 2622 bp, Macaca Mulatta
  misc_feature (1)...(2622): n = A,T,C or G
agcacaaatgaggatgtcccattttctgccttttgggttttatcagctgctgtaggttttccacactgtgtagttgcagtagcctggctgccctctgtccaacatgaagtgccacttggtatcattcatggtttgatcctgagaacaatccacctattatataattnnnnnnnnnnnnnnnnnnnnnnnnnnnnnnnnnnnnnnnnnnnnnnnnnnnnnnnnnnnnnnnnnnnnnnnnnnnnnnnnnnnnnnnnnnnnnnnnnnnnnnnnnnnnnnnnnnnnnnnnnnnnnnnnnnnnnnnnnnnnnnnnnnnnnnnnnnnnnnnnnnnnnnnnnnnnnnnnnnnnnnnnnnnnnnnnnnnnnnnnnnnnnnnnnnnnnnnnnnnnnnnnnnnnncttggaaaagggctgtaagaaatgaaaaactacctagtagcatctgtacttcccttanaattcaaccttcactggcttcctctgaatccatcaaggtcttaaatatttaaagaaaggctaaattcagaaggtatttaagaaaagggcaggccctgctgggtcctgatgagtccagtggctccgggagctgcccaatgggccagcagtctctgtggaatccaggtgacccttcccactagggactggactaacacttcatgcagctttctcccaagaggactccaatgaaggagtgtttcgaacccaagtaaaaaggatgccctgcaaggctagtttgaacagaacccttaacccggtatgactaccagagaacaactgaccagagaaattggcactccagaatttagaatacagatttggtttcaaaaaccagagaatacaacacctcagacagagtctactggggtctggattgaggtcgatttcctggaattgctatcagggaaaaactggctgcacaaacaggcctctcagagttcggaactcagatatggtttcataaccaaagagctcggcactgtggccagagctgtggacttgtgaattccctggcagaaggccccaagtcagagacctcacatgactgtgtgacaaggcaaggcaacttgtgcatggcccctatcaccggagtcacttccctccctccagttctttgaacaacaaccagcnnnnnnnnnnnnnnnnnnnnnnnnnnnnnnnnnnnnnnnnnnnnnnnnnnnnnnnnnnnnnnnnnnnnnnnnnnnnnnnnnnnnnnnnnnnnnnnnnnnnnnnnnnnnnnnnnnnnnnnnnnnnnnnnnnnnnnnnnnnnnnnnnnnnnnnnnnnnnnnnnnnnnnnnnnnnnnnnnnnnnnnnnnnnnnnnnnnnnnnnnnnnnnnnnnnnnnnnnnnnnnnnnnnnnnnnnnnnnnnnnnnnnnnnnnnnnnnnnnnnnnnnnnnnnnnnnnnnnnnnnnnnnnnnnnnnnnnnnnnnnnnnnnnnnnnnnnnnnnnnnnnnnnnnnnnnnnnnnnnnnnnnnnnnnnnnnnnnnnnnnnnnnnnnnnnnnnnnnnnnnnnnnnnnnnnnnnnnnnnnnnnnnnnnnnnnnnnnnnnnnnnnnnnnnnnnnnnnnnnnnnnnnnnnnnnnnnnnnnnnnnnnnnnnnnnnnnnnnnnnnnnnnnnnnnnnnnnnnnnnnnnnnnnnnnnnnnnnnnnnnnnnnnnnnnnnnnnnnnnnnnnnnnnnnnnnnnnnnnnnnnnnnnnnnnnnnnnnnnnnnnnnnnnnnnnnnnnnnnnnnnnnnnnnnnnnnnnnnnnnnnnnnnnnnnnnnnnnnnnnnnnnnnnnnnnnnnnnnnnnnnnnnnnnnnnnnnnnnnnnnnnnnnnnnnnnnnnnnnnnnnnnnnnnnnnnnnnnnnnnnnnnnnnnnnnnnnnnnnnnnnnnnnnnnnnnnnnnnnnnnnnnnnnnnnnnnnnnnnnnnnnnnnnnnnnnnnnnnnnnnnnnnnnnnnnnnnnnnnnnnnnnnnnnnnnnnnnnnnnnnnnnnnnnnnnnnnnnnnnnnnnnnnnnnnnnnnnnnnnnnnnnnnnnnnnnnnnnnnnnnnnnnnnnnnnnnnnnnnnnnnnnnnnnnnnnnnnnnnnnnnnnnnnnnnnnnnnnnnnnnnnnnnnnnnnnnnnnnnnnnnnnnnnnnnnnnnnnnnnnnnnnnnnnnnnnnnnnnnnnnnnnnaatcctcaccactggggcagtctggactatacaggaactggaaccaaaccaaaccagggcgaggacactaggtctaagggggacatctccacacttctttccttctggcaagttcagaagttacacctgaaagcaggtgatgtttagaatatggggggatgctgtatttccctgttctgtgagttgataacaaggagtttttaatctcagctctgagagttggaaatgggaattggaagtcacttcactacccacctcttgggaactgattccacaagtttatatccataatcccgagtaggctttatgaccagttttccctctgaacattgaaatgtagagaaaatgacaggggaagttagaatagcaattctattagatcattgaacaaagcatatgaatgttactcttctcacattgttagcatttctgtatgttaacttgtacatctacccatcaagctgccctttttat

SEQ ID NO: 28134 - DNA, 1700 bp, Macaca Mulatta
  misc_feature (1)...(1700): n = A,T,C or G
tctcagctcactgcaagctccgtctcccgggttcacaccattctcctgcctcagcctccctagaagctgggactacaggcgcccaccaccacgcccagctaattttttgtatttttagtagagatgcggtttcaccgtgttagccaggatggtctcgatctcctgacctcgtgatccgcccgccttggcctccctaagtgctggtatttcaggcgtgagcnnnnnnnnnnnnnnnnnnnnnnnnnnnnnnnnnnnnnnnnnnnnnnnnnnnnnnnnnnnnnnnnnnnnnnnnnnnnnnnnnnnnnnnnnnnnnnnnnnnnnnnnnnnnnnnnnnnnnnnnnnnnnnnnnnnnnnnnnnnnnnnnnnnnnnnnnnnnnnnnnnnnnnnnnnnnnnnnnnnnnnnnnnnnnnnnnnnnnnnnnnnnnnnnnnnnnnnnnnnnnnnnnnnnnnnnnnnnnnnnnnnnnnnnnnnnnnnnnnnnnnnnnnnnnnnnnnnnnnnnnnnnnnnnnnnnnnnnnnnnnnnnnnnnnnnnnnnnnnnnnnnnnnnnnnnnnnnnnnnnnnnnnnnnnnnnnnnnnnnnnnnnnnnnnnnnnnnnnnnnnnnnnnnnnnnnnnnnnnnnnnnnnnnnnnnnnnnnnnnnnnnnnnnnnnnntttttcacaccatttctcaaaaggagattcactgtcaatatcattttagtggttcagatgtcactttgccttacagaaacctatgcatccataagaaacctcaattgttaaaggtctaactggccagataaatctcattccagggcctgattgttttgatcaccttccatctggtcctgaatgactcgctgtatcacccagaaaagagacctgtcaggcagaatcgagcnnnnnnnnnnnnnnnnnnnnnnnnnnnnnnnnnnnnnnnnnnnnnnnnnnnnnnnnnnnnnnnnnnnnnnnnnnnnnnnnnnnnnnnnnnnnnnnnnnnnnnnnnnnnnnnnnnnnnnnnnnnnnnnnnnnnnnnnnnnnnnnnnnnnnnnnnnnnnnnnnnnnnnnnnnnnnnnnnnnnnnnnnnnnnnnnnnnnnnnnnnnnnnnnnnnnnnnnnnnnnnnnnnnnnnnnnnnnnnnnnnnnnnnnnnnnnnnnnnnnnnnnnnnnnnnnnnnnnnnnnnnnnnnnnnnnnnnnnnnnnnnnnnnnnnnnnnnnnnnnnnnnnnnnnnnnnnnnnnnnnnnnnnnnnnnnnnnnnnnnnnnnnnnnnnnnnnnnnnnnnnnnnnnnnnnnnnnnnnnnnnnnnnnnnnnnnnnnnnnnnnnnnnnnnnnnnnnnnnnnnnnnttctatgaaccagaatgaaacaagacagcagggatacagaaggtttgttctgctctgggaagcatggaggatgttgcacttcactcctctctgagggtgtctaggaatacagaagctccttgacttacatctcagtaaacccattgtaagtccaaaatattggaagttgaaaatgcattgaatacgctcaacctactgaacatcgtagcttagccaagcctaccttaaatgttctgagaacacttatattagactacagttgggaaaaatcatttaacacaaagcctatcttgtaatgaagtattgaatagctcatgtaatttattgagtactgtactgaaagtgaaaccagaatggttgtatggatatgagaag

SEQ ID NO: 28135 - DNA, 861 bp, Macaca Mulatta
  misc_feature (1)...(861): n = A,T,C or G
cactaggccctttgtagacaccattactttccctctcccatagtcagcaggcaatagacggggccccagctgccgcctcgggaccccctttccaggcggagggaggaagcgggagctttaaagcggtcggggatacctgagccgcttgttaggtcgccgcacactcgctgcggctgcctcctggtctgtttctccagccctcagccccgggcccctcctgcccgcccctagacggcctttccttttgcactttctgaactccacaaaacctcctttgtggctggctcagaactgaccccagccaccacttcagtgtgatttagaaaagggacagatcagcccctgaagacgaggtgaaaagtcaattttacaatttgtagaactctaatgaagaaaaacgagcatgaaaattcggtttgagccggctgacaatacaatgaaaaggcttaaaaaggagagacaaggagtgggcttcatgcattatggatcccgacccccaccactgcaggctcgctctaggaagaactggagactcttgcttagctattcaggcacagggctggagagtactttaatttattcaagatgcttcattcatatgaaaatgtatttttgtacataaagagtttattatgagctatcanagtttacatttttgtactgcagatgcttcatgtaaataaaaactaagaaaaaaataagtcaccaagtttcttgcctaatattagtgtctctggngcttttcttgcttttccctggtggctcaaccactaaagtgaaacactatccccactcacctccaaagcctcattcctggttcaaaaacattaaaaataaacgcacctgatttccaccaagaac

SEQ ID NO: 28136 - DNA, 318 bp, Macaca Mulatta
  misc_feature (1)...(318): n = A,T,C or G
gagctgcctggagttcagcctcagaatccaggagttcattgaactcatccggcagaataagagactggacgccgtgagnnnnnnnnnnnnnnnnnnnnnnnnnnnnnnnnnnnnnnnnnnnnnnnnnnnnnnnnnnnnnnnnnnnnnnnnnnnnnnnnnnnnnnnnnnnnnnnnnnnnnnnnnggacctcctggaccctgcacggtggcggatgctgatccagcagttccggtacgacaactaccgactacaccagctgggaaacaactctgtgttcaccctcaccctgcaggctggcctctcagccatcaagacacc

SEQ ID NO: 28137 - DNA, 135 bp, Macaca Mulatta
agggtgttctgtgctcacacttcagtctgagaatgtgctgcgcaagtacatctcccttctggatttgcccttgtctcggcttcatactcaggatgtcctctttgtgctcaacagcaaagaagtggcacaggccaa

SEQ ID NO: 28138 - DNA, 863 bp, Macaca Mulatta
ggggctgggaggacagctctggcccttcctaggcctagcctcaccccaagctaaatgtaacccagttggactctgttaaaggaagcagtgttttgggttcgattctgcctctgtagctcagagggggcggcccccagagtcctgtgcgttctgccaaaagctatgccaagtccatagctttgccaaatgcacggagctctgccattccagtgtggtgcaggccttgccaagggtttatctgcatgcgtctcggtgggcttgtcctgcatgggagttgtgttcctgtgcaaggggtagccttgctccaggacaggatgactgtcttccctgttcttagggacaagtcccaagatgccagaaaggcagtctcccaagggcccaccatgcagaagtgtcaataaacccacgaattctgaactctcccaacaattaaatataaaaaatttaataatatgtcggccgccctccgcccctcaaaagcttttttaaaccattcgttttgggcccgcgggccccattaggtaaaatgaaacatgggtccatacattgttttcctaaaaaaatccttgggtcattgaactaggggtttggatttctcaccaaataaaataacgcccgggggaagaaaccggagggtttcttgataaaaatccccaatgggaattcctgaagggtcttttactgcggtttctttccaaaacgggagtccctagtcaaaactccaataattaaaaatttaacccccccgcaccttggcactttaaatatgaacaataatggttttgtcatttccattaaaagatattctgcgcccaaattgggaagatcacatcaacaaacgggactaagaattaaaccctcta

SEQ ID NO: 28139 - DNA, 125 bp, Macaca Mulatta
cttcattccattttctgatgagtaataactcaacgttgaaaatgtcctttgtgggggagaactcaggagtgaaaacgggctctgaagactgggaaaaagatgaaccccagtgctactcagaaggt

SEQ ID NO: 28140 - DNA, 3731 bp, Macaca Mulatta
  misc_feature (1)...(3731): n = A,T,C or G
gtggagctgcgaccccggccctnnnnnnnnnnnnnnnnnnnnnnnnnnnnnnnnnnnnnnnnnnnnnnnnnnnnnnnnnnnnnnnnnnnnnnnnnnnnnnnnnnnnnnnnnnnnnnnnnnnnnnnnnnnnnnnnnnnnnnnnnnnnnnnnnnnnnnnnnnnnnnnnnnnnnnnnnnnnnnnnnnnnnnnnnnnnnnnnnnnnnnnnnnncagatgggagctcagaatgtctgagctccgcagagcagatggagtccgaggacatgctgagcgccttaggctggagcagagaagacaggccgaggcagaactccaaaactgcaaagaatgccttccctaccctgtctcccatggtcgtcatgaagaatgtgctggtcaaacagnnnnnnnnnnnnnnnnnnnnnnnnnnnnnnnnnnnnnnnnnnnnnnnnnnnnnnnnnnnnnnnnnnnnnnnnnnnnnnnnnnnnnnnnnnnnnnnnnnnnnnnnnnnnnnnnnnnnnnnnnnnnnnnnnnnnnnnnnnnnnnnnnnnnnnnnnnnnnnnnnnnnnnnnnnnnnnnnnnnnnnnnnnnnnnnnnnnnnnnnnnnnnnnnnnnnnnnnnnnnnnnnnnnnnnnnnnnnnnnnnnnnnnnnnnnnnnnnnnnnnnnnnnnnnnnnnnnnnnnnnnnnnnnnnnnnnnnnnnnnnnnnnnnnnnnnnnnnnnnnnnnnnnnnnnnnnnnnnnnnnnnnnnnnnnnnnnnnnnnnnnnnnnnnnnnnnnnnnnnnnnnnnnnnnnnnnnnnnnnnnnnnnnnnnnnnnnnnnnnnnnnnnnnnnnnnnnnnnnnnnnnnnnnnnnnnnnnnnnnnnnnnnnnnnnnnnnnnnnnnnnnnnnnnnnnnnnnnnnnnnnnnnnnnnnnnnnnnnnnnnnnnnnnnnnnnnnnnnnnnnnnnnnnnnnnnnnnnnnnnnnnnnnnnnnnnnnnnnnnnnnnnnnnnnnnnnnnnnnnnnnnnnnnnnnnnnnnnnnnnnnnnnnnnnnnnnnnnnnnnnnnnnnnnnnnnnnnnnnnnnnnnnnnnnnnnnnnnnnnnnnnnnnnnnnnnnnnnnnnnnnnnnnnnnnnnnnnnnnnnnnnnnnnnnnnnnnnnnnnnnnnnnnnnnnnnnnnnnnnnnnnnnnnnnnnnnnnnnnnnnnnnnnnnnnnnnnnnnnnnnnnnnnnnnnnnnnnnnnnnnnnnnnnnnnnnnnnnnnnnnnnnnnnnnnnnnnnnnnnnnnnnnnnnnnnnnnnnnnnnnnnnnnnnnnnnnnnnnnnnnnnnnnnnnnnnnnnnnnnnnnnnnnnnnnnnnnnnnnnnnnnnnnnnnnnnnnnnnnnnnnnnnnnnnnnnnnnnnnnnnnnnnnnnnnnnnnnnnnnnnnnnnnnnnnnnnnnnnnnnnnnnnnnnnnnnnnnnnnnnnnnnnnnnnnnnnnnnnnnnnnnnnnnnnnnnnnnnnnnnnnnnnnnnnnnnnnnnnnnnnnnnnnnnnnnnnnnnnnnnnnnnnnnnnnnnnnnnnnnnnnnnnnnnnnnnnnnnnnnnnnnnnnnnnnnnnnnnnnnnnnnnnnnnnnnnnnnnnnnnnnnnnnnnnnnnnnnnnnnnnnnnnnnnnnnnnnnnnnnnnnnnnnnnnnnnnnnnnnnnnnnnnnnnnnnnnnnnnnnnnnnnnnnnnnnnnnnnnnnnnnnnnnnnnnnnnnnnnnnnnnnnnnnnnnnnnnnnnnnnnnnnnnnnnnnnnnnnnnnnnnnnnnnnnnnnnnnnnnnnnnnnnnnnnnnnnnnnnnnnnnnnnnnnnnnnnnnnnnnnnnnnnnnnnnnnnnnnnnnnnnnnnnnnnnnnnnnnnnnnnnnnnnnnnnnnnnnnnnnnnnnnnnnnnnnnnnnnnnnnnnnnnnnnnnnnnnnnnnnnnnnnnnnnnnnnnnnnnnnnnnnnnnnnnnnnnnnnnnnnnnnnnnnnnnnnnnnnnnnnnnnnnnnnnnnnnnnnnnnnnnnnnnnnnnnnnnnnnnnnnnnnnnnnnnnnnnnnnnnnnnnnnnnnnnnnnnnnnnnnnnnnnnnnnnnnnnnnnnnnnnnnnnnnnnnnnnnnnnnnnnnnnnnnnnnnnnnnnnnnnnnnnnnnnnnnnnnnnnnnnnnnnnnnnnnnnnnnnnnnnnnnnnnnnnnnnnnnnnnnnnnnnnnnnnnnnnnnnnnnnnnnnnnnnnnnnnnnnnnnnnnnnnnnnnnnnnnnnnnnnnnnnnnnnnnnnnnnnnnnnnnnnnnnnnnnnnnnnnnnnnnnnnnnnnnnnnnnnnnnnnnnnnnnnnnnnnnnnnnnnnnnnnnnnnnnnnnnnnnnnnnnnnnnnnnnnnnnnnnnnnnnnnnnnnnnnnnnnnnnnnnnnnnnnnnnnnnnnnnnnnnnnnnnnnnnnnnnnnnnnnnnnnnnnnnnnnnnnnnnnnnnnnnnnnnnnnnnnnnnnnnnnnnnnnnnnnnnnnnnnnnnnnnnnnnnnnnnnnnnnnnnnnnnnnnnnnnnnnnnnnnnnnnnnnnnnnnnnnnnnnnnnnnnnnnnnnnnnnnnnnnnnnnnnnnnnnnnnnnnnnnnnnnnnnnnnnnnnnnnnnnnnnnnnnnnnnnnnnnnnnnnnnnnnnnnnnnnnnnnnnnnnnnnnnnnnnnnnnnnnnnnnnnnnnnnnnnnnnnnnnnnnnnnnnnnnnnnnnnnnnnnnnnnnnnnnnnnnnnnnnnntctcagctcactgcaactccacctcccgcgttcaagggattctcctgcctcaccctcccaagttgctaggattacagatgtgtgccaccatgctcggctaatttttatatttttagtagagacagggtttcaccatgttggccaggctggtctcgaactcctgacctcaggtgatccatccgcctctgcctcccaaagtgttgggattacagacgtgagccaccacgcccagcnnnnnnnnnnnnnnnnnnnnnnnnnnngttttaccaagaccagaagttaaagatgacatttcgtaggtagttgtaactctaacatagtttaaaaagtatgtggcttcagattgcctatactttgttcacaagcgtgtgatttagatatgactgatttagaagtgaacaacttggtaacatccctagactcccctcatcaacgcagaattattacctgctctttactctctgaaagaatttcagaaatcagagcaaatgtgtctttaggcagattcagctccttttaatatttttttcttggcccactctctttgcctgccctgaatctgtgtggtactatagcagttctactctgtgcaccatgctaggaagcttcctttttggcagagtacgtttggcagcaaagctatagagacaggtgcattcagaacagcctgggcaccagtcatgagtcttactgagtgtcaaaaatcagaaaacacttgctgagaaccaaatttattccattggaaaaaccctctgtggagctataagcctcttggactcttcttcctagattaaggcttgcatttccctccctgtttcagtaaaagatgatgaaagccgttatcaatcctcactgctgagtggcagggagaagcagcaccacccccagctcttctctaatcttgtaacttagtgctagaagtctctccaggctattaccatgggtgtttgttccctattggagctgtaagcagatgaacccaagtagagaagatagatcttggaaagagagatccactgaggcca

SEQ ID NO: 28141 - DNA, 1062 bp, Macaca Mulatta
  misc_feature (1)...(1062): n = A,T,C or G
aggctaacatcatctttgacactaatggaagggaacctgcgggactcctttgacatcatcaagcgctacatggacggcatgaccgtgggtgttgtgcgccaggtacggcccatcgtgggcccatttcatgccatcctgaagctggagatgaactatgtggtcgggggcgtggtctcccaccgaaatgttgtcaacgtccacatcttcgtctctgagtactggttctgagggctggtctgcatcacagccacgggtgcacctccaggccaaatcattgctgccagtgactgtggcctgtgcttgtttgtactctcagacttgtttaatgttaggcatttgtttgtagcattaggccaatatgtattaagctgagccagatgagtaagtccatctgacgtatttttggtgtttaaaaaatgagtccaactgctcaactgtttggttgaaaaccttgctcattttttaatgcaaaggctaagtgtcgccccctttctctgcctctgggctgggccttgctaagggccaaggaaagaaagacattttttagggggcagccagtccaaatgccaaaagaagaccaattcttgccctgattgtatgaaatttgacattttggtattttgttacctttttttttttgggcaatcagattttctgtgttctaaggacatggctgctgtagaatagcacagaagtggacgatacattctccccagaagcagcgtgaccgaatgccgtggggagcacttggaagggaaattgcagttctgttgaaatagaggaaaatcccttgctaaagacgcagcctgttaggctcgtgtggggctccagtacgttcaccaggggaatggctgggatttctcggcactctgcatcatccatcttttcttataggtggggaaataaacaactttgtgatcctcctgaatnnnnnnnnnnnnnnnggnnnnnnnnnnnnnnnnnnnnnnnnnnnnnnnnnnnnnnnnnnnnnnnnnnnnnnnnnnnnnnnnnnnnnnnnnnnnnnnnnnnnnnnnnnnnnnnnnnnnnnnnnnnnnngcgtaa

SEQ ID NO: 28142 - DNA, 126 bp, Macaca Mulatta
  misc_feature (1)...(126): n = A,T,C or G
gaccacctcagtccagggaaaacaactgaagaccaagacggtgagctctgattgcctcagttggtcatcaactattttcccttgactgctgtcctgngatggcctgctatcttgatcatagattgt

SEQ ID NO: 28143 - DNA, 363 bp, Macaca Mulatta
gaggtggtgtggtttccagtctcaaaggtattttctgactttaatgtttccaaggcatttcaccagaatacagctataaatggcagctcccaacaactgggctctgactcacccacacccacttagtgtccactaagtagttcagggtgactcagtttaagcacatctcagatgaggtcactctgcatacaccttggcttacctgaaatagcctgaacttgaatctcacataaggggaaactagtcatcaatcaccaactcattgactaccctcaggaagtcctgcagaaatcaagagtccttgaggagaacacgtggaccataccaaaaccagggtttaaatccattctgcttaagagttct

SEQ ID NO: 28144 - DNA, 1734 bp, Macaca Mulatta
  misc_feature (1)...(1734): n = A,T,C or G
agttgcagaatgccatgaccatggtagcccttttcaaggaagaaagaaaggtgggaattctttccgggataattctgacaagaggaactgtcatcatgaacatggtgggtacgagcgtccgtcttcacactgccaggagaatgatggaagcgtggagatgcgggatgtccacaaggaccaacaactaagacncactccttatagcatccgatgcgacagaagaatgaaatggcatagtgaagacgaaatctgtattaccacgtggagaaatagaaaacctccagggagaaaaatgaggcagaacacacaagatggatacacaaggaactggttcaaggtcacnnnnnnnnnnnnnnnnnnnnnnnnnnnnnnnnnnnnnnnnnnnnnnnnnnnnnnnnnnnnnnnnnnnnnnnnnnnnnnnnnnnnnnnactacatccgaaatcgggcatgcttctttgtccaggatgctactactgcctccgtattgaaggatgtcagttataagatttgtgatgacgagaaccnnngatatgtatatttgtcaatcattctactgcgccctactctgtgaagaataagttgaagccaggccaaatggagatgctnnnnnnnnnnnnnnnnnnnnnnnnnnnnnnnnnnnnnnnnnnnnnnnnnnnnnnnnnnnnnnnnnnnnnnnngacttgatgggccgtgacattgatataatcctgaatcgaagaaactgcatggctgccaccctgaagatcattgaaagaaatttccctgagnnnnnnnnnnnnnnnnnnnnnnnnnnnnnnnnnnnnnnnnnnnnnnnnnnnnnnnnnnnnnnnnnnnnnnnnnnnnnnnnnnnnnnnnnnnnnnnnnnnnnnnnnnnnnnnnnnnnnnnnnnnnnnnnnnnnnnnnnnnnnnnnnnnnnnnnnnnnnnnnnnnnnnnnnnnnnnnnnnnnnnnnnnnnnnnnnnnnnnnnnnnnnnnnnnnnnnnnnnnnnnnnnnnnnnnnnnnnnnnnnnnnnnnnnnnnnngacggccgagagttatctgcaccaatgattgttgactttgacagctctgagataatgaaaacctgcnaggaaaactttactggatctgagaccttaaagcatttagtcctgcaattcctgcagcagtngtattactcgatctatgactctggagatcgacagggtctcctcggtgcttaccacgatgaggcctgcttctccttggctattcccttcgacgccgaggactcagccccgnnnnnnnnnnnnnnnnnnnnnnnnnnnnnnnnnnnnnnnnnnnnnnnnnnnnnnnnnncctgaagggggaactgctgaggcacacaaaacgtgacattgtggactccctcagtgcgttgcccaaaactcagcatgacctcagctccatcctggtggacatgtggtgccagacggnnnnnnnnnnnnnnnnnnnnnnnnnnnnnnnnnnnnnnnnnnnnnnnnnnnnnnnnnnnnnnnnnnnnnnnnnnnnnnnnnnnnnnnnnnnnnnnnnnnnnnnnnnnnnntccagtctgtgcatcgtgaatgatgagctgtttgtgagggacgccagcccccaagagactcagagtgccttctccatcccagtgtccacactctcctccagctctgagccctccctctcccaggagcagcaggaaatggtgcaggctttctctgcccagtctgggatgaaactggagtggtctcagaagtg

SEQ ID NO: 28145 - DNA, 542 bp, Macaca Mulatta
  misc_feature (1)...(542): n = A,T,C or G
gggctcatggcgactactgcagaatcaaccccnnnnnnnnnnnnnnnnnnnnnnnnnnnnnnnnnnnnnnnnnnnnnnnnnnnnnnnnnnnnnnnnnnnnnnnnnnnnnnnnnnnnnnnnnnnnnnnnnnnnnnnnnnnnnnnnnnnnnnnnnnnnnnnnnnnnnnnnnnnnnnnnnnnnnnnnnnnnnnnnnnnnnnnnnnnnnnnnnnnnnnnnnnnnnnnnnnnnnnnnnnnnnnnnnnnnnnnnnnnnnnnnnnnnnnnnnnnnnnnnnnnnnnnnnnnnnnnnnnnnnnnnnnnnnnnnnnnnnnnnnnnnnnnnnnnnngtatacgctcaatggcaagaaagtggaagttgccgtcaaacagatcatcgctggaaaagctgtggagcaaggaggtgctttctcgaaccctgagaccctggatctgtaccgggacatccctgagctgcagggcttctgagtcggactggctggcgtgtcactcagctgtacctgtgtgtactgttccttttgtgtgctcaagaaattacatagaaac

SEQ ID NO: 28146 - DNA, 321 bp, Macaca Mulatta
acccgagagactcctcgaggactgcaggctcgacgcggagcccgcgtccaatggcctagttcatggcagcgcggaggtcatcttggccccaacgtccggtgcctttgggccgcaccagcaagacctcaggatccctttgactctccacacggtcccccctggggcccggatccagtttcagggagctccgccttcagagctgataagattgaccaaagtcccccttacaccagtgcctattaaaatgcagtccctactggagccttctgtaaaaatcgaaacgaaagatgtcccgctcaccgtgttgccctcagatgcagg

SEQ ID NO: 28147 - DNA, 1311 bp, Macaca Mulatta
  misc_feature (1)...(1311): n = A,T,C or G
gtcctgtgagcgcgtggtgtgcccgcggccacagtcgtgcgtcgtggaccagacgggcagcgcccactgcgtggtgtgtcgggcggcgccctgccctgtgccctccagccccggccaggagctttgcggtttttacaacgtcacctacatctcctcgtgccacctgcgccaggccacctgcttcctgggccgctccatcggtgtgcgccacgcgggcagctgcgcaggngcaggcacccctgaggagccgccagatggtgagtcggaggaagaggaagagaacttcgtgtgagcctgcaggacaggcctgggcctggtgcctgaggccgccccccaccccgttatttattgccacagcagagtctaatttatatcccacggacactccctagggcctggattcggaccacttggggatcccagaacccccctgnnnnnnnnnnnnnnnnnnnnnnnnnnnnnnnnnnnnnnnnnnnnnnnnnnnnnnnnnnnnnnnnnnnnnnnnnnnnnnnnnnnnnnnnnnnnnnnnnnnnnnnnnnnnnnnnnnnnnnnnnnnnnnnnnnnnnnnnnnnnnnnnnnnnnnnnnnnnnnnnnnnnnnnnnnnnnnnnnnnnnnnnnnnnnnnnnnnnnnnnnnnnnnnnnnnnnnnnnnnnnnnnnnnnnnnnnnnnnnnnnnnnnnnnnnnnnnnnnnnnnnnnctagcctgggtgagtacggagggtctagcctgggtgagtacggagggtctagcctgggtgagtacggagggtctagcctgggtgtgtaaggaaggtctagcctaggtgagtacggagggtctagcctgggtgagtacggagggtctagcctgggtgtgtaaggaaggtctagcctgggtgagtacggagggtctagcctgggtgagtacggagggtctagcctgggtgagtacggagggtctagtctgggtgtgtaaggagggtctagcctgggtgagtacggagggtctagcctgggtgagtacggagggtctagcaataagagtgtacggagggtctagtctgagtgcgtgtggggacctcagaacactgtgacctcagtccagcaagccaggcccttcatgaaggccaagaaggctgccactgttccctgccaacccaagaactccaggttccccactgcctctgtatgccccttcccatcctgcgaaggccgttgagaaatgcccagtgtgacccatgggaaagggcacggcctgtcctcctgacacgggccgtggtgcgagcaacagaactgcccagcgcctcccctgctgccgtccacggtcagttca

SEQ ID NO: 28148 - DNA, 2898 bp, Macaca Mulatta
  misc_feature (1)...(2898): n = A,T,C or G
ctgttcgtggtgaagagcccatttttgttgtcactggaaggaaataagatgttgccatggccaaaagagagatcctctcagctgcagagcacttctccatgattcgtgcatctcgaaacaaaaatgggcctgccctgggaggattgtcatgtagtcctaatctgcccggtcaaaccaccgtccaagtcagggtcccttatcgtgtggtaggattagtggttggacccaaaggagcaactattaaaagaattcagcagcagacccacacttacatagtaactccgagcagagataaggaacctgtctttgaagtgacagggatgcctgaaaatgtcgaccgagcacgggaagaaatagaaatgcatattgccatgcgtacaggaaactatatagagcttaatgaagagaatgatttccattacaatggtaccgatgtaagctttgaaggtggcactcttggctctgcgtggctctcctccaatcctgttcctcctagccgcgcgagaatgatatccaattatcgaaatgatagttccagttctctaggaagtggctnnnnnnnnnnnnnnnnnnnnnnnnnnnnnnnnnnnnnnnnnnnnnnnnnnnnnnnnnnnnnnnnnnnnnnnnnnnnnnnnnnnnnnnnnnnnnnnnnnnnnnnnnnnnnnnnnnnnnnnnnnnnnnnnnnnnnnnnnnnnnnnnnnnnnnnnnnnnnnnnnnnnnnnnnnnnnnnnnnnnnnnnnnnnnnnnnnnnnnnnnnnnnnnnnnnnnnnnnnnnnnnnnnnnnnnnnnnnnnnnnnnnnnnnnnnnnnnnnnnnnnnnnnnnnnnnnnnnnnnnnnnnnnnnnnnnnnnnnnnnnnnnnnnnnnnnnnnnnnnnnnnnnnnnnnnnnnnnnnnnnnnnnnnnnnnnnnnnnnnnnnnnnnnnnnnnnnnnnnnnnnnnnnnnnnnnnnnnnnnnnnnnnnnnnnnnnnnnnnnnnnnnnnnnnnnnnnnnnnnnnnnnnnnnnnnnnnnnnnnnnnnnnnnnnnnnnnnnnnnnnnnnnnnnnnnnnnnnnnnnnnnnnnnnnnnnnnnnnnnnnnnnnnnnnnnnnnnnnnnnnnnnnnnnnnnnnnnnnnnnnnnnnnnnnnnnnnnnnnnnnnnnnnnnnnnnnnnnnnnnnnnnnnnnnnnnnnnnnnnnnnnnnnnnnnnnnnnnnnnnnnnnnnnnnnnnnnnnnnnnnnnnnnnnnnnnnnnnnnnnnnnnnnnnnnnnnnnnnnnnnnnnnnnnnnnnnnnnnnnnnnnnnnnnnnnnnnnnnnnnnnnnnnnnnnnnnnnnnnnnnnnnnnnnnnnnnnnnnnnnnnnnnnnnnnnnnnnnnnnnnnnnnnnnnnnnnnnnnnnnnnnnnnnnnnnnnnnnnnnnnnnnnnnnnnnnnnnnnnnnnnnnnnnnnnnnnnnnnnnnnnnnnnnnnnnnnnnnnnnnnnnnnnnnnnnnnnnnnnnnnnnnnnnnnnnnnnnnnnnnnnnnnnnnntaagatttcaaaacagtgggtcccaaagcctaaccactttaagagtttatggagggtacttggcattacagacgattcatacacttccagtgctgccttctttacactgccagttttgacaaaacaggtttgtttgttttttattttacaacaacttatgcctaattctgcaggattgcaagtaactttttaatgcattgtgattacttattggtaataatagggctgatggcagtttactagatcactggttataatttgggacaaaaactgctacatcgactttcatctcgcccagagttctcaaggctggtatgatcagtggatcaggaatgctgaattcctgcccattgcctctcttggtgaatgtggaaatggccaccttggttttcccatatcaggaagggctttgggatggcacctatattggctaacaattgaggatgcgaacattccattcattagtgtgctcgagctgttagtttttagactatagatcaaaatgtgaaacattttatgttcaatccatatttgtcttgcacattataaatatnnnnnnnnnnnnnnnnnnnnnnnnnnnnnnnnnnnnnnnnnnnnnnnnnnnnnnnnnnnnnnnnnnnnnnnnnnnnnnnnnnnnnnnnnnnnnnnnnnnnnnnnnnnnnnnnnnnnnnnnnnnnnnnnnnnnnnnnnnnnnnnnnnnnnnnnnnnnnnnnnnnnnnnnnnnnnnnnnnnnnnnnnnnnnnnnnnnnnnnnnnnnnnnnnnnnnnnnnnnnnnnnnnnnnnnnnnntatactggtgggtttttctactaattattttttgaagcattattttcccaacacaaaagagcttttttctcggtataatgaaaattgaaatcctatgtgtattcaatagtaaatagacaaattttattttttatttccacttgaagagttacatttcttataaaagtttacaaataacggtttttattttgattttttcagtataaaaaaagttgccttgatggcatattatgatgtaatgctaattgcttgtaggatagtaaatgtcagtattgaaacctaatctctagctgccgtcttgtagatatgaacgaatgttcaccaagcatgtattttgtattttgttgcattgtacactgcaactaataagccaaggaatcgacatatattaggtgcgtgtactgtttctaaaaaccacaaactaagaatgataaattatcaatatagtttagtatttgctaattttactacattcttttgttatgtatatgtagggaagtcatagggattataaattcaatttgagtaaaatttaaaaccatatattttatgataaagggcctttaacttaagatggccaaagcactgatattatatatttgctgt

SEQ ID NO: 28149 - DNA, 280 bp, Macaca Mulatta
  misc_feature (1)...(280): n = A,T,C or G
ttttcatgaagtatggccggcagcggtggaaactaaaaggcaaaatagaagtaaatggcaagcagagctgggatggagaagaaacagtttttctgcccctgatagttgggttcatctccatcaaggtnnnaggtcacggagctcaaagggctggcaactcacatcctggtaggtagtgtgacctgtgagaccaaagagctgtttgcagcccgacctcaggtggtggctgtcgacatcaatgaccttggcaccatcaaactgaacctggaaatcacctggt

SEQ ID NO: 28150 - DNA, 5801 bp, Macaca Mulatta
  misc_feature (1)...(5801): n = A,T,C or G
gctgtttccagatgctggggactccctgacccatctcagcccttgccaggccaccttttcacccagggcagggggcagaggcctctgagccgcaggcctccagcagtttcccccagactgccagtggcctggtgaccccaccccacacagtgccatctctgacaccgtccactgtgtggggggtgctaccatgtagaatgtggtccagcgacagccctgcccacgtctgggtgcatcactctgttctgcagatgtggagactgaggctgctgtggcccggcagggctcgggttagtgtctggtgcgggggacactggacagggaaggaggtactgtctgggcgaccgcagaccctacgtgcacagcctggaccgggcagaggggacacgttcagaggtgtgagaagctgaacccctaggcctgggtgacagggctgtgaggggtaaagaggggtcaccatggccacccccagggtggggaacgtggagggcagtgagggtgtggtggatgtggctgcactggacgggttgggtgttgagatgcctgagggccgtagatgggtggctggatgtgatgggggtatggagcctgacaggcaccccgccggagttggatggaagcctgggaggggtcctcgtgcagctggcgtagaggggattcggcctgaacatgcaggacaggggtgcaggtgcaaaccaaggcctcagggaatagcccaggcgaggtcaggaggggcctgtaatgttaccgccggaccagcagaggtggggaaagnnnnnnnnnnnnnnnnnnnnnnnnnnnnnnnnnnnnnnnnnnnnnnnnnnnnnnnnnnnnnnnnnnnnnnnnnnnnnnnnnnnnnnnnnnnnnnnnnnnnnnnnnnnnnnnnnnnnnnnnnnnnnnnnnnnnnnnnnnnnnnnnnnnnnnnnnnnnnnnnnnnnnnnnnnnnnnnnnnnnnnnnnnnnnnnnnnnnnnnnnnnnnnnnnnnnnnnnnnnnnnnnnnnnnnnnnnnnnnnnnnnnnnnnnnnnnnnnnnnnnnnnnnnnnnnnnnnnnnnnnnnnnnnnnnnnnnnnnnnnnnnnnnnnnnnnnnnnnnnnnnnnnnnnnnnnnnnnnnnnnnnnnnnnnnnnnnnnnnnnnnnnnnnnnnnnnnnnnnnnnnnnnnnnnnnnnnnnnnnnnnnnnnnnnnnnnnnnnnnnnnnnnnnnnnnnnnnnnnnnnnnnnnnnnnnnnnnnnnnnnnnnnnnnnnnnnnnnnnnnnnnnnnnnnnnnnnnnnnnnnnnnnnnnnnnnnnnnnnnnnnnnnnnnnnnnnnnnnnnnnnnnnnnnnnnnnnnnnnnnnnnnnnnnnnnnnnnnnnnnnnnnnnnnnnnnnnnnnnnnnnnnnnnnnnnnnnnnnnnnnnnnnnnnnnnnnnnnnnnnnnnnnnnnnnnnnnnnnnnnnnnnnnnnnnnnnncgagggctgtgggcacaccggggaggccctacagggagcagtggacttcagggactgctgcccagccattgtgcctgccctgggagccctggatggcacaggagtccccgggaagctcaccacctccctggggaggacaggcctgtgctgggaagcagcctggaacctgtagctgtcaagtgctagaagtggggtggccacggaaggctgcctggaggaggtggaaggaagcctgagcactgtcccagagagcgctcctggaggcagacccgtgtgggcagctgtggcactttgcctcgggattccctctttgcttgttactctacatcctcttgtggggactgactcgggaagacccgccccgcccttctctgattttctcaaaaacgtaagcaactctttatttttatttattttaaaaaatatagtcctgggcaggaatccaacagtgcttcctggaggcttgctgggtgtgtgcccgcggtgccacatgtggtttactcacagggcccaaacagaaaatgcctctgctcggggctgggggacagtggtggcccgaggaggactgggagcctcctgcctgccctctactcccctcacttgggtttgggtcgggaatgtaagaactcgggctcttgcccaaggtcccacagcacatccagacagagtcagggttccaggccctctcccacacctcaggtttcctgcatgacacccaggacttctgtcttgtcccgcccccatctcacagcaacaccatcctaaagatgttggtcccagatagcccctgggctgtgcacccatcgcaaggaaagaactgctggctgcaacccggctctgacccagccaaaaggaagtgtagcccctgcctcagggagctcagagcccgccctgttggaggcccccacattaccctcnnnnntttgcacagctttagttcaggtgaattgttggcaggcggttcggaagagtgggtgacggtgggtctctgtntcctgagcatgtggggctctgcatcctgggggtctcctgcatcccaggagatcccgttctgggggaagaaaatagcgcctcaagagctgtctgggtttctggaaggcttcctggaggaaggggaacttgaacaggccaggaccttgccaggtttcctgtgctgcatgcagctcactggccatggtggacactgcctgggcatgggtcatcgccaccaaacctctctctggcccagagaagtgacccagggtcccggggccacacaaccattttggggaaagcaggtctggtcttgggcatggcactgctgactgggcctcagccatcccaccctagcgctgcggaggggcaggagtgagggccctggtcacctgcgccaccaagggccagctccgtgatagacagcctgggtgctgatgggcgctctttataccggggtcctttaaaccacccccagtgcactggccaggttctggggtcaacgactcctccagccaccacctgggatttacctgagacgggcactggtggagtctgaggaacggcgccgggccagaatggctcagggtcagagtccctaactctggggcgccgtggtctccagtgannnnnnnnnnnnnnnnnnnnnnnnnnnnnnnnnnnnnnnnnnnnnnnnnnnnnnnnnnnnnnnnnnnnnnnnnnnnnnnnnnnnnnnnnnnnnnnnnnnnnnnnnnnnnnnnnnnnnnnnnnnnnnnnnnnnnnnnnnnnnnnnnnnnnnnnnnnnnnnnnnnnnnnnnnnnnnnnnnnnnnnnnnnnnnnnnnnnnnnnnnnnnnnnnnnnnnnnnnnnnnnnnnnnnnnnnnnnnnnnnnnnnnnnnnnnnnnnnnnnnnnnnnnnnnnnnnnnnnnnnnnnnnnnnnnnnnnnnnnnnnnnnnnnnnnnnnnnnnnnnnnnnnnnnnnnnnnnnnnnnnnnnnnnnnnnnnnnnnnnnnnnnnnnnnnnnnnnnnnnnnnnnnnnnnnnnnnnnnnnnnnnnnnnnnnnnnnnnnnnnnnnnnnnnnnnnnnnnnnnnnnnnnnnnnnnnnnnnnnnnnnnnnnnnnnnnnnnnnnnnnnnnnnnnnnnnnnnnnnnnnnnnnnnnnnnnnnnnnnnnnnnnnnnnnnnnnnnnnnnnnnnnnnnnnnnnnnnnnnnnnnnnnnnnnnnnnnnnnnnnnnnnnnnnnnnnnnnnnnnnnnnnnnnnnnnnnnnnnnnnnnnnnnnnnnnnnnnnnnnnnnnnnnnnnnnnnnnnnnnnnnnnnnnnnnnnnnnnnnnnnnnnnnnnnnnnnnnnnnnnnnnnnnnnnnnnnnnnnnnnnnnnnnnnnnnnnnnnnnnnnnnnnnnnnnnnnnnnnnnnnnnnnnnnnnnnnnnnnnnnnnnnnnnnnnnnnnnnnnnnnnnnnnnnnnnnnnnnnnnnnnnnnnnnnnnnnnnnnnnnnnnnnnnnnnnnnnnnnnnnnnnnnnnnnnnnnnnnnnnnnnnnnnnnnnnnnnnnnnnnnnnnnnnnnnnnnnnnnnnnnnnnnnnnnnnnnnnnnnnnnnnccaccgacagcgcggccgaggaggaggaggaggccgaggcggcggccttcccgccgggcttccagcacgaggccttccccagctacgcgggctcactgcccacgtccagctcctactccagcttcagcgccacgtcggaggagaaggagcacgcgcaggccagcacgctgaccgcgtcgcagcaggccatctacctgaacagccgcgacgagctcttcgagcgcaagccgcccgccgccacctatgagggctgccctcgctttgccaaggccacggccgcggtggcggccccgctggaggccgaagtggccccaggcttcgggcggaccatgtcaccgtacccggccgagaccttccgcttcccggcctctccgggtccccagcaggccctgatgcccccaaacctgtggagcctgcgggccaagccggggaccgcccggctccccggggaggacatgaggagccagtggcggcccctgagtgtggaggacattggcgcctactcctacccagtgagcgctgccggccgtgcctcaccctgcagcttctctgaacgctactacggcagggtcgggggcagnnnnnnnnnnnnnnnnnnnnnnnnnnnnnnnnnnnnnnnnnnnnnnnnnnnnnnnnnnnnnnnnnnnnnnnnnnnnnnnnnnnnnnnnnnnnnnnnnnnnnnnnnnnnnnnnnnnnnnnnnnnnnnnnnnnnnnnnnnnnnnnnnnnnnnnnnnnnnnnnnnnnnnnnnnnnnnnnnnnnnnnnnnnnnnnnnnnnnnnnnnnnnnnnnnnnnnnnnnnnnnnnnnnnnnnnnnnnnnnnnnnnnnnnnnnnnnnnnnnnnnnnnnnnnnnnnnnnnnnnnnnnnnnnnnnnnnnnnnnnnnnnnnnnnnnnnnnnnnnnnnnnnnnnnnnnnnnnnnnnnnnnnnnnnnnnnnnnnnnnnnnnnnnnnnnnnnnnnnnnnnnnnnnnnnnnnnnnnnnnnnnnnnnnnnnnnnnnnnnnnnnnnnnnnnnnnnnnnnnnnnnnnnnnnnnnnnnnnnnnnnnnnnnnnnnnnnnnnnnnnnnnnnnnnnnnnnnnnnnnnnnnnnnnnnnnnnnnnnnnnnnnnnnnnnnnnnnnnnnnnnnnnnnnnnnnnnnnnnnnnnnnnnnnnnnnnnnnnnnnnnnnnnnnnnnnnnnnnnnnnnnnnnnnnnnnnnnnnnnnnnnnnnnnnnnnnnnnnnnnnnnnnnnnnnnnnnnnnnnnnnnnnnnnnnnnnnnnnnnnnnnnnnnnnnnnnnnnnnnnnnnnnnttttatagagaaaaagggtctttcttaacgcacttggcctccagctccctggacggctgccttggcgttttcaacacaaagctcctttattttttgggtgagggtgcgtggggcctgccccttggaagggaagggaaggacggtgtcctgtggagaccagactctgcaagtaggaagtggcaagaccacccccgccagccagtgacaagggaaccctgaagtgtccacaaagagggagctgaaacgagttcggggctatgaagtgttttaaaaatccatttttcgcagtgtggccaccacactgccctgagccctcccacggcccatagtccctggtgggccgggatgatgccccagtgcggccggtgctcatctccgccccccgggtccgccccctgacaccgtctactctacctcagacatgatgaggccctccactcctggtttctgtagcttgcattcctgtcgtctctgatgcatgccctgtcagttagtactgtattttgcattcattaataaaaga

SEQ ID NO: 28151 - DNA, 733 bp, Macaca Mulatta
  misc_feature (1)...(733): n = A,T,C or G
ctttgatgaaaagtactctattgattctatcttgggagtgcaaatttgatcatattgaagttcgtgatggaccttttggcttttctccaataattggacgtttctgtggacaacaaaatccacctgtaataaaatccagtggaagatttctatggattaaattttttgctgatggagagctggaatctatgggattttcagctcgatacaatttcacacctnnnnnnnnnnnnnnnnnnnnnnnnnnnnnnnnnnnnnnnnnnnnnnnnnnnnnnnnnnnnnnnnnnnnnnnnnnnnnnnnnnnnnnnnnnnnnnnnnnnnnnnnnnnnnnnnnnnnnnnnnnnnnnnnnnnnnnnnnnnnnnnnnnnnnnnnnnnnnnnnnnnnnnnnnagatttacttgcgcttcttggactatgagatgcagaattcaaatgaatgcaagaggaattttgtggctgtatatgatggaagcagttccgtggaggatttgaaagctaagttctgtagcactgtggctaatgatgtgatgctacgcacgggtcttggggtgatccgcatgtgggcagatgagggcagccgaaacagccgatttcagatgctcttcacatcctttcaagaactccttgtgaaggcaatacattcttctgccatagtaacatgtgtattaataacactttggtctgcaatggactccagaactgtgtgtatccttgggatgaaaatcactgtaaa

SEQ ID NO: 28152 - DNA, 644 bp, Macaca Mulatta
gaggcctccctgcgccggctgctcgttcctgtgtgccgctgtcgtgatgctggggagcgctgagactcgcaggcgggacttctgaactgctggggagtcggggggcaggcagacagcgcggacggtgggcaccggcccggccgccaccttgctcacaatctggccacttgggaagaaaacgtctattttttccccttctctgcatcacttttttggtttttgttctttttattcttttattttttttaacccgtgatcttttttcccgtgtccaagtgactgtgttgcaggcggcccggctctggcagggactggtggggacgcggggagcggcccaggcccctgccccgccgggcttagcctcccatgcgctcgcgcttgcctgtgtcccgggcttgtctgtgaagtgggcgtgaagatcgttgccaccttccaacctacctcacaggggtgttgtggggacaccatgatctctggattgttcatgttgttgtgctgcgccgggagtcgccgccctccggagacagggcagctcccctccgaccctagcgcctccaccctccgcggcccccgttcctctcttcctgctctgtccctccttctccatcagggagcagcgtgacttcagcgagtcccgcgagcac

SEQ ID NO: 28153 - DNA, 3571 bp, Macaca Mulatta
  misc_feature (1)...(3571): n = A,T,C or G
attgaaggccaaggacatggcgcagtatttgactgcaaatgctctcctgatggtcagcattttgcttgcaccgactctcatggacatcttttaatttttggctttgggtccagtagcaaatatgacaagnnnnnnnnnnnnnnnnnnnnnnnnnnnnnnnnnnnnnnnnnnnnnnnnnnnnnnnnnnnnnnnnnnnnnnnnnnnnnnnnnnnnnnnnnnnnnnnnnnnnnnnnnnnnnnnnnnnnnnnnnnnnnnnnnnnnnnnnnnnnnnnnnnnnnnnnnnnnnnnnnnnnnnnnnnnnnnnnnnnnnnnnnnnnnnnnnnnnnnnnnnnnnnnnnnnnnnnnnnnnnnnnnnnnnnnnnnnnnnnnnnnnnnnnnnnnnnnnnnnnnnnnnnnnnnnnnnnnnnnnnnnnnnnnnnnnnnnnnnnnnnnnnnnnnnnnnnnnnnnnnnnnnnnnnnnnnnnnnnnnnnnnnnnnnnnnnnnnnnnnnnnnnnnnnnnnnnnnnnnnnnnnnnnnnnnnnnnnnnnnnnnnnnnnnnnnnnnnnnnnnnnnnnnnnnnnnnnnnnnnnnnnnnnnnnnnnnnnnnnnnnnnnnnnnnnnnnnnnnnnnnnnnnnnnnnnnnnnnnnnnnnnnnnnnnnnnnnnnnnnnnnnnnnnnnnnnnnnnnnnnnnnnnnnnnnnnnnnnnnnnnnnnnnnnnnnnnnnnnnnnnnnnnnnnnnnnnnnnnnnnnnnnnnnnnnnnnnnnnnnnnnnnnnnnnnnnnnnnnnnnnnnnnnnnnnnnnnnnnnnnnnnnnnnnnnnnnnnnnnnnnnnnnnnnnnnnnnnnnnnnnnnnnnnnnnnnnnnnnnnnnnnnnnnnnnnnnnnnnnnnnnnnnnnnnnnnnnnnnnnnnnnnnnnnnnnnnnnnnnnnnnnnnnnnnnnnnnnnnnnnnnnnnnnnnnnnnnnnnnnnnnnnnnnnnnnnnnnnnnnnnnnnnnnnnnnnnnnnnnnnnnnnnnnnnnnnnnnnnnnnnnnnnnnnnnnnnnnnnnnnnnnnnnnnnnnnnnnnnnnnnnnnnnnnnnnnnnnnnnnnnnnnnnnnnnnnnnnnnnnnnnnnnnnnnnnnnnnnnnnnnnnnnnnnnnnnnnnnnnnnnnnnnnnnnnnnnnnnnnnnnnnnnnnnnnnnnnnnnnnnnnnnnnnnnnnnnnnnnnnnnnnnnnnnnnnnnnnnnnnnnnnnnnnnnnnnnnnnnnnnnnnnnnnnnnnnnnnnnnnnnnnnnnnnnnnnnnnnnnnnnnnnnnnnnnnnnnnnnnnnnnnnnnnnnnnnnnnnnnnnnnnnnnnnnnnnnnnnnnnnnnnnnnnnnnnnnnnnnnnnnnnnnnnnnnnnnnnnnnnnnnnnnnnnnnnnnnnnnnnnnnnnnnnnnnnnnnnnnnnnnnnnnnnnnnnnnnnnnnnnnnnnnnnnnnnnnnnnnnnnnnnnnnnnnnnnnnnnnnnnnnnnnnnnnnnnnnnnnnnnnnnnnnnnnnnnnnnnnnnnnnnnnnnnnnnnnnnnnnnnnnnnnnnnnnnnnnnnnnnnnnnnnnnnnnnnnnnnnnnnnnnnnnnnnnnnnnnnnnnnnnnnnnnnnnnnnnnnnnnnnnnnnnnnnnnnnnnnnnnnnnnnnnnnnnnnnnnnnnnnnnnnnnnnnnnnnnnnnnnnnnnnnnnnnaggtgaccgcttcaggtctgtcatagatgatgcctggtggtttggaacaattgaannnnnnnnnnnnnnnnnnnnnnnnnnnnnnnnnnnnnnnnnnnnnnnnnnnnnnnnnnnnnnnnnnnnnnnnnnnnnnnnnnnnnnnnnnnnnnnnnnnnnnnnnnnnnnnnnnnnnnnnnnnnnnnnnnnnnnnnnnnnnnnnnnnnnnnnnnnnnnnnnnnnnnnnnnnnnnnnnnnnnnnnnnnnnnnnnnnnnnnnnnnnnnnnnnnnnnnnnnnnnnnnnnnnnnnnnnnnnnnnnnnnnnnnnnnnnnnnnnnnnnnnnnnnnnnnntagatattgcctcagcatttgtggcccctgtggatctgcaagcctatcccatgtattgcacagtagtggcatatccaaaggatctaagtacaattaaacaaagactggaaaacaggttttacagnnnnnnnnnnnnnnnnnnnnnnnnnnnnnnnnnnnnnnnnnnnnnnnnnnnnnnnnnnnnnnnnnnnnnnnnnnnnnnnnnnnnnnnnnnnnnnnnnnnnnnnnnnnnnnnnnnnnnnnnnnnnnnnnnnnnnnnnnnnnnnnnnnnnnnnnnnnnnnnnnnnnnnnnnnnnnnnnnnnnnnnnnnnnnnnnnnnnnnnnnnnnnnnnnnnnnnnnnnnnnnnnnnnnnnnnnnnnnnnnnnnnnnnnnnnnnnnnnnnnnnnnnnnnnnnnnnnnnnnnnnnnnnnnnnnnnnnnnnnnnnnnnnnnnnnnnnnnnnnnnnnnnnnnnnnnnnnnnnnnnnnnnnnnnnnnnnnnnnnnnnnnnnnnnnnnnnnnnnnnnnnnnnnnnnnnnnnnnnnnnnnnnnnnnnnnnnnnnnnnnnnnnnnnnnnnnnnnnnnnnnnnnnnnnnnnnnnnnnnnnnnnnnnnnnnnnnnnnnnnnnnnnnnnnnnnnnnnnnnnnnnnnnnnnnnnnnnnnnnnnnnnnnnnnnnnnnnnnnnnnnnnnnnnnnnnnnnnnnnnnnnnnnnnnnnnnnnnnnnnnnnnnnnnnnnnnnnnnnnnnnnnnnnnnnnnnnnnnnnnnnnnnnnnnnnnnnnnnnnnnnnnnnnnnnnnnnnnnnnnnnnnnnnnnnnnnnnnnnnnnnnnnnnnnnnnnnnnnnnnnnnnnnnnnnnnnnnnnnnnnnnnnnnnnnnnnnnnnnnnnnnnnnnnnnnnnnnnnnnnnnnnnnnnnnnnnnnnnnnnnnnnnnnnnnnnnnnnnnnnnnnnnnnnnnnnnnnnnnnnnnnnnnnnnnnnnnnnnnnnnnnnnnnnnnnnnnnnnnnnnnnnnnnnnnnnnnnnnnnnnnnnnnnnnnnnnnnnnnnnnnnnnnnnnnnnnnnnnnnnnnnnnnnnnnnnnnnnnnnnnnnnnnnnnnnnnnnnnnnnnnnnnnnnnnnnnnnnnnnnnnnnnnnnnnnnnnnnnnnnnnnnnnnnnnnnnnnnnnnnnnnnnnnnnnnnnnnnnnnnnnnnnnnnnnnnnnnnnnnnnnnnnnnnnnnnnnnnnnnnnnnnnnnnnnnnnnnnnnnnnnnnnnnnnnnnnnnnnnnnnnnnnnnnnnnnnnnnnnnnnnnnnnnnnnnnnnnnnnnnnnnnnnnnnaggagattgtaagaacaacgctcttgtaccaggaaccattcaagtaaatggccatggaggacagccatcaaaacttgtgaagaggggacctggaaggaaacctaaagtagaagttaacaccaatagtggtgaaattatacacaagaaaaggggtagaaagcccaaaaagctacagtatgcaaagccagaaaatttagagcaaaataatgtgcatcccatcagagatgaagtacttccttcttcaacatgcaattttctttctgaaactaat

SEQ ID NO: 28154 - DNA, 505 bp, Macaca Mulatta
ggaattcttttcaacatcaaaaagtgcaatttgtctggaaggcaacacgatttcttcaataaattggaaaagaactgacctattagttgtcataataatgattttataactcatatgaaataaaatcagaatgtaaaatatggataagggggcagaatttaattctgtgctgataacactccccctgcccccagcacccactttctatcagagaagatgtctgtgaatgttacccaaaatgtgagtccaccaccccaacccatcgcggcttcagccacaagccaaatatggatgtcttgtacatcatgggtttgagctgggtctcttctgtggctcagagagacgtgtgggtgacggggtatcctcagccatagaaagctaacgttatccaaaataaaacctagaagtcaaattctaggcatcaagggtcagatcagcaatgtcaagaagaaatgaagcttctgtgatggggtcgagatgaatctatcattcagtaaatccacac

SEQ ID NO: 28155 - DNA, 281 bp, Macaca Mulatta
aggcttattcagtcaccatgaagctgctgcacccggccttccagagctttctcctgctgaccctgcttggcttatggagaaccacccctgaggcgcacgcttcgtccccgggtgcgccagctatcagcgctgcctccttcctgcaggatctaatgcatcgctatggcgagggtgacagcctcactctgcagcagctgaaggccctgctcaaccacctggatgtgggagtgggccggggtaatgtcacccagcacgtgcagggacacaggaacctctccacg

SEQ ID NO: 28156 - DNA, 1075 bp, Macaca Mulatta
atcgcaactcggcaaggaaagccggctgttggggttctggaaacgccctgtcctgagggcctgagactttccgtatgaagccttggatcgcgccccatggaaagggacaccaaagatttccagttccggagagcgggcccgaggaagggtcactgctctggcgcacggaagctgcctaaggcttgggcgtatatggggaactctggcttccgccacgcacttttgggaatgggcaggagacctgcctcctctctccaaaggttgcattttcccaagcttgaacgcttcatgtacctactctgcaggactgaggagtttgctgtgtggtgtgaaaaccttaggggtggggatcgggtgcctttgccacttgtgtgacaggcttaaccgttttgtatgaagttcgtttgccttatcaaccttactgtttgatagtttactgtgtctaatttctcccccgtactttttaaaccagtctctagtgatccctgaaaagtccagcatattttgcgagtactcaacaccaatatcgatgggcggcggaaaatagcctttgccatcactgccattaagggtgtgggccgaagatatgctcatgtggtgttgaggaaagcagacattgacctcaccaagagggcgggagaactcactgaggatgaggtggaacgtgtgatcaccattatgcagaatccacgccagtacaagatcccagactggttcttgaacagacagaaggatgtaaaggatggaaaatatagccaggtcctagccaatggtctggacaacaagctccgtgaagacctggagcgactgaagaagattcgggcccatagagggctgcgccacttctggggccttcgtgtccgaggccagcacaccaagaccactggccgccgtggccgcaccgtgggtgtgtccaagaagaaataagtctgtaggccttgtctgttaataaatagtttatatatctaaaaacaggaagaccagctcctcctactgtcttctgtgctaaggatcaattccttgttgagtgggacctgagtctcgagaggatcttctgctcctcttcatctgatcc

SEQ ID NO: 28157 - DNA, 199 bp, Macaca Mulatta
gttcatccagtggaacacctacaagagtggcctcaaggtatccgagtacagcctgccctcagacgccacgggcccctttgtgctatctggatacagcggctacaagcaggttcaagtccccaggggccgactcttcgcttttgactcggagggcaattacatgctgacatgttctgccacaggcggcatcatctacaag

SEQ ID NO: 28158 - DNA, 951 bp, Macaca Mulatta
  misc_feature (1)...(951): n = A,T,C or G
gggggtcctgggggcggggctgtaggggaaagtgctaaagccgctgagtgaagtaagaactctgctagagaggaaatggctgcttcatcatcatcctcttcagctggtggggtcagtggaagttctgtcactggatctggtttcagtgtctcagaccttgccccaccacggaaagcccttttcacctaccccaaagtagctggagagatgttagaagatggctctgagagattcctctgcgaatctgtttttagctatcaagtggcatccacgcttaaacaggtgaaacatgatcagcaagttgctcggatggaaaaactagctggtttggtagaagagctggaggctgacgagtggcggtttaagcccatcgagcagctgctgggattcaccccatcttcaggttgatgctgcctggatggtcgcctctggtgcgcagcaagtgcaaagccagtgggggactttctcacagcttgcatagccatccagagatccacagctacatcgctgaattgttaatgcacatttgtacttggtttctctgtatctattcacaggcaacaaatacttatatgtatgatctttcagggaatannnnnnnnnnnnnnnnnnngtattgggaatcagattaagacggtcggtttcagagaaccagggaggtttgggggttaagagatacttaaaaaattttcacaagccaggtagggcatatatcagaatttggcaaactgaattggcatctgttcctgttcatccatacggtgcctggaaatattcaccagtcaaggtcaaggtcagcatctgtggttaaaaatacagcattctgacctaaaaaattatttttgcatatgaaatgtgatttcaaactcagggagctattccaaatgagggattaaatatttcattttttttttcctaattttttagaacatccaatttctataagattca

SEQ ID NO: 28159 - DNA, 1023 bp, Macaca Mulatta
  misc_feature (1)...(1023): n = A,T,C or G
ggcacgaggccgntcggtgaacccaagaagggaaataacggctattagtcacaactatgagccaggccctgaactgtctcttagataataaaacagatggggaatggaagtcatttgcttcaagttacacagctaggaaatactcaagccaaatcttgaacccagctccccctaattctgtggacaagcactttgtaccacacactgtggtccacctaaaaacagaaggataaaaaggcttcaggtttcccactgtgcgctgaccatcccaatttatgaatctttttcaaaatgacagttatagttagggctcagaaatggcattgaggtagccttatttctcccctttagccgatgctttaagtacacattgctgacttgagcccacccccaggagttgggagaacatttcccttttcatgccgtcttccataaataaagtgtttcttggccttcaaaggtatagaactttgcagcagtagtaaaagtgaagggtgttctgctttctactcaactttatttgcaactctctgcagcttcactgctgtagaaaaggaaatcttcatattttagtaaacttagcggccagtgtgctctgtgaggatgtggcaatacaaagtccagtgaatctggactctcctactgattcctggtttgcgtgtgttgggttagtgtgtacctatatataaatgacaagtgtgatatgtgtgtatatgtatatacgtacatgtccacacacacacacaatatttgagaacaaaggaaaactcaaagcagccccttcattatcttgcatactacttcaaagatttctgtcagccctaattacaagtgtcaccatatagttggggcttaggtacttgcttacttgcttacaagaagagcaattccctagcaaaagttgttagctcctaaggcactgagtcaaagtgaacagccctgaaggaaattgcactccagccctcctccaagatgtctaattaacatgggaaacttggatgcccaggccatttgggtgacctg

SEQ ID NO: 28160 - DNA, 110 bp, Macaca Mulatta
aggctttatgtgcacccagattctcctttcactggggaacaactactcaaacagatggtgtcttttgaaaaggtgaaactcaccaacaatgaactggatcaacatggcca

SEQ ID NO: 28161 - DNA, 322 bp, Macaca Mulatta
  misc_feature (1)...(322): n = A,T,C or G
gggttagatcctcattcacaggactagttagctttaagcaccctagaggactagggtgacctgacttctcacttcctaagttcccttctgtatcctcaaggtagaaatgtctgtgttttccactccagttcataaatctattcataaatctttggtacaagtttacatgataaaaagaaatgtgatttatcttcccttctttgcatttttgaaataaagtatttatctcttgtctacannnnnnnnnnnnnnnnnnnnnnnnnnnnnnnnnnnnnnnnnnnnnnnnnnnnnnnnnnnnnnnnnnnnnnnnnnnnnnnnnnnc

SEQ ID NO: 28162 - DNA, 460 bp, Macaca Mulatta
gtcactctgaaatgctttcctgatactattcttgcatctgagggaatagtaaaataggatatgttttataggactttatttgttcttttcttgggtaatggaattggaaaatattctgagcatgttatgtcactttggctgttatgaaaatgaagccatcacggctgacctttcccaaattttaaacttgttataaaatgtgtctggcccttcacacatctgtttcttaggaattttccacttttgtgaagatatggctcctcttttcacccaggcactagatatccaggaagttgaagccctttcagaaattttaggaaaaacatatgacatttctctctccttacataataattaacacacttgctttcttgtccttccagaatataacccacacttcttttctccccaaacacatacagatgttcagtgacaaaataagtgtcacctcagttctctc

SEQ ID NO: 28163 - DNA, 238 bp, Macaca Mulatta
ctctgccaggctcacgagacagctgcacctctcagcttctccagctctgggatgcggtcgtcccagctccctccgagtggaaagagtgcaaaacttttgttcgtgcgcgggtggggctcagtagtaccacggcgcgtcctgccccggcttccccagcctcccagcagggttagctgcggtcagagcactttccacttgcgacggccagccagaaacttctcgggaatggagcagtcac

SEQ ID NO: 28164 - DNA, 639 bp, Macaca Mulatta
  misc_feature (1)...(639): n = A,T,C or G
gccggactatgacatgatccagtactatcagaatgacatcccctactgaggaggggacctccaaggccctccggcccatgtgcccttgaagctgccccacaatcatggagccctgtgacctccccgccctgccaccacatgcagtggacagacctgtggccggaagagcctggtagcgcctcctggggcagcacgtgggtggcgcagccttggtaacgccatggactgcagtgacaatcattggatggtgctgtctatgcacaggtgtgagtcctctgtttgcactggacatattccctacctgtcttatttcataggtacatgaagtattttcttgtgtataaaaaaaagatacaagatttaaccaacatcaacaaaataaaaacccaaaatagnnnnnnnnnnnnnnnnnnnnnnnnnnnnnnnnnnnnnnnnnnnnnnnnnnnnnnnnnnnnnnnnnnnnnnnnnnnnnnnnnnnnnnnnnnnnnnnnnnnnnnnnnnnnnnnnnnnnnnnnnnnnnnnnnnnnnnnnnnnnnnnnnnnnnnnnnnnnnnnnnnnnnnnnnnnnnnnnnnnnnnnnnnnnnnnnnnnnnnnnnnnnnnnnnnnnnnnnnnnnnnnnnnnnnnnnnnnnnnnnnnnn

SEQ ID NO: 28165 - DNA, 824 bp, Macaca Mulatta
ctcatattgcaaatgttgatgaaatgaagcattacttgtgtggcggctgcgcagccttcaacaacgtcgcaatcacatttcccattcagaaggtcttctttagacaacagctgtatggcatcaaaacacgggatgcaatacttcagttgagaagggatggatttcgaaacttgtatcctggaatccttcccctattaatgcagacgacgactacacttgcacttatgtttggtctctatgaggatttatcctgccttctccacaagcatgtcagtgctccagagtttgcaacctattgcgtggcggcagtgcttgcaggaacagcagaagcaattttcactcccctggaaatagttcagacattgcttcgagaccacaagcatcatgacaaattcaccaacacttatcagaccttcaaggcactgaaatataatggaattggaaagtattatccaggcctggtgcccattcttttcctgaatgaactcagtaatgtcttgtttgaggcctttgaggtcccattaaggagcatctgcctaccgaaatgactcacagtgctcatttggtcaatgattttatctgtgaaggtctattgggtgccatgttgggattcttatttttttccaattaatgttgcaaaaactcgcatacagtctcagattcgtggggaatttcagtctttcccaaggttttccaaaaaatctggctggaacgggacagaaaactgataaatcttttcagaggtgcccatctgaattaccatcggtcccttatttcttgggacataatcagtgcaacttaagagttcttgttaaaggttatat

SEQ ID NO: 28166 - DNA, 342 bp, Macaca Mulatta
gttcaagcgattctcctgccttggcctccagagtagctgggacttacaagcgtgtgccaccacgccccgctaatttttgtatttttggtagagacagggtatcaccatgttggccaggctggtctcgaactcttgacctcaaatgattcccccaccttggcctcccaatatgctgggattacaggtgtgagccaccgcaccgagcctaatattttattttaatttttcaaaaatagaaatgggctctcactgtgttggctaggctggtctcaaactcctggccttaagcaatcctcccacctcgacctccaaaagtgctgggattaccactcccggcttaat

SEQ ID NO: 28167 - DNA, 1400 bp, Macaca Mulatta
  misc_feature (1)...(1400): n = A,T,C or G
ttgtaaaacacagggtatatttattgagtggcgcattcaaagctgagaggcagtaagttgataactgacaccgtaggtaaccaatttggttgagttcagacctcaaactccaacctgccttctgtgggttgtgatccccatgtcaggtccgttttcagtcttcgtggtgctattcagctatgttccgtgtgcgccacccagtggccagtctcggcgtggctgaaggtctatccccgtgttcaggtctaacatctctggcgtgcttagggtcggatccacgcatgcgcaactcggggaggcgcccaggaacaaacttacggagctgttttctccaaattcctccctgtctgtgagctccctagtcctttccagatcgctgggttccctttttcggtcctctggccaaaaacttggtgttgtagttaccctgctctgccgtgcacttcctacaactgcacccacagtagcggccaagcagcgaagatttaagagagtaagaaagcgtgacggtttgttccacgcttgggctacagctcctctagtcagaaaaggaaggttccctgtatgcctcactttatatgaaacctaaaaaagttgaactcgtagaagtagcatgtagaaagaggttggggccgaggaggaagggaatggggagttactagtcgaaaggtacagtttcagataggtaggaggaatgttttgaaatctattgcatagctgagcgactatagtcaataataatgtattgcatatttcaaaatcactaaaaggctaaatttcaaatgtctaccataaaaacgataggtaaaagaagtgcatttaatttttcttttaccacttttcttactctgttatcttcagctcaggagtatctaacctgcaaagatcttacttcattaaggcttcaactttcgacttaannnnnnnnnnnnnnnnnnnnnnnnnnnnnnnnnnnnnnnnnnnnnnnnnnnnnnnnnnnnnnnnnnnnnnnnnnnnnnnnnnnnnnnnnnnnnnnnnnnnnnnnnnnnnnnnnnnnnnnnnnnnnnnnnnnnnnnnnnnnnnnnnaaaagccaaagtaaagttaactgcatttgagcagcatgggcagccctgccagccagagtaactgaagctggaagaattactccctatacacagggctcgtgttctccagatcaaccagacacatcacagactctgttgttgaggttctttcatttccttagggcagttagctcttggcaagtagccagagctgtacattaactgctcctacatcttaaaaatcattgcttattaatttctatgcattaacttagataaatgtaattctagttcccatcttagaggaatggtctcttcttgatgcctttgtgttctaaatattttatcatgtcaac

SEQ ID NO: 28168 - DNA, 176 bp, Macaca Mulatta
  misc_feature (1)...(176): n = A,T,C or G
aggattcagggagcttccagcatgatgtggctgcaaagcccgaggaagtcttcagaacagcacagaaactagaggcagaggcgtgccctgaggaagaactcccagaagcagnagatgacctggatggactcctgagtgagcttcctgaggaattcttctgtgggaccagtagttga

SEQ ID NO: 28169 - DNA, 1400 bp, Macaca Mulatta
  misc_feature (1)...(1400): n = A,T,C or G
aaccacaatggacactgccagccatagccttgttcttctccaacaactgaacatgcagcgagaatttggttttctgtgtgattgcacannnnnnnnnnnnnnnnnnnnnnnnnnnnnnnnnnnnnnnnnnnnnnnnnnnnnnnnnnnnnnnnnnnnnnnnnnnnnnnnnnnnnnnnnnnnnnnnnnnnnnnnnnnnnnnnnnnnnnnnnnnnnnnnnnnnnnnnnnnnnnnnnnnnnnnnnnnnnnnnnnnnnnnnnnnnnnnnnnnnnnnnnnnnnnnnnnnnnnnnnnnnnnnnnnnnnnnnnnnnnnnnnnnnnnnnnnnnnnnnnnnnnnnnnnnnnnnnnnnnnnnnnnnnnnnnnnnnnnnnnnnnnnnnnnnnnnnnnnnnnnnnnnnnnnnnnnnnnnnnnnnnnnnnnnnnnnnnnnnnnnnnnnnnnnnnnnnnnnnnnnnnnnnnnnnnnnnnnnnnnnnnnnnnnnnnnnnnnnnnnnnnnnnnnnnnnnnnnnnnnnnnnnnnnnnnnnnnnnnnnnnnnnnnnnnnnnnnnnnnnnnnnnnnnnnnnnnnnnnnnnnnnnnnnnnnnnnnnnnnnnnnnnnnnnnnnnnnnnnnnnnnnnnnnnnnnnnnnnnnnnnnnnnnnnnnnnnnnnnnnnnnnnnnnnnnnnnnnnnnnnnnnnnnnnnnnnnnnnnnnnnnnnnnnnnnnnnnnnnnnnnnnnnnnnnnnnnnnnnnnnnnnnnnnnnnnnnnnnnnnnnnnnnnnnnnnnnnnnnnnnnnnnnnnnnnnnnnnnnnnnnnnnnnnnnnnnnnnnnnnnnnnnnnnnnnnnnnnnnnnnnnnnnnnnnnnnnnnnnnnnnnnnnnnnnnnnnnnnnnnnnnnnnnnnnnnnnnnnnnnnnnnnnnnnnnnnnnnnnnnnnnnnnnnnnnnnnnnnnnnnnnnnnnnnnnnnnnnnnnnnnnnnnnnnnnnnnnnnnnnnnnnnnnnnnnnnnnnnnnnnnnnnnnnnnnnnnnnnnnnnnnnnnnnnnnnnnnnnnnnnnnnnnnnnnnnnnnnnnnnnnnnnnnnnnnnnnnnnnnnnnnnnnnnnnnnnnnnnnnnnnnnnnnnnnnnnnnnnnnnnnnnnnnnnnnnnnnnnnnnnnnnnnnnnnnnnnnnnnnnnnnnnnnttggtaatggcattggcccagagatttcagccatactgtgacactggtctgatgtctccctgaaaagttctcgcttgtcacaagaacacttagacttgccttgtgccttagagtcagagcttacacaagaaaatgtggatgctatcctagttgagtagcagcttctctttcagaatttttataccaattctgaaaaagaaaattcgcatggcattttttattcataaattattttcctcctcaa

SEQ ID NO: 28170 - DNA, 1024 bp, Macaca Mulatta
  misc_feature (1)...(1024): n = A,T,C or G
atgattctgtttattgggaggtactgtacagtattctaaacaagaatgtgaatgatggcttcattagtgaaagctttactcacttcaagcctagatatctgtgtggcatatgtgtgatgaaattgaattagcctggcgtggtagctcacacatgtaatctcagcgctttgggtggccgaagctggaggattgtttgatgccaggagttcaggaccagcctgggcaactctctacnnnnnnnnnnnnnnnnnnnnnnnnnnnnnnnctttccatgggatgtcaagtgtaaaagaaaaatcaataaataaaaaggaactgaatgaactacctatatatagagagaaattgagatgatgtgcccagccagataaaatcagaagttatggtattttctaaagcagaggttagataaagaaagaaagaatttagttagcaaatgttgtttcatcctctgagagccataaaaaagctattcataaaaataatatgaattatcagaaatagtgtgagattttataccatatatggtccacaggtttatttnnnnnnnnnnnnnnnnnnnnaacataattataaactatgccataggtaaaagtagtcaaaagcaagtgaaatacataaggttgaagaatttgagtgagtacacatcaaaagtgagtacacatcaaaatgaataacaaaatatcagcctctttctatcctccagtttctctttactctattgatacttttccccaaattatttcctgcaaagcttgagaaggatagatgtttgggtgttctcagcaaaatttcagggagaattagtttgcaaaagcaggaatgtagtcagggtgggtgagatnnnnnnnnnnnnnnnnnnnnncttcaactcaaaaaatttttattcccagttctttccaagcttgaataataattaccaaaaatatttttatttcaatactaacttctgacaaacacagtgaaataaactattaagtgcccccaaacttgtttttttaaaggtacctatattgagagaacc

SEQ ID NO: 28171 - DNA, 151 bp, Macaca Mulatta
  misc_feature (1)...(151): n = A,T,C or G
tggagcagacaccaatgcctatcatatttggaagcgggacgctggtgacagtattgcggcaaatggcagatgaggnnnnnnnnnnnnnnnnnnnnnnnnnnnnnnnnnnnnnaccaccacggcactcaccatattcgaagcagggatcaag

SEQ ID NO: 28172 - DNA, 1549 bp, Macaca Mulatta
  misc_feature (1)...(1549): n = A,T,C or G
tggaatcaccagaggagcctggagcatccatggatgagaactactttgtgaactatactttcaaagatcggtcacactcaggccgtgtggctcaaggcatcatgaaactgtgtctagaggaggagctctttgctgatgtcaccatttcggtggaaggccgggagtttcagctccatcggctggtcctctcagctcagagctgcttcttccgatccatgttcacttctaacctgaaggaggcccacaaccgggtgattgtgctgcaggatgtcagtgagtctgttttccagctcctggttgattatatctaccatgggactgtgaaacttcgagctgaggagttgcaggacatttatgaggtgtcagacatgtatcagttgacatctctctttgaggaatgctctcggattttggcccgcacagtggcagtgggaaactgccttcaggtgatgtggctggcagatcggcacagtgatcctgagctctatactgctgccaacactgtgccaggaccacctggccagctgcaaatacagagaaatttctcannnnnnnnnnnnnnnnnnnnnnnnnnnnnnnnnnnnnnnnnnnnnnnnnnnnnnnnnnnnnnnnnnnnnnnnnnnnnnnnnnnnnnnnnnnnnnnnnnnnnnnnnnnnnnnnnnnnnnnnnnnnnnnnnnnnnnnnnnnnnnnnnnnnnnnnnnnnnnnnnnnnnnnnnnnnnnnnnnnnnnnnnnnnnnnnnnnnnnnnnnnnnnnnnnnnnnnnnnnnnnnnnnnnnnnnnnnnnnnnnnnnnnnnnnnnnnnnnnnnnnnnnnnnnnnnnnnnnnnnnnnnnnnnnnnnnnnnnnnnnnnnnnnnnnnnnnnnnnnnnnnnnnnnnnnnnnnnnnnnnnnnnnnnnnnnnnnnnnnnnnnnnnnnnnnnnnnnnnnnnnnnnnnnnnnnnnnnnnnnnnnnnnnnnnnnnnnnnnnnnnnnnnnnnnnnnnnnnnnnnnnnnnnnnnnnnnnnnnnnnnnnnnnnnnnnnnnnnnnnnnnnnnnnnnnnnnnnnnnnnnnnnnnnnnnnnnnnnnnnnnnnnnnnnnnnnnnnnnnnnnnnnnnnnnnnnnnnnnnnnnnnnnnnnnnnnnnnnnnnnnnnnnnnnnnnnnnnnnnnnnnnnnnnnnnnnnnnnnnnnnnnnnnnnnnnnnnnnnnnnnnnnnnnnnnnnnnnnnnnnnnnnnnnnnnnnnnnnnnnnnnnnnnnnnnnnnnnnnnnnnnnnnnnnnnnnnnnnnnnnnnnnnnnnnnnnnnnnnnnnnnnnnnnnnnnnnnnnnnnnnnnnnnnnnnnnnnnnnnnnnnnnnnnnnnnnnnnnnnnnnnnnnnnnnnnnnnnnnnnnnnnnnnnnnnnnnnnnnnnnnnnnnnnnnnnnnnnnnnnnnnnnnnnnnnnnnnnnnnnnnnnnnnnnnnnnnnnnnnnaagggggatcccaactcgttctagcttgacctaggcacttcatctgtaactgtcacatgaggtattaagggtgcaacttaccaatttgcagtttgtgctgg

SEQ ID NO: 28173 - DNA, 155 bp, Macaca Mulatta
ggtatattcctatttaccagccttggggaaaactggtgtgcttgggtcgggaaagattcagatatcaaagaaaataggacagcggccttgttttgactctcagagagccttactaatgttgaatggtactaaacaaaaacaagtcgaagggctgc

SEQ ID NO: 28174 - DNA, 743 bp, Macaca Mulatta
  misc_feature (1)...(743): n = A,T,C or G
gggttgacatagcctttgggnnnnnnnnnnnnnnnnnnnnnnnnnnnnnnnnnntattgtccatactgtaaataagtgtatgcttatttatttggggggaaaactatacattaaaggacctttgtcctaaagctctctcccaggccaccttgttactcattggacacggagaggcattcattgtgaggtctactggatgaggcccatagttgagacttgtagacatttatttatactgtgtcatgttttataatttatacataaaatgtctggttgactgtataccttgtttttgaagaaatttattcgtgaaaggaagagcagttgttatttattgtgaggtctcttgcttgtaaagtaaaagctttttttccttgtaaaccatttaagtccattccttactattcactcatctgtctcccttcatttcactgttagactcttttccactttcaacaaacttgcatgtcagtttctgtcatgtttatttattggattctctgctgcctgatctgtacatacatgatccctcgggttttgtttacaaggaaccttgactgaccaaaaggcattataactcttactcaaatacaaggtacagaggataagcatctttgaggaaactcctacttcagttcttttgttatgagagacatgtgagaagaagataaatcagatgacttatagtaaaacagatgatgggtcgaactagatgagcacatcactttgtagtgtctacagcc

SEQ ID NO: 28175 - DNA, 390 bp, Macaca Mulatta
aaaagaaactcagacccgtacaaaaaaaggatgaaaaaatagtgataacagatctccgttaatgcaatattgagcatatcttcctttatttttcaaaccacttacaacaatgctcttattctggccctgtaataatccacgtagcagggaaggtattgctatttccatttacaggtgaataagcgatgaaaataagctaatacacacctcccaatagtcagatgcttgagaagtccctagcacagtgtccagtcaagcaatgaaacaagtttctatccttccttactggagtgagttgccaattcagcatttaactggagagtcccatttcattgcagatgttcatttctagaacatccagtcctttaaagcaatgtttctagtttggga

SEQ ID NO: 28176 - DNA, 577 bp, Macaca Mulatta
  misc_feature (1)...(577): n = A,T,C or G
gagcatcagcataggcagaggaaccaggaagagaggatgaagattcagggactgaagtgggagaaggcacagatgaatgggcccaatccaaagccacagttagaccccctgaccagctggagttgactgatgcgnnnnnnnnnnnnnnnnnnnnnnnnnnnnnnnnnnnnnnnnnnnnnnnnnnnnnnnnnnnnnnnnnnnnnnnnnnnnnnnnnnnnnnnnnnnnnnnnnnnnnnnnnnnnnnnnnnnnnnnnnnnnnnnnnnnnnnnnnnnnnnnnnnnnnnnnnnnnnnnnnnnnnnnnnnnnnnnnnnnnnnnnnnnnnnnnnnnnnnnnnnnnnngttctcaggagtctgccaaggtgatttcagaaacagaaaacctcgaagaagatgaagagcccaaggagttagaaactgagtctggcagtcaaacagatgtgcctgcagctggggnggcagctgaaaaagtgaccgaagaagaattgatgactcctaagcagcccaaggagcgaaagctcactaaccagttcaacttcagtgagagggcctcacagaccttcaacaaccctctccggg

SEQ ID NO: 28177 - DNA, 377 bp, Macaca Mulatta
gagccagttctggactcgagaggccagtccctccgctgcctggggccttggagtgggtcctgcccggaaacttccttgagcctctgcagcctgggaagggcaatccggcccgactgcccaggtcttgctagcccctgcctctcagaggctttgtgtggcgccaggcagctaccccctccctggggtggcacccgctctctgctccccaccagggactggcccttgccctcgagtcttggagtcaggcaggctctggcccagctctgggaactgattagtaagacgcttctgtgcctggagggggctgggtgccagacctcgtgcactgccccagaccagggcgtggtccttagtcctaagcctgggaagccattagt

SEQ ID NO: 28178 - DNA, 2082 bp, Macaca Mulatta
  misc_feature (1)...(2082): n = A,T,C or G
aggtgagctccacctgacacctttacatggcatcctgcagctgcggcccagcttctcctacctggataaggctgacgccaagcaccgggagagggaggcagccaacgagnnnnnnnnnnnnnnnnnnnnnnnnnnnnnnnnnnnnnnnnnnnnnnnnnnnnnnnnnnnnnnnnnnnnnnnnnnnnnaggcccgccagcgccgtgtgcagtcctacgagttcctgcagaagaagcatgcggaggagccctgggtccatctgcattactatggcctgagggnnnnnnnnnnnnnnnnnnnnnnnnnnnnnnnnnnnnnnnnnnnnnnnnnnnnnnnnnnnnnnnnnnnnnnnnnnnnnnnnnnnnnnnnnnnnnnnnnnnnnnnnnnnnnnnnnnnnnnnnnnnnnnnnnnnnnnnnnnnnnnnnnnnnnnnnnnnnnnnnnnnnnnnnnnnnnnnnnnnnnnnnnnnnnnnnnnnnnnnnnnnnnnnnnnnnnnnnnnnnnnnnnnnnnnnnnnnnnnnnnnnnnnnnnnnnnnnnnnnnnnnnnnnnnnnnnnnnnnnnnnnnnnnnnnnnnnnnnnnnnnnnnnnnnnnnnnnnnnnnnnnnnnnnnnnnnnnnnnnnnnnnnnnnnnnnnnnnnnnnnnnnnnnnnnnnnnnnnnnnnnnnnnnnnnnnnnnnnnnnnnnnnnnnnnnnnnnnnnnnnnnnnnnnnnnnnnnnnnnnnnnnnnnnnnnnnnnnnnnnnnnnnnnnnnnnnnnnnnnnnnnnnnnnngcgccgaggagtgaaggacttcctggagcacatggctgtggtgaggatcaacaaaggctgggagttcattctgccttacgacggggagttcatcaagaagcacccagatgtggtccagcggcagcacatgctgtggacgggtatccaggccaannnnnnnnnnnnnnnnnnnnnnnnnnnnnnnnnnnnnnnnnnnnnnnnnnnnnnnnnnnnnnnnnnnnnnnnnnnnnnnnnnnnnnnnnnnnnnnnnnnnnnnnnnnnnnnnnnnnnnnnnnnnnnnnnnnnnnnnnnnnnnnnnnnnnnnnnnnnnnnnnnnnnnnnnnnnnnnnnnnnnnnnnnnnnnnnnnnnnnnnnnnnnnnnnnnnnnnnnnnnnnnnnnnnnnnnnnnnnnnnnnnnnnnnnnnnnnnnnnnnnnnnnnnnnnnnnnnnnnnnnnnnnnnnnnnnnnnnnnnnnnnnnnnnnnnnnnnnnnnnnnnnnnnnnnnnnnnnnnnnnnnnnnnnnnnnnnnnnnnnnnnnnnnnnnnnnnnnnnnnnnnnnnnnnnnnnnnnnnnnnnnnnnnnnnnnnnnnnnnnnnnnnnnnnnnnnnnnnnnnnnnnnnnnnnnnnnnnnnnnnnnnnnnnnnnnnnnnnnnnnnnnnnnnnnnnnnnnnnnnnnnnnnnnnnnnnnnnnnnnnnnnnnnnnnnnnnnnnnnnnnnnnnnnnnnnnnnnnnnnnnnnnnnnnnnnnnnnnnnnnnnnnnnnnnnnnnnnnnnnnnnnnnnnnnnnnnnnnnnnnnnnnnnnnnnnnnnnnnnnnnnnnnnnnnnnnnnnnnnnnnnnnnnnnnnnnnnnnnnnnnnnnnnnnnnnnnnnnnnnnnnnnnnnnnnnnnnnnnnnnnnnnnnnnnnnnnnnnnnnnnnnnnnnnnnnnnnnnnnnnnnnnnnnnnnnnnnnnnnnnnggactgctgtgtaagctatggtggcatgtggtaccttaaaggcacagtacaatcttgacaatagtggcaaaccactaacccagcaaatctaagcccaaggaagaagggcggaaccagaagtagagcctcgacttgcttgagacgacacagagcaagaggaactgaccatctcatggcctgtggcattgcatggtgcagtggacagaagggattatcctcagccagtggcagcgtcagcttaagttagatcactcccagaagagaccagctgggaccttctttgcagtactatttgaaattcctgatgtattttgcttattatttggtttcattctcataataaagagagtgtatactgacatgggcaggatgataaaaa

SEQ ID NO: 28179 - DNA, 120 bp, Macaca Mulatta
ctggtgcccgtgccccagagcgctcacggagacttctacgtcggggatgcctacctggtgctgcatacggccaagacgagccgaggcttcacctaccgcctgcacttctggctcggtaag

SEQ ID NO: 28180 - DNA, 5507 bp, Macaca Mulatta
  misc_feature (1)...(5507): n = A,T,C or G
gatgtctttacggaaaaccctgatgagaaatccatcatcacctatgtggtggcgttttaccactacttctccaagatgaaggtgctggcagtggagggcaagcgtgtcggcaaggtnnnnnnnnnnnnnnnnnnnnnnnnnnnnnnnnnnnnnnnnnnnnnnnnnnnnnnnnnnnnnnnnnnnnnnnnnnnnnnnnnnnnnnnnnnnnnnnnnnnnnnnnnnnnnnnnnnnnnnnnnnnnnnnnncgtccagcagcagctgcaggccttcagcacctaccgcactgtggagaagccacccaagnnnnnnnnnnnnnnnnnnnnnnnnnnnnnnnnnnnnnnnnnnnnnnnnnnnnnnnnnnnnnnnnnnnnnnnnnnnnnnnnnnnnnnnnnnnnnnnnnnnnnnnnnnnnnnnnnnnnnnnnnnnnnnnnnnnnnnnnnnnnnnnnnnnnnnnnnnnnnnnnnnnnnnnnnnnnnnnnnnnnnnnnnnnnnnnnnnnnnnnnnnnnnnnnnnnnnnnnnnnnnnnnnnnnnnnnnnnnnnnnnnnnnnnnnnnnnnnnnnnnnnnnnnnnnnnnnnnnnnnnnnnnnnnnnnnnnnnnnnnnnnnnnnnnnnnnnnnnnnnnnnnnnnnnnnnnnnnnnnnnnnnnnnnnnnnnnnnnnnnnnnnnnnnnnnnnnnnnnnnnnnnnnnnnnnnnnnnnnnnnnnnnnnnnnnnnnnnnnnnnnnnnnnnnnnnnnnnnnnnnnnnnnnnnnnnnnnnnnnnnnnnnnnnnnnnnnnnnngctgctgcggtcccggcgccagaggcttgagaccacccttgcactgcagaagctcttccaggacatgctgcacagcattgactggatggatgagatcaaggnnnnnnnnnnnnnnnnnnnnnnnnnnnnnnnnnnnnnnnnnnnnnnnnnnnnnnnnnnnnnnnnnnnnnnnnnnnnnnnnnnnnnnnnnnnnnnnnnnnnnnnnnnnnnnnnnnnnnnnnnnnnnnnnnnnnnnnnnnnnnnnnnnnnagggtaccagccttgtgacccccaggtcatccaggaccgcatcagccacctggagcagtgctttgaggagctgagcaacatggcagctgggcggaaggcccaactggagcagtctaaacgactctggaagttcttctgggagatgaatgaggccgagagctggatcaaggagaaggagcagatctattcttccctggactgtggcaaagacctgaccagtgtgctcatcctacagcgcaagcacaaggcttttgaggacgagctccgtgggctggatgcccacctggagcagatcttccaggaggctcatggcatggttgcgcgcaagcagtttgggcacccgcagatcgaggcccgcatcaaggaggtgtcggctcaatgggaccagctgaaggagctggctgccttccgcaagaagaacctccaggatgctgagaactttttccagttccagggcgatgcagatgacctgaaggtttggctgcaagacgcccaccggctgctctctggtgaagatgtagggcaggacgaaggggccacgcgggccctggggaaaaagcacaaggacttcctggaggagctggaggagagccgtggggtgatggagcacctggagcagcaggcccagggattaggggaagagtttcgggattccccagacgtgacccannnnnnnnnnnnnnnnnnnnnnnnnnnnnnnnnnnnnnnnnnnnnnnnnnnnnnnnnnnnnnnnnnnnnnnnnnnnnnnnnnnnnnnnnnnnnnnnnnnnnnnnnnnnnnnnnnnnnnnnnnnnnnnnnnnnnnnnnnnnnnnnnnnnnnnnnnnnnnnnnnnnnnnnnnnnnnnnnnnnnnnnnnnnnnnnnnnnnnnnnnnnnnnnnnnnnnnnnnnnnnnnnnnnnnnnnnnnnnnnnnnnnnnnnnnnnnnnnnnnnnnnnnnnnnnnnnnnnnnnnnnnnnnnnnnnnnnnnnnnnnnnnnnnnnnnnnnnnnnnnnnnnnnnnnnnnnnnnnnnnnnnnnnnnnnnnnnnnnnnnnnnnnnnnnnnnnnnnnnnnnnnnnnnnnnnnnnnnnnnnnnnnnnnnnnnnnnnnnnnnnnnnnnnnnnnnnnnnnnnnnnnnnnnnnnnnnnnnnnnnnnnnnnnnnnnnnnnnnnnnnnnnnnnnnnnnnnnnnnnnnnnnnnnnnnnnnnnnnnnnnnnnnnnnnnnnnnnnnnnnnnnnnnnnnnnnnnnnnnnnnnnnnnnnnnnnnnnnnnnnnnnnnnnnnnnnnnnnnnnnnnnnnnnnnnnnnnnnnnnnnnnnnnnnnnnnnnnnnnnnnnnnnnnnnnnnnnnnnnnnnnnnnnnnnnnnnnnnnnnnnnnnnnnnnnnnnnnnnnnnnnnnnnnnnnnnnnnnnnnnnnnnnnnnnnnnnnnnnnnnnnnnnnnnnnnnnnnnnnnnnnnnnnnnnnnnnnnnnnnnnnnnnnnnnnnnnnnnnnnnnnnnnnnnnnnnnnnnnnnnnnnnnnnnnnnnnnnnnnnnnnnnnnnnnnnnnnnnnnnnnnnnnnnnnnnnnnnnnnnnnnnnnnnnnnnnnnnnnnnnnnnnnnnnnnnnnnnnnnnnnnnnnnnnnnnnnnnnnnnnnnnnnnnnnnnnnnnnnnnnnnnnnnnnnnnnnnnnnnnnnnnnnnnnnnnnnnnnnnnnnnnnnnnnnnnnnnnnnnnnnnnnnnnnnnnnnnnnnnnnnnnnnnnnnnnnnnnnnnnnnnnnnnnnnnnnnnnnnnnnnnnnnnnnnnnnnnaggaatacactctggctcacttggagcccccagactccctggaagctgcagaggctgggatccggaagtttgaggatttcttggggtctatggagaacaaccgggataaggtcttgagtcctgtggactctggaaacaagctggtagctgagggaaacctgtactcagacaagatcaaggagaaggtgcagctgattgaggacaggncaggcacaggaagaacaatgagaaggccgaggaggcctctgtcctcctgagagacaacctggagctacagaacttcctccagaactgccaggagnnnnnnnnnnnnnnnnnnnnnnnnnnnnnnnnnnnnnnnnnnnnnnnnnnnnnnnnnnnnnnnnnnnnnnnnnnnnnnnnnnnnnnnnnnnnnnnnnnnnnnnnnnnnnnnnnnnnnnnnnnnnnnnnnnnnnnnnnnnnnnnnnnnnnnnnnnnnnnnnnnnnnnnnnnnnnnnnnnnnnnnnnnnnnnnnnnnnnnnnnnnnnnnnnnnnnnnnnnnnnnnnnnnnnnnnnnnnnnnnnnnnnnnnnnnnnnnnnnnnnnnnnnnnnnnnnnnnnnnnnnnnnnnnnnnnnnnnnnnnnnnnnnnnnnnnnnnnnnnnnnnnnnnnnnnnnnnnnnnnnnnnnnnnnnnnnnnnnnnnnnnnnnnnnnnnnnnnnnnnnnnnnnnnnnnnnnnnnnnnnnnnnnnnnnnnnnnnnnnnnnnnnnnnnnnnnnnnnnnnnnnnnnnnnnnnnnnnnnnnnnnnnnnnnnnnnnnnnnnnnnnnnnnnnnnnnnnnnnnnnnnnnnnnnnnnnnnnnnnnnnnnnnnnnnnnnnnnnnnnnnnnnnnnnnnnnnnnnnnnnnnnnnnnnnnnnnnnnnnnnnnnnnnnnnnnnnnnnnnnnnnnnnnnnnnnnnnnnnnnnnnnnnnnnnnnnnnnnnnnnnnnnnnnnnnnnnnnnnnnnnnnnnnnnnnnnnnnnnnnnnnnnnnnnnnnnnnnnnnnnnnnnnnnnnnnnnnnnnnnnnnnnnnnnnnnnnnnnnnnnnnnnnnnnnnnnnnnnnnnnnnnnnnnnnnnnnnnnnnnnnnnnnnnnnnnnnnnnnnnnnnnnnnnnnnnnnnnnnnnnnnnnnnnnnnnnnnnnnnnnnnnnnnnnnnnnnnnnnnnnnnnnnnnnnnnnnnnnnnnnnnnnnnnnnnnnnnnnnnnnnnnnnnnnnnnnnnnnnnnnnnnnnnnnnnnnnnnnnnnnnnnnnnnnnnnnnnnnnnnnnnnnnnnnnnnnnnnnnnnnnnnnnnnnnnnnnnnnnnnnnnnnnnnnnnnnnnnnnnnnnnnnnnnnnnnnnnnnnnnnnnnnnnnnnnnnnnnnnnnnnnnnnnnnnnnnnnnnnnnnnnnnnnnnnnnnnnnnnnnnnnnnnnnnnnnnnnnnnnnnnnnnnnnnnnnnnnnnnnnnnnnnnnnnnnnnnnnnnnnnnnnnnnnnnnnnnnnnnnnnnnnnnnnnnnnnnnnnnnnnnnnnnnnnnnnnnnnnnnnnnnnnnnnnnnnnnnnnnnnnnnnnnnnnnnnnnnnnnnnnnnnnnnnnnnnnnnnnnnnnnnnnnnnnnnnnnnnnnnnnnnnnnnnnnnnnnnnnnnnnnnnnnnnnnnnnnnnnnnnnnnnnnnnnnnnnnnnnnnnnnnnnnnnnnnnnnnnnnnnnnnnnnnnnnnnnnnnnnnnnnnnnnnnnnnnnnnnnnnnnnnnnnnnnnnnnnnnnnnnnnnnnnnnnnnnnnnnnnnnnnnnnnnnnnnnnnnnnnnnnnnnnnnnnnnnnnnnnnnnnnnnnnnnnnnnnnnnnnnnnnnnnnnnnnnnnnnnnnnnnnnnnnnnnnnnnnnnnnnnnnnnnnnnnnnnnnnnnnnnnnnnnnnnnnnnnnnnnnnnnnnnnnnnnnnnnnnnnnnnnnnnnnnnnnnnnnnnnnnnnnnnnnnnnnnnnnnnnnnnnnnnnnnnnnnnnnnnnnnnnnnnnnnnnnnnnnnnnnnnnnnnnnnnnnnnnnnnnnnnnnnnnnnnnnnnnnnnnnnnnnnnnnnnnnnnnnnnnnnnnnnnnnnnnnnnnnnnnnnnnnnnnnnnnnnnnnnnnnnnnnnnnnnnnnnnnnnnnnnnnnnnnnnnnnnnnnnnnnnnnnnnnnnnnnnnnnnnnnnnnnnnnnnnnnnnnnnnnnnnnnnnnnnnnnnnnnnnnnnnnnnnnnnnnnnnnnnnnnnnnnnnnnnnnnnnnnnnnnnnagggatgtctcctctgtggaattgctcatgaagtatcaccagggcatcaatgcagagattgaaacccggagcaagaacttcagtgcctgcctggagcttggcgagtccctgctgcagcggcagcaccaggcctcaaaggannnnnnnnnnnnnnnnnnnnnnnnnnnnnnnnnnnnnnnnnnnnnnnnnnnnnnnnnnnnnnnnnnnnnnnnnnnnnnnnnnnnnnnnnnnnnnnnnnnnnnnnnnnnnnnnnnnnnnnnnnnnnnnnnnnnnnnnnnnnnnnnnnnnnnnnnnnnnnnnnnnnnnnnnnnnnnnnnnnnnnnnnnnnnnnnnnnnnnnnnnnnnnnnnnnnnnnnnnnnnnnnnnnnnnnnnnnnnnnnnnnnnnnnnnnnnnnnnnnnnnnnnnnnnnnnnnnnnnnnnngcttgagctgaaagaacgccagattgcagagagacccgcagaggagactgg

SEQ ID NO: 28181 - DNA, 780 bp, Macaca Mulatta
  misc_feature (1)...(780): n = A,T,C or G
cgaggcgcggggtttctacacaggncgggagaagcggtggtctctgaggaatagtggggctggcggtggttccaactgcgggacaggcagtggccgtagcggcttgttggataagtggaagatagatgataagcctgtaaaaattgacaagtgggatggatcagctgtgaaaaactctttggatgattctgccaaacaggtacttctggaaaaatacaaatacgtggagaatctaggtctaatcgatggtcgcctcaccatctgtacaatctcctgtttctttgccatagtggctttgatctgggattatatgcacccctttccagagtcgaaacccgttttggctttgtgcgtcatatcctattctgtgatgctggggattctgaccatttatacctcatataaagcgaagagcatctttctcgtggcccacaggacagatcctacaggcatggatcctgatgatatttggcagctgtcctccagtcttacaaggtttgatgacaaatacaccttgaagctgaccttcatcagtgggagaacaaagcagcagcgggaagctgagttcaccaagtccattgctaagtatctagagcacagtgggacactggtcatggatgcctatgaagcctgacatatccacgctccatgaccagtctcgccgcagaaagcacaatacaatagaccactctaacaagtagcctctttctgctggatcttgcagaattactgccatggggcgagcgacatcaaagaacttaaagtgtcagtagactgtta

SEQ ID NO: 28182 - DNA, 95 bp, Macaca Mulatta
tggtgcagctgagctccaaggagaagatctggacccaggagatgctcctgcaggtgaacgaccagtcactgcggctgctggacatcgagtctcag

SEQ ID NO: 28183 - DNA, 309 bp, Macaca Mulatta
  misc_feature (1)...(309): n = A,T,C or G
tggcttaagtggcgtcgtgcccaccatgcactttactattgctgagggctttgtcaaggccacctcagtgggccagatgggctggttcttcctcatggctgtgatgtacatcactggagctggcctttatgctgctcgaattcctgagcgcttctttcctggaaaatttgacatatggngttccagtctcatcagattttccatgtcctggtggtggcagcagcctttgtccacttctatggggtctccaaccttcaggaattccgttacggcctggaaggcggctgtactgatgacacccttctctga

SEQ ID NO: 28184 - DNA, 3292 bp, Macaca Mulatta
  misc_feature (1)...(3292): n = A,T,C or G
atgaccgagtgcttcctgccccccaccagcagccccagtgaacaccacaggatggagcatggcagcagatttacccagacccccagctctgaagagatcagtcctactaagtttcctggactgtaccgcactggcgagccttcacctccccacgacatcctccatgagcctcctgatatagtgtctgatgatgnnnnnnnnnnnnnnnnnnnnnnnnnnnnnnnnnnnnnnnnnnnnnnnnnnnnnnnnnnnnnnnnnnnnnnnnnnnnnnnnnnnnnnnnnnnnnnnnnnnnnnnnnnnnnnnnnnnnnnnnnnnnnnnnnnnnnnnnnnnnnnnnnnnnnnnnnnnnnnnnnnnnnnnnnnnnnnnnnnnnnnnnnnnnnnnnnnnnnnnnnnnnnnnnnnnnnnnnnnnnnnnnnnnnnnnnnnnnnnnnnnnnnnnnnnnnnnnnnnnnnnnnnnnnnnnnnnnnnnnnnnnnnnnnnnnnnnnnnnnnnnnnnnnnnnnnnnnnnnnnnnnnnnnnnnnnnnnnnnnnnnnnnnnnnnnnnnnnnnnnnnnnnnnnnnnnnnnnnnnnnnnnnnnnnnnnnnnnnnnnnnnnnnnnnnnnnnnnnnnnnnnnnnnnnnnnnnnnnnnnnnnnnnnnnnnnnnnnnnnnnnnnnnnnnnnnnnnnnnnnnnnnnnnnnnnnnnnnnnnnnnnnnnnnnnnnnnnnnnnnnnnnnnnnnnnnnnnnnnnnnnnnnnnnnnnnnnnnnnnnnnnnnnnnnnnnnnnnnnnnnnnnnnnnnnnnnnnnnnnnnnnnnnnnnnnnnnnnnnnnnnnnnnnnnnnnnnnnnnnnnnnnnnnnnnnnnnnnnnnnnnnnnnnnnnnnnnnnnnnnnnnnnnnnnnnnnnnnnnnnnnnnnnnnnnnnnnnnnnnnnnnnnnnnnnnnnnnnnnnnnnnnnnnnnnnnnnnnnnnnnnnnnnnnnnnnnnnnnnnnnnnnnnnnnnnnnnnnnnnnnnnnnnnnnnnnnnnnnnnnnnnnnnnnnnnnnnnnnnnnnnnnnnnnnnnnnnnnnnnnnnnnnnnnnnnnnnnnnnnnnnnnnnnnnnnnnnnnnnnnnnnnnnnnnnnnnnnnnnnnnnnnnnnnnnnnnnnnnnnnnnnnnnnnnnnnnnnnnnnnnnnnnnnnnnnnnnnnnnnnnnnnnnnnnnnnnnnnnnnnnnnnnnnnnnnnnnnnnnnnnnnnnnnnnnnnnnnnnnnnnnnnnnnnnnnnnnnnnnnnnnnnnnnnnnnnnnnnnnnnnnnnnnnnnnnnnnnnnnnnnnnnnnnnnnnnnnnnnnnnnnnnnnnnnnnnnnnnnnnnnnnnnnnnnnnnnnnnnnnnnnnnnnnnnnnnnnnnnnnnnnnnnnnnnnnnnnnnnnnnnnnnnnnnnnnnnnnnnnnnnnnnnnnnnnnnnnnnnnnnnnnnnnnnnnnnnnnnnnnnnnnnnnnnnnnnnnnnnnnnnnnnnnnnnnnnnnnnnnnnnnnnnnnnnnnnnnnnnnnnnnnnnnnnnnnnnnnnnnnnnnnnnnnnnnnnnnnnnnnnnnnnnnnnnnnnnnnnnnnnnnnnnnnnnnnnnnnnnnnnnnnnnnnnnnnnnnnnnnnnnnnnnnnnnnnnnnnnnnnnnnnnnnnnnnnnnnnnnnnnnnnnnnnnnnnnnnnnnnnnnnnnnnnnnnnnnnnnnnnnnnnnnnnnataaagaacaatcatttgaatcaagcaattcatgaggagcgcgaggcgatcatcgagctgcgagtgcagctgcggctgctccagatgcagcgggccaaggccgagcagcaggcacaggaggaccaggagcctgagtggcgcgggggtgccgtccagccgcccagagacggcgtcctcgagctgaaagcagctaaagagcagccaaaggcaggcaaggagccggcgaagccatcgcccagcagggacaggaaggagacgtccatctgagcagcctgcgcggccgtctggagtccgcgagactgaaaggacccgtgcatcttactgtaacccgggggccaggccggctctcccgctgtacattctgtaaaggtgtcttctcttctcagactcttcctctgtcacacgtctgactcatgcgcgtcaggctcaggttccatgggaggacgaannnnnnnnnnnnnnnnnnnnnnnnnnnnnnnnnnnnnnnnnnnnnnnnnnnnnnnnnnnnnnnnnnnnnnnnnnnnnnnnnnnnnnnnnnnnnnnnnnnnnnnnnnnnnnnnnnnnnnnnnnnnnnnnnnnnnnnnnnnnnnnnnnnnnnnnnnnnnnnnnnnnnnnnnnnnnnnnnnnnnnnnnnnnnnnnnnnnnnnnnnnnnnnnnnnnnnnnnnnnnnnnnnnnnnnnnnnnnnnnnnnnnnnnnnnnnnnnnnnnnnnnnnnnnnnnnnnnnnnnnnnnnnnnnnnnnnnnnnnnnnnnnnnnnnnnnnnnnnnnnnnnnnnnnnnnnnnnnnnnnnnnnnnnnnnnnnnnnnnnnnnnnnnnnnnnnnnnnnnnnnnnnnnnnnnnnnnnnnnnncagtccataagcccgagtcaccaggacggcctatctggccacagacgggctgcctgtggagcccgcccacnnnnnnngggcagcgcaggcctgcggggaggaggccgcccgttcccgcgggttcctcactgcggggaccagcaaaggccttctcactgggttggtcaaaggtagtcaccttggcctggtgcatccacagaggatgttgctcaaaccagaaatcttttgaacgactgaccttccttaaaaactgaatgactctgattgcttgcttgggctagaatgtacacgtctccttgcctgaataagccatatatatgctcttaaacaaaagtttgaaattatccatatcgtctcagtgaacctactggtggactgactcccaattgacaagattgagcaatagaaaaaaattcctttcctttgaatggtaactgtgattcgccccaccctattttcttgtctctggtccatccaatgagacatgagacggatgctctgatgctctgaggcttctgggaggccgggccctggaggcacgtgctgcaggtgcactctgtcagagtgaatagcaccgtgagacaggccaggctcgtggctcggaagacaaaccccacacacactcaaggggacgaaaacaaaccccacacgagggctctctcctcctcctcctaggtagtatttattttcagcacctgtttgatgcagtttttaatcctgtacatattgcactgttgtgact

SEQ ID NO: 28185 - DNA, 519 bp, Macaca Mulatta
gcttttccttgcaggagcggcagctacggggcgcagtgccctgggcgttcgacccgcccggctcggacaccaacaccaacggcccctgagagccccctggctttcccttccagttccgggagagcggctgccccactcaggtccgcccgaccaggaccagccccgctcctcccctcttgagatggtgccttcccacatctgtccagaggctgcaaggattcagcattattccaccagaaaggagcaaaacgcctgtttccctctgtatgcctgttgcctctggcctgggtccgcctaaatctggaaggcccctcccagcagcggtaccccagggcctactgctacccgcttcctgtttcttaggcaaaggttagattccccttacctctctcaggagtatcttacctgtaaattctaatctctaaatcaagtatttattattgaagatttactgtaagagactgtgccagatgttacgagaactactaaagtgcctaacccagcccatgtggattacaa

SEQ ID NO: 28186 - DNA, 1757 bp, Macaca Mulatta
  misc_feature (1)...(1757): n = A,T,C or G
gcctgttaggcctgttacattaaatatgaacatggctatgccttcatggnnnnnnnnnnnnnnnnnnnnnnnnnnnnnnnnnnnnnnnnnnnnnnnnnnnnnnnnnnnnnnnnnnnnntaaaagctttgattgatcaagaagtgaagaatggcattccttctaacagannnnnnnnnnnnnnnnnnnnnnnnnnnnnnnnnnnnnnnnnnnnnnnnnnnnnnnnnnnnnnnnnnnnnnnnnnnnnnnnnnnnnnnnnnnnnnnnnnnnnnnnnnnnnnnnnnnnnnnnnncagggtcctgtcggtggtgctaatagagatatttctattctccagtgccacggggattgtgaccctttagttcccctgatgtttggttctcttacggttgaaaaactaaaaacattggtgaatccagtcaatgtgacctttaaaacctatgaaggtatgatgcacagttcgtgtcaacagnnnnnnnnnnnnnnnnnnnnnnnnnnnnnnnnnncctacctccaattgattgacgtcactaagaggccttgtgtagaagtacaccagcatcattgtagtagagtataaaccttttcccatgcccagtcttcaaatttctaatgttttgcagtgttaaaatgttttgcaaatacacgccagtgacacagatcaaataatgtctcctcatgagaaatgtatgatcttttaagtttctatacatgtattcttataagaagatccagaatctactatattaaaatagatgaagcaggtagcttcttttttctcaaatgtaattcagcaaaataatacagtactgccaccagattttttattacatcatttgaaaattagcagnnnnnnnnnnnnnnnnnnnnnnnnnnnnnnnnnnnnnnnnnnnnnnnnnnnnnnnnnnnnnnnnnnnnnnnnnnnnnnnnnnnnnnnnnnnnnnnnnnnnnnnnnnnnnnnnnnnnnnnnnnnnnnnnnnnnnnnnnnnnnnnnnnnnnnnnnnnnnnnnnnnnnnnnnnnnnaggtggtattacatatttcctaataataggggtaatgctgtttgttatcaagaaagagtaaaattttctctccaattaatggcccttttattttggggccaggcttttatttcccctgatattatttctatttaatactcttttctctcaannnnnnnnnnnngtttgttttttctttattgtccttcatagcagaccaagtattgcctctctgccatagacagccattgtcaatacatgctataatttgacattctgggtcacagatataaggtatttaaaatctatttatgctttatagagaaaccagacattaaaacttcatgcactacttatttcagattactgtaccttatccaaatttacacctagctattaggatcttcaacccagttaacaggaataattctgtggttttatttttctgtaaacaactgaaagaataattagatcatattctagtatgttctgaaatatctttaagactgatcttaaaaactaacttctaagattacttcatctcctcatagcatagagtttactttgtacacatgtttgaaaccaactactatagatgaggaatctatnnnnnnnnnnnnnnnnnnnnnnnctgccagtggacttacttgaaattttcactttagtcaaattattttttgtattagttttttgtgcaaacataaaaatagcaatcattttaaattgtcaaaatttccagattactggtaacaattat

SEQ ID NO: 28187 - DNA, 90 bp, Macaca Mulatta
tctctccactcctcaagggctacaatttaagacgatcacagagaccaccgtggaggtgcagtgggagcccttctcattttcctttgatgg

SEQ ID NO: 28188 - DNA, 441 bp, Macaca Mulatta
  misc_feature (1)...(441): n = A,T,C or G
aggctgctctcggaggacagtgtccgaccacaccagggcctggctcaggggcctgaagacattcgtttcccctcgtgtcactggattctgagggagctgcctggcttctctgcctccagcnttcggggagccacacttggctgctcctggactccagccaaccttcacagaggacgtcccatgccggattctctcagagcagatcgggagacaggatgttgacatataggaattcagctccacaaagcttcaggcctgaccacagctggccctctaggttgtttggtgttgtgggcacagaggtggcagtgtctctacaggcacccgggaagctgttctactttggaactccgtgcaactatccgtcttgaataccagggcagggcaaggcggacggatgccgtccaaccaattatctcacttgttttgtgttctgccatc

SEQ ID NO: 28189 - DNA, 442 bp, Macaca Mulatta
tttttcagagacaggggctccaggcccggccaggatggagggggctcaggctgcggccgtctgaagcccctgggcagatggggatcccttcttgccttcctttctctaccccctcgctgttgtgtgtgtgataactagcactaaccctaagagggctgggaggtgggtgactgaccatggccggcggggaggcctgctcctgtctctctggcaggagtgcctgtaccccaccaagccatgtgaataaaataatccggaagtagctgtgtattcgtctcctctgtgtgcgtgggggtggggaggggcaggagtgggtatagggaagatgcagagaaggcagtctccaaagaggaggttctaggggtcacttgagcctggcctgaggggaacctctggtgtgaggggaaaaacaggtcatacctggtctgagaagagtcagggc

SEQ ID NO: 28190 - DNA, 921 bp, Macaca Mulatta
  misc_feature (1)...(921): n = A,T,C or G
nggcgtggcattcagcaacggggagcgcgccaagcagctccggcgcttctccatcgccaccttgcgggacttcggggtgggcaagcgcggcatcgaggagcgcatccaggaggaggcggatttcctcatcgaggccctccggggcacgcnnnnnnnnnnnnnnnnnnnnnnnnnnnnnnnnnnnnnnnnnnnnnnnnnnnnnnnnnnnnnnnnnnnnnnnnnnnnnnnnnnnnnnnnnnnnnnnnnnnnnnnnnnnnnnnnnnnnnnnnnnnnnnnnnnnnnnnnnnnnnnnnnnnnnnnnnnnnnnnnagctctatgagatgttctcttcagtgatgaaacacctgccaggaccacagcaacaggcctttaaggagttgcaagggctggaggacttcatagccaagaaggtggagcacaaccagcgcacgctggatcccaactccccacgggacttcatcgactcctttctcatccgcatgcaggaggtacaccccagcagccagtgcggggaggtgcaaagccaggcagagggaaatcaggctgggagtggggcgggcagacaacacaggcccattcaaattagccctcnnnnnnnnnnnnnnnnnnnnnnnnnnnnnnnnnnnnnnnnnnnnnnnnnnnnnnnnnnnnnnnnnnnnnnnnnnnnnnnnnnnnnnnnnnnnnnnnnnnnnnnnnnnnnnnnnnnnnnnnnnnnnnnnnnnnnnnnnnnnnnnnnnnnnnnnnnnnnnnnnnnnnnnnnnnnnnnnnnnnnnnnnnagggcaccgaagtgttccctatgctgggctccgtgctgaaagaccccaagttcttctccaacccccaggacttcaatccccagcacttcctggatgagaaggggcagtttaagaagagtgatgcttttgtgcccttttccatcg

SEQ ID NO: 28191 - DNA, 697 bp, Macaca Mulatta
ggaagttggctggaaatgtgatgacttaaaaggcccatgttctgaaaggcacaagaaatttgaagttcctgcttcagagatacatattgttatctgggaaagaaaaacatcccaagtgacagataaagaagctgcctgccttccacttaaaaagactaatgaccaacatgctctcggtaatgagaaaccagtatcttcaacatcgtgttctgtgggtgatgctgcctcagctgaaacagcctcagtaactcaccctaaagatacgtcagttgcccctcatactttttcacaggacacagctgtaactcatggagatcatttactttcaggtccaaaaggtttggttgacaataatattttacctttgacacttgaagaaactatccagaaaacaacctcagtttcacagttaaattctgaagctttcctgttagaaagtaaacctgtagcagaaaatacaggaattctcgaaataaatactttgccatcacaagaattactaatggcttcttcagtatcagctccatgtcatgaaaagcttatcccagaccaatttgtggacataagttttccatcccgagttgtaaatacaaacatgcagtcagagaagctgaatacaaaagacactgtaaatactaaatcttaaagatactgatgctactggtctttacagggaggaagtcagtagaaatggaga

SEQ ID NO: 28192 - DNA, 1242 bp, Macaca Mulatta
tcagtttctctccaggccaccatgtctgcaggcaacggcaccccttgggggtcagcagcgggggaggagtcctgggctgcatcgggagtggcggtggagggctcagagctgcccaccttctcggcagcagccaaggtccgagtgggagtgaccattgtgctgtttgtttcttcggctggagggaacctggccgtcctgtggtcagtgacacggccgcaacccagccagctccgcccctctccggtcaggacactcttcgcccatttagcagctgccgacttactagtcacttttgtggttatgcccctagatgccacctggaatatcactgttcaatggctggccgaggacatcgcatgtcggacactcatgttcctgaaactaatggccatgtattctgcagctttcctgcctgtggtcattggactggaccgccaggcagcagtactcaacccgcttggatcccgttcaggtgtaaggaaacttctgggggcagcctggggacttagtttcctgcttgccttgccccagctgttcctgttccataccgtccaccgagctggcccagtccctttcactcagtgtgtcaccaaaggcagcttcaaggctcgatggcaagagaccacctataacctcttcaccttccgctgcctctttctgctgccactgactgccatggccatctgctatagccacattgtcctcagtgtgtccagccctcagacaaggaaggggagccatgcccctgctggtgaatttgccctctgccgctcctttgacaattgtccccgtgttcgtctctgggccctgagactggccctgcttatcttgctgaccttcatcctctgctggacaccttattacctactgggtctgtggtactggttctcccccaccatgctaactgaagtccctcccagcctgagccacatccttttcctttttggcctcctcaatgctcctttggatcctctcctctatggggccttcacccttggctgccaaagagggcaccaagaacttagtatagactcttctaacgaagggtctgggagaatgctccaacaggagattcatgcccttagacagcaggaagtacaaaaaactgtgacatcaagaagtgcaggagaaacaaaagacatttctataacatctatctgatcctagcacagtatataggaacaaaataataagtctttaataccataagatcttaacatctcacttctactcctgctctcc

SEQ ID NO: 28193 - DNA, 630 bp, Macaca Mulatta
tttaagaaaaactaattattgtcagttgtttctccagaaattcctaaaatatgtttgtttgtttgtttccctagaatcaattttgtttatgggaagagtgacaaatcctgacacccaagagataaaaggaagagatttagattcactgtgaatgaaaacacagcctcagaataaaagatgatttctcgaaaatagttgattggctaaatatcatcatcttgacaatatttgctctatatcttatatcttttctgttttaaactgtgcctgtgttaatagatatctgtcttgatgaataagtaaagttaggtatgcatttgtttctgttctttttgtatgttttagaaaatctatgtgcgtctaaagccttgagcatatataaaatattaccattcacatgttagaataatcctgtctataatatcttaaatatcaaattcttgtcttatatatcaagtttattatatcctaaaatactggactattaaactcacacatagccccattatctagctatggggaggtaaggtcaagagaccgtggccatggtacatgcctctctggggtgtcgcttaagacacagagatccagtattccttgcaataggggagctttgggcatttcgctaat

SEQ ID NO: 28194 - DNA, 773 bp, Macaca Mulatta
ggatccccaccctttgccacatctcggggacctgccagcagctcatccagtttaaagctgctgttcctctacctcagtggtttgggagaacatggtcattatttcactcattctttacctcctctgtctcttctaggattggaatgggggagggcatattagaggataaagtctcaacttatgtgattaatgtaccattggtgtgttctgtgcagacaagcatttaaatgttgactcctgtttgagctattggggttctctggagctctccatgaggactggagcactaactgactttgattgcctctttttgatgcacagcccacactgcccttcagctcttcagcccctgaccctgacaatgtatccacagcctccttgtgctaaagtgcctcaccctcgtacacagccctcctgggaatggtcccagcaaaccctcaagactggttacctttcatggaacccacaggaaatgcatacatatttgtcctgccaaactataagtgcaacccagccagcagcttgcttttctcacactgccttgtcccagccagcctgactcatatatgtgagaagtgccagtctctataattcacatgggctcagatcctcataagtgatttgagttatgttctcccaaagaatcctctgtgccacattccactctggggggcaaaagggagaaggggcctgtacatttctgaacttaacaagtcctttattctaaaaaaggaaatgctggaatgaatgtaatgcccccttccttcccatgg

SEQ ID NO: 28195 - DNA, 437 bp, Macaca Mulatta
acatctggtttatgtcgtgaacattactgtgttgtttcccaagtttctgtcagcttcatattcaggccagaaaaccctgccagctttgccatctgctcttctctctagacctcagagacttcctacctgcacacccatgcatttatattatgtaactccccttgatatgttttctacataatgcatttttaagttaagggcttttctaagaataaaccatcctgaaatccattgggagaatcttgtgaaaccccagctggtctgaagagtgtttttctctggatttgacacttaagcctgtggaacatagtgagagggtgtgaacactggctgtgcaacctgagaaagggcctacctagtgttgacttctcttctttcacatacagcaggaaaccagacagaaaataaactcattagtgctgaaactattaaattca

SEQ ID NO: 28196 - DNA, 238 bp, Macaca Mulatta
acaactctacttaaattttgatttctagtgtaacaaatgtttcctgtaaagattttccagagccaaataatgggagtgaaaaattccttaagtgttatataagaaaatatattagaaaatcaggtttggattataccatttccaaaatatactaatatagaatcctcagtaatatgtttgaattggattttgtctcagaaataattgttacataataaagaatacatcaaccagataa

SEQ ID NO: 28197 - DNA, 2514 bp, Macaca Mulatta
  misc_feature (1)...(2514): n = A,T,C or G
ccgcccccgcagctgcgcagcctgcccttcgggacgctggcctaggcgttccgccgcgctggatgccttctacaacgcggnngtggtggtgctggaggtgagcagctcgctggtacagccctccctgttctaccaccttggtgtgcgtgagagcttcagcatgaccaacaacgtgctcctctgctcccaggccgacctccctgacctgcaggccctgcgggnnnnnnnnnnnnnnnnnnnnnnnnnnnnnnttggcagttacacactgatcccctatgtggtgacggccactggtcnnnnnnnnnnnnnnnnnnnnnnnnnnnnnnnnnnnnnnnnnnnnnnnnnnnnnnnnnnnnnnnnnnnnnnnnnnnnnnnnnnnnnnnnnnnnnnnnnnnnnnnnnnnnnnnnnnnnnnnnnnnnnnnnnnnnnnnnnnnnnnnnnnnnnnnnnnnnnnnnnnnnnnnnnnnnnnnnnnnnnnnnnnnnnnnnnnnnnnnnnnnnnnnnnnnnnnnnnnnnnnnnnnnnnnnnnnnnnnnnnnnnnnnnnnnnnnnnnnnnnnnnnnnnnnnnnnnnnnnnnnnnnnnnnnnnnnnnnnnnnnnnnnnnnnnnnnnnnnnnnnnnnnnnnnnnnnnnnnnnnnnnnnnnnnnnnnnnnnnnnnnnnnnnnnnnnnnnnnnnnnnnnnnnnnnnnnnnnnnnnnnnnnnnnnnnnnnnnnnnnnnnnnnnnnnnnnnnnnnnnnnnnnnnnnnnnnnnnnnnnnnnnnnnnnnnnnnnnnnnnnnnnnnnnnnnnnnnnnnnnnnnnnnnnnnnnnnnnnnnnnnnnnnnnnnnnnnnnnnnnnnnnnnnnnnnnnnnnnnnnnnnnnnnnnnnnnnnnnnnnnnnnnnnnnnnnnnnnnnnnnnnnnnnnnnnnnnnnnnnnnnnnnnnnnnnnnnnnnnnnnnnnnnnnnnnnnnnnnnnnnnnnnnnnnnnnnnnnnnnnnnnnnnnnnnnnnnnnnnnnnnnnnnnnnnnnnnnnnnnnnnnnnnnnnnnnnnnnnnnnnnnnnnnnnnnnnnnnnnnnnnnnnnnnnnnnnnnnnnnnnnnnnnnnnnnnnnnnnnnnnnnnnnnnnnnnnnnnnnnnnnnnnnnnnnnnnnnnnnnnnnnnnnnnnnnnnnnnnnnnnnnnnnnnnnnnnnnnnnnnnnnnnnnnnnnnnnnnnnnnnnnnnnnnnnnnnnnnnnnnnnnnnnnnnnnnnnnnnnnnnnnnnnnnnnnnnnnnnnnnnnnnnnnnnnnnnnnnnnnnnnnnnnnnnnnnnnnnnnnnnnnnnnnnnnnnnnnnnnnnnnnnnnnnnnnnnnnnnnnnnnnnnnnnnnnnnnnnnnnnnnnnnnnnnnnnnnnnnnnnnnnnnnnnnnnnnnnnnnnnnnnnnnnnnnnnnnnnnnnnnnnnnnnnnnnnnnnnnnnnnnnnnnnnnnnnnnnnnnnnnnnnnnnnnnnnnnnnnnnnnnnnnnnnnnnnnnnnnnnnnnnnnnnnnnnnnnnnnnnnnnnnnnnnnnnnnnnnnnnnnnnnnnnnnnnnnnnnnnnnnnnnnnnnnnnnnnnnnnnnnnnnnnnnnnnnnnnnnnnnnnnnnnnnnnnnnnnnnnnnnnnnnnnnnnnnnnnnnnnnnnnnnnnnnnnnnnnnnnnnnnnnnnnnnnnnnnnnnnnnnnnnnnnnnnnnnnnnnnnnnnnnnnnnnnnnnnnnnnnnnnnnnnnnnnnnnnnnnnnnnnnnnnnnnnnnnnnnnnnnnnnnnnnnnnnnnnnnnnnnnnnnnnnnnnnnnncaggttttctcagcccctgcatgaagaaatcgctcttcacaaacgcctgcgccacaagaacatagtgcgctatctgggctcagctagccagggcggctaccttaagatctttatggaggaagtgcctggagnnnnnnnnnnnnnnnnnnnnnnnnnnnnnnnnnnnnnnnnnnnnnnnnnnnnnnnnnnnnnnnnnnnnnnnnnnnnnnnnnnnnnnnnnnnnnnnnnnnnnnnnnnnnnnnnnnnnnnnnnnnnnnnnnnnnnnnnnnnnnnnnnnnnnnnnnnnnnnnnnnnnnnnnnnnnnnnnnnnnnnnnnnnnnnnnnnnnnnnnnnnnnnnnnnnnnnnnnnnnnnnnnnnnnnnnnnnnnnnnnnnnnnnnnnnnnnnnnnnnnnnnnnnnnnnnnnnnnnnnnnnnnnnnnnnnnnnnnnnnnnnnnnnnnnnnnnnnnnnnnnnnnnnnnnnnnnnnnnnnnnnnnnnnnnnnnnnnnnnnnnnnnnnnnnnnnnnnnnnnnnnnnnnnnnnnnnnnncaggtgggtatgtacaaggtccatccaccaatgcccagctctctgtcggctgaggcccaagcctttctccttcgaacttttgagccagacccccgcctccgagccagcgcccaggcactgctgggggaccccttcctgcagcctgggaaaaggagccgcagccccagctccccccaacatgttccacggccctca

SEQ ID NO: 28198 - DNA, 152 bp, Macaca Mulatta
gggtgcgactcttcttttggaagcaggtggcagaaaaaatcccactgcagccaaaacatttcaggattttgaatccagttatcatcaaagagactgcctttgacatccttcagtactcagagcctcagtcaaggttctggggccgagataag

SEQ ID NO: 28199 - DNA, 4049 bp, Macaca Mulatta
  misc_feature (1)...(4049): n = A,T,C or G
aggtcaagaaaagttttaaaaatgtggcagtttatggaccagtctgatattgagaccatgaggagcctgaaggatgctatggcccagcatgagtcctcttgtgagtacagaaaggtggtgacacgtgccctgcacatccctggctgtaaggtggttccgttctgtggagtgtttcttaaggagctctgtgaagtgcttgacggcgcctctggcctcatgaagatatgcccgcggtacaattcccaagaagaaactttagagnnnnnnnnnnnnnnnnnnnnnnnnnnnnnnnnnnnnnnnnnnnnnnnnnnnnnnnnnnnnnnnnnnnnnnnnnnnnnnnnnnnnnnnnnnnnnnnnnnnnnnnnnnnnnnnnnnnnnnnnnnnnnnnnnnnnnnnnnnnnnnnnnnnnnnnnnnnnnnnnnnnnnnnnnnnnnnnnnnnnnnnnnnnnnnnnnnnnnnnnnnnnnnnnnnnnnnnnnnnnnnnnnnnnnnnnnnnnnnnnnnnnnnnnnnnnnnnnnnnnnnnnnnnnnnnnnnnnnnnnnnnnnnnnnnnnnnnnnnnnnnnnnnnnnnnnnnnnnnnnnnnnnnnnnnnnnnnnnnnnnnnnnnnnnnnnnnnnnnnnnnnnnnnnnnnnnnnnnnnnnnnnnnnnnnnnnnnnnnnnnnnnnnnnnnnnnnnnnnnnnnnnnnnnnnnnnnnnnnnnnnnnnnnnnnnnnnnnnnnnnnnnnnnnnnnnnnnnnnnnnnnnnnnnnnnnnnnnnnnnnnnnnnnnnnnnnnnnnnnnnnnnnnnnnnnnnnnnnnnnnnnnnnnnnnnnnnnnnnnnnnnnnnnnnnnnnnnnnnnnnnnnnnnnnnnnnnnnnnnnnnnnnnnnnnnnnnnnnnnnnnnnnnnnnnnnnnnnnnnnnnnnnnnnnnnnnnnnnnnnnnnnnnnnnnnnnnnnnnnnnnnnnnnnnnnnnnnnnnnnnnnnnnnnnnnnnnnnnnnnnnnnnnnnnnnnnnnnnnnnnnnnnnnnnnnnnnnnnnnnnnnnnnnnnnnnnnnnnnnnnnnnnnnnnnnnnnnnnnnnnnnnnnnnnnnnnnnnnnnnnnnnnnaattccctgacaaagacagcagtggctgcggaaacagtacgtcagcctctatcaggnnnnnnnnnnnnnnnnnnnnnnnnnnnnnnnnnnnnnnnnnnnnnnnnnnnnnnnnnnnnnnnnnnnnnnnnnnnnnnnnnnnnnnnnnnnnnnnnnnnnnnnnnnnnnnnnnnnnnnnnnnnnnnnnnnnnnnnnnnnnnnnnnnnnnnnnnnnnnnnnnnnnnnnnnnnnnnnnnnnnnnnnnnnnnnnnnnnnnnnnnnnnnnnnnnnnnnnnnnnnnnnnnnnnnnnnnnnnnnnnnnnnnnnnnnnnnnnnnnnnnnnnnnnnnnnnnnnnnnnnnnnnnnnnnnnnnnnnnnnnnnnnnnnnnnnnnnnnnnnnnnnnnnnnnnnnnnnnnnnnnnnnnnnnnnnnnnnnnnnnnnnnnnnnnnnnnnnnnnnnnnnnnnnnnnnnnnnnnnnnnnnnnnnnnnnnnnnnnnnnnnnnnnnnnnnnnnnnnnnnnnnnnnnnnnnnnncagtgcttggagcagtagtagctggcacggacggatcaaaggcggcatgaagggatttcagagcttcatggtttcagacagcaacatgagttttgttgaatttgttgagctgttcaaatcgttcagnnnnnnnnnnnnnnnnnnnnnnnnnnnnnnnnnnnnnnnnnnnnnnnnnnnnnnnnnnnnnnnnnnnnnnnnnnnnnnnnnnnnnnnnnnnnnnnnnnnnnnnnnnnnnnnnnnnnnnnnnnnnnnnnnnnnnnnnnnnnnnnnnnnnnnnnnnnnnnnnnnnnnnnnnnnnnnnnnnnnnnnnnnnnnnnnnnnnnnnnnnnnnnnnnnnnnnnnnnnnnnnnnnnnnnnnnnnnnnnnnnnnnnnnnnnnnnnnnnnnnnnnnnnnnnnnnnnnnnnnnnnnnnnnnnnnnnnnnnnnnnnnnnnnnnnnnnnnnnnnnnnnnnnnnnnnnnnnnnnnnnnnnnnnnnnnnnnnnnnnnnnnnnnnnnnnnnnnnnnnnnnnnnnnnnnnnnnnnnnnnnnnnnnnnnnnnnnnnnnnnnnnnnnnnnnnnnnnnnnnnnnnnnnnnnnnnnnnnnnnnnnnnnnnnnnnnnnnnnnnnnnnnnnnnnnnnnnnnnnnnnnnnnnnnnnnnnnnnnnnnnnnnnnnnnnnnnnnnnnnnnnnnnnnnnnnnnnnnnnnnnnnnnnnnnnnnnnnnnnnnnnnnnnnnnnnnnnnnnnnnnnnnnnnnnnnnnnnnnnnnnnnnnnnnnnnnnnnnnnnnnnnnnnnnnnnnnnnnnnnnnnnnnnnnnnnnnnnnnnnnnnnnnnnnnnnnnnnnnnnnnnnnnnnnnnnnnnnnnnnnnnnnnnnnnnnnnnnnnnnnnnnnnnnnnnnnnnnnnnnnnnnnnnnnnnnnnnnnnnnnnnnnnnnnnnnnnnnnnnnnnnnnnnnnnnnnnnnnnnnnnnnnnnnnnnnnnnnnnnnnnnnnnnnnnnnnnnnnnnnnnnnnnnnnnnnnnnnnnnnnnnnnnnnnnnnnnnnnnnnnnnnnnnnnnnnnnnnnnnnnnnnnnnnnnnnnnnnnnnnnnnnnnnnnnnnnnnnnnnnnnnnnnnnnnnnnnnnnnnnnnnnnnnnnnnnnnnnnnnnnnnnnnnnnnnnnnnnnnnnnnnnnnnnnnnnnnnnnnnnnnnnnnnnnnnnnnnnnnnnnnnnnnnnnnnnnnnnnnnnnnnnnnnnnnnnnnnnnnnnnnnnnnnnnnnnnnnnnnnnnnnnnnnnnnnnnnnnnnnnnnnnnnnnnnnnnnnnnnnnnnnnnnnnnnnnnnnnnnnnnnnnnnnnnnnnnnnnnnnnnnnnnnnnnnnnnnnnnnnnnnnnnnnnnnnnnnnnnnnnnnnnnnnnnnnnnnnnnnnnnnnnnnnnnnnnnnnnnnnnnnnnnnnnnnnnnnnnnnnnnnnnnnnnnnnnnnnnnnnnnnnnnnnnnnnnnnnnnnnnnnnnnnnnnnnnnnnnnnnnnnnnnnnnnnnnnnnnnnnnnnnnnnnnnnnnnnnnnnnnnnnnnnnnnnnnnnnnnnnnnnnnnnnnnnnnnnnnnnnnnnnnnnnnnnnnnnnnnnnnnnnnnnnnnnnnnnnnnnnnnnnnnnnnnnnnnnnnnnnnnnnnnnnnnnnnnnnnnnnnnnnnnnnnnnnnnnnnnnnnnnnnnnnnnnnnnnnnnnnnnnnnnnnnnnnnnnnnnnnnnnnnnnnnnnnnnnnnnnnnnnnnnnnnnnnnnnnnnnnnnnnnnnnnnnnnnnnnnnnnnnnnnnnnnnnnnnnnnnnnnnnnnnnnnnnnnnnnnnnnnnnnnnnnnnnnnnnnnnnnnnnnnnnnnnnnnnnnnnnnnnnnnnnnnnnnnnnnnnnnnnnnnnnnnnnnnnnnnnnnnnnnnnnnnnnnnnnnnnnnnnnnnnnnnnnnnnnnnnnnnnnnnnnnnnnnnnnnnnnnnnnnnnnnnnnnnnnnnnnnnnnnnnnnnnnnnnnnnnnnnnnnnnnnnnnnnnnnnnnnnnnnnnnnnnnnnnnnnnnnnnnnnnnnnnnnnnnnnnnnnnnnnnnnnnnnnnnnnnnnnnnnnnnnnnnnnnnnnnnnnnnnnnnnnnnnnnnnnnnnnnnnnnnnnnnnnnnnnnnnnnnnnnnnnnnnnnnnnnnnnnnnnnnnnnnnnnnnnnnnnnnnnnnnnnnnnnnnnnnnnnnnnnnnnnnnnnnnnnnnnnnnnnnnnnnnnnnnnnnnnnnnnnnnnnnnnnnnnnnnnnnnnnnnnnnnnnnnnnnnnnnnnnnnnnnnnnnnnnnnnnnnnnnnnnnnnnnnnnnnnnnnnnnnnnnnnnnnnnnnnnnnnnnnntatcgacatcttcagctgcgaaaccttcacaatgaagtcttggagatctctagtttattcattaacagcagaaggatggaagaaaattcctctggcagtcccatgtcagcctcttcg

SEQ ID NO: 28200 - DNA, 626 bp, Macaca Mulatta
  misc_feature (1)...(626): n = A,T,C or G
gttgaatcagatggtttttggaactagaagagcatttcctcaacttgtgctgttcacaatgtaatgagcagacacagcaccctgaagtctaatctacattttaatcatcttaagtctagacaagtaactgtaaatcaagtcccagtgtgaagaatttgccaattcccatggtgtaaatactcccaccacagctgatttccagctaccagttagatgtcattgaatggggagctggaagagatgccctcagcaccccgttatgtggtgtctgtgtccataggtgccgcagatgtacataacccggggcagagaaaacagtcctacgtgcagaaataactaggaagtgatgtttgttgatttagcttttaataacacaaattgtaaacttctannnnnnnnnnnnnnnnnnnnnnnnnnnnnnnnnnnnnnnnnnnnnnnnnnnnnnnnnnnnnnnnnnnnnnnnnnnnnnnnnnnnnnnnnnnnnnnnnnnnnnnnnnnnnnnnnnnnnnnnnnnnnnnnnnnnnnnnnnnnnnnnnnnnngnnnnnnnnnnnnnnnnnnnnnnnnnngnnnnnnnnnnnnnnnnnnnnnnnnnnnnnnnnnnnnnnnnnnnnnnnnnnnnnnnnnn

SEQ ID NO: 28201 - DNA, 119 bp, Macaca Mulatta
  misc_feature (1)...(119): n = A,T,C or G
tgatggcacacggacggcccgcaccaccacagtggagtcaagtttcgagaggcgctcnnnnntggcagaggcagcaccatgatgcaaaccaagaccttctcctcttcctcctcatccaa

SEQ ID NO: 28202 - DNA, 905 bp, Macaca Mulatta
  misc_feature (1)...(905): n = A,T,C or G
agaaagtctgggtctgcacattctcatagtcattccaatctattagacctgtaggatatctcttgataacatatcatgtgctttggtgattgtttctgaaaaggcaatagacttgtaagtgttctatgtgtcatgcatattggaagtacactaaatatattactacttcactggggactctcttgacaataatgtgaattgctcagggaacagacatcaattcttaaagtgtttctgacatcaaaggtgaccgctgggcttcaggaaaagtgttcaaagtaagactgacttcgtgattgagatattcataataatcacactgcaaaggtaggctaggcattcttctactacccaagatataagggaatgatgccggcagattccaacctgagtttgctgagataagggccttcaaggaactgagctccggcaacacgcattgtgagtacccataccatcaggtctgtctttgtattctgttctctgaacctaaaatgcccttccttcagttctctattaaaccctcttcatctgtacatgcttcaatactcatctcaaatgaatccatttctggctggcagagtttttcatctatcatttttttctccctgtcttatagcaaatatttgatcctaaccttagttattttcacatgtaactctttttatatcctgagatccttggggacaggggatatggcttgcttatttctgcgtctccactccttgcttagcatagaaccaaaccaatttttaaaaaattatcatactttaggtgtagtagtatctgcaaannnnnnnattctttatacaatattatccaaatggaaattttatgttaaaattcaatagagataatataaattagattttttaaaatctcaatatgatggaccaggttggcca

SEQ ID NO: 28203 - DNA, 696 bp, Macaca Mulatta
  misc_feature (1)...(696): n = A,T,C or G
ggggacattgtgttgcagtatcactaagggccataccccattcttaggtaacccctgagatcctaccagccttgctagcctcagaggagtcgcttggagtataaagagggtatctctctaagggaggtcagtaggccattagcgaagaggaaatctggagaacaaaaaggagcactgcttttgccaaagtcctctgaaaccaccactgagtccttctggatccagttgagaatctggaccttgaaaatgagagctaaacctcttccactagaagaggatgatcactgatgctatggatcctctgagacttagcaatatcttctctctgaacttcaattttgagttgcccactcacagccatcactatgatgtccctttgaacaagacttctactgaaaccagctctgctgtgacttaacggctcctaagtggaagagacttgccttgtctcaggtatagggcaggacacttggcacatgatggtcttcagggnnnnnnnnnnnnnnnnnnnngatattggttatttcagacctgtctcatgcatagcaagctggactttagcatttcaaagaaagtaacttgatggtgcctaagtcaatgtcagacttttgtctctgtcaatgaaaccccacatgcagacgatgaattatgttcaannnnnnnnnnnnnnnnnnnnnnnnnnnnnnnnnnnnnctg

SEQ ID NO: 28204 - DNA, 1730 bp, Macaca Mulatta
  misc_feature (1)...(1730): n = A,T,C or G
actcatagccatctgtgcctcctgccctgctggactctgatagagccagcgggcagcagggcaaagaaggaagcagcagccgaggaagtgagggtggggtgggggtgcccagcccagccctgtggctggaggtgccattgaccctgagagcaagagccatcagtctgatggcttcctctggccggaagctgtggctgagatatccttccttccgcccagcagcctggatttgcctcctcgcagcctaggaaaggctagggaggcccgggtggagctgtcagggccaaaggctgtttcaaaagtgtcctttattgccagtcagggggtttgactggcatctgtttgtggcatggggtggtggctctcatggaggaagactgagggctgtcgagccccaggggtcctgcccatcagcagccacgcttacccctgcagagctggccacggtagtgcggcggttctcccagacgggcatccaggacttcctgacgctgacgctgacggagcagactgggcttctgtacgtgggggcccgagaggccctgtttgctttcagcatggaggccctggagctgcaaggagcgnnnnnnnnnnnnnnnnnnnnnnnnnnnnnnnnnnnnnnnnnnnnnnnnnnnnnnnnnnnnnnnnnnnnnnnnnnnnnnnnnnnnnnnnnnnnnnnnnnnnnnnnnnnnnnnnnnnnnnnnnnnnnnnnnnnnnnnnnnnnnnnnnnnnnnnnnnnnnnnnnnnnnnnnnnnnnnnnnnnnnnnnnnnnnnnnnnnnnnnnnnnnnnnnnnnnnnngatggtgagctgtactcggccacactcaacaacttcctgggcacggaacccattatcctgcgtaacatggggccgcaccactccatgaagacagagtacctggccttttggctcaacnnnnnnnnnnnnnnnnnnnnnnnnnnnnnnnnnnnnnnnnnnnnnnnnnnnnnnnnnnnnnnnnnnnnnnnnnnnnnnnnnnnnnnnnnnnnnnnnnnnnnnnnnnnnnnnnnnnnnnnnnnnnnnnnnnnnnnnnnnnnnnnnnnnnnnnnnnnnnnnnnnnnnnnnnnnnnnnnnnnnnnnnnnnnnnnnnnnnnnnnnnnnnnnnnnnnnnnnnnnnnnnnnnnnnnnnnnnnnnnnnnnnnnnnnnnnnnnnnnnnnnnnnnnnnnnnnnnnnnnnnnnnnnnnnnnnnnnnnnnnnnnnnnnnnnnnnnnnnnnnnnnnnnnnnnnnnnnnnnnnnnnnnnnnnnnnnnnnnnnnnnnnnnnnnnnnnnnnnnnnnnnnnnnnnnnnnnnnnnnnnnnnnnnnnnnnnnnnnnnnnnnnnnnnnnnnnnnnnnnnnnnnnnnnnnnnnnnnnnnnnnnnnnnnnnnnnnnnnnnnnnnntggcaccggcgccacggttacaccagctccctggagctgcctgacaacaccctcaacttcatcaagaagcacccgctgatggaggagcaggtggggcctcggtggagccgccccctgctcgtgaagaagggcaccaacttcacccacctggtggccgaccgggttacaggacttgatggagccacctatacagtgctgttcattggcacaggncaggagatggctggctgctcaaggccgtgagcctggggccctgggttcacctgattgaagagctgcagctgtttgaccaggagcccatgggaagcctggtgctggctcagagcaagn

SEQ ID NO: 28205 - DNA, 645 bp, Macaca Mulatta
  misc_feature (1)...(645): n = A,T,C or G
taggcttcacacttgtcagagacactaaaccagctatccaaatgcagtggactcctnttatataatagaggctatgaaaacctnntatgaccttcatcaactcaatcctgaggatatacaagttctgtggtttcagttaagcattccaataacaccttccaaaaacctggagtgtaagagctttgtttctttatggaactcccttgtgattgcagtaaattactgtattgtaaattctcagtgtggcacttacctgtaaatgcaacaaaacttttaattatttttctaaaggtgctgcactgcctattattcctcttgttatgtaaatttttgtacacattgattgttgtcttgactgacaaatattctatattgaattgaagtaaatcatttcagcttatagttcttaaaagcataaccctttaccccttttaattccggagtctagaatgcaaggatctcttggaatgacaaatgataggtatctaaaatttacatgaaaatactagcttattttctgaaatgtactatcttaatgcttaaattatatttctctttaggctgtgatagtttttgaaataaaatttaacatttaatatcatgaaatgttataagtagacatgcattttgggattgtgatcttag

SEQ ID NO: 28206 - DNA, 98 bp, Macaca Mulatta
gcagaagctgtctggcagccacaaggccctggtggagatgcaggatgtcgtggctgagcttttgaggaccgtcccctcggagcagccggccactaagg

SEQ ID NO: 28207 - DNA, 2825 bp, Macaca Mulatta
  misc_feature (1)...(2825): n = A,T,C or G
gtgctacacacgcagggccctgtcgatggcagcctttacgcgaaggtgaggaagaaaagctcctcagatcctggcatcccaggtggcccccaggctgtcccgaccaccaacagcccagaccacagtgaccacaccttgtctgtcagcagtgactccggccactctacagcctctgccaggactgataagacggaagagcgcctggctccaggaaccaggaggggcctgagcgcccaggagaaggccgagttggaccagctgctcagtggctttggcctggaggatcctggaagctccctcaaggaaatgactgatgctcgaagcaagtacagtgggactcgccacgtggtgccggcccaggttcatgtgaatggagacgctgctctgaaggaccgggagacggacattctggatgacgagatgccccaccacgacctgcacagtgtggacagccttgggaccctgtcctcctcggaagggcctcagtcggcccacctgggtcccttcacctgccacaagagcagccagaactcactcctatctgacggttttggcannnnnnnnnnnnnnnnnnnnnnnnnnnnnnnnnnnnnnnnnnnnnnnnnnnnnnnnnnnnnnnnnnnnnnnnnnnnnnnnnnnnnnnnnnnnnnnnnnnnnnnnnnnnnnnnnnnnnnnnnnnnnnnnnnnnnnnnnnnnnnnnnnnnnnnnnnnnnnnnnnnnnnnnnnnnnnnnnnnnnnnnnnnnnnnnnnnnnnnnnnnnnnnnnnnnnnnnnnnnnnnnnnnnnnnnnnnnnnnnnnnnnnnnnnnnnnnnnnnnnnnnnnnnnnnnnnnnnnnnnnnnnnnnnnnnnnnnnnnnnnnnnnnnnnnnnnnnnnnnnnnnnnnnnnnnnnnnnnnnnnnnnntgtccagaggggtgtaggcagtgggccacacccctctgacacacagcagccctctcccagcaaagcgttcaaacccaggtttccaggcgaccaggttatgaatggagctggcccagagctgagcacaggcccctccccgggctcacccaccctggacatcgaccagtccatcgaacagctcaacaggctgatcctggagctggatcccaccttcgaacccatccctacccacatgaatgccctcggtagccaggccaatggctctgtgtctccggacagcgtgggaggcgggctccgggcaagcagcagactgcctgacacaggagagggccccaacaggacccctgggcggcaagnnnnnnnnnnnnnnnnnnnnnnnnnnnnnnnnnnnnnnnnnnnnnnnnnnnnnnnnnnnnnnnnnnnnnnnnnnnnnnnnnnnnnnnnnnnnnnnnnnnnnnnnnnnnnnnnnnnnnnnnnnnnnnnnnnnnnnnnnnnnnnnnnnnnnnnnnnnnnnnnnnnnnnnnnnnnnnnnnnnnnnnnnnnnnnnnnnnnnnnnnnnnnnnnnnnnnnnnnnnnnnnnnnnnnnnnnnnnnnnnnnnnnnnnnnnnnnnnnnnnnnnnnnnnnnnnnnnnnnnnnnnnnnnnnnnnnnnnnnnnnnnnnnnnnnnnnnnnnnnnnnnnnnnnnnnnnnnnnnnnnnnnnnnnnnnnnnnnnnnnnnnnnnngaaccacgaggctgccctgagacgctcagtcacactgtggggatgtcagagagccccatcggacccaaatccatgatgctccgggccgacgcgccctcaacgccctcctttcagcaggcttttgcttcttcctgcaccgtttccagcaacagccccgggcagaggagagannnnnnnnnnnnnnnnnnnnnnnnnnnnnnnnnnnnnnnnnnnnnnnnnnnnnnnnnnnnnnnnnnnnnnnnnnnnnnnnnnnnnnnnnnnnnnnnnnnnnnnnnnnnnnnnnnnnnnnnnnnnnnnnnnnnnnnnnnnnnnnnnnnnnnnnnnnnnnnnnnnnnnnnnnnnnnnnnnnnnnnnnnnnnnnnnnnnnnnnnnnnnnnnnnnnnnnnnnnnnnnnnnnnnnnnnnnnnnnnnnnnnnnnnnnnnnnnnnnnnnnnnnnnnnnnnnnnnnnnnnnnnnnnnnnnnnnnnnnnnnnnnnnnnnnnnnnnnnnnnnnnnnnnnnnnnnnnnnnnnnnnnnnnnnnnnnnnnnnnnnnnnnnnnnnnnnnnnnnnnnnnnnnnnnnnnnnnnnnnnnnnnnnnnnnnnnnnnnnnnnnnnnnnnnnnnnnnnnnnnnnnnnnnnnnnnnnnnnnnnnnnnnnnnnnnnnnnnnnnnnnnnnnnnnnnnnnnnnnnnnnnnnnnnnnnnnnnnnnnnnnnnnnnnnnnnnnnnnnnnnnnnnnnnnnnnnnnnnnnnnnnnnnnnnnnnnnnnnnnnnnnnnnnnnnnnnnnnnnnnnnnnnnnnnnnnnnnnnnnnnnnnnnnnnnnnnnnnnnnnnnnnnnnnnnnnnnnnnnnnnnnnnnnnnnnnnnnnnnnnnnnnnnnnnnnnnnnnnnnnnnnnnnnnnnnnnnnnnnnnnnnnnnnnnnnnnnnnnnnnnnnnnnnnnnnnnnnnnnnnnnnnnnnnnnnnnnnnnnnnnnnnnnnnnnnnnnnnnnnnnnnnnnnnnnnnnnnnnnnnnnnnnnnnnnnnnnnnnnnnnnnnnnnnnnnnnnnnnnnnnnnnnnnnnnnnnnnnnnnnnnnnnnnnnnnnnnnnnnnnnnnnnnnnnnnnnnnnnnnnnnnnnnnnnnnnnnnnnnnnnnnnnnnnnnnnnnagcctgacagccttggtgtgccagcattccatcacgcccttggccttgccgtgcaagctccttatcccagagaga

SEQ ID NO: 28208 - DNA, 1222 bp, Macaca Mulatta
ttactgcggtggcagcgcttgttggccgctcccttggcactcgactcggatttgggggcttcctcactcgtggctttccgaaggctgttgctcctgttcgacacagtggaggccatgggaaaagactatttgtcatcaaaccttctagattctaattaaaattccgggtttttgaagttattgagattctacattgcattgactgggattccagtagtaattatcataactctggtgaatgtattcattggtgaagctgaactagcagaaattccagaaggctatatcccagaacactgggaatattataagcatcccatatcgagatggattgcccgtaatttctatgacagtcctgaaaagatttatgaaaaatcaatggccgtccttcagattgaagctgaaaaggctgaattacggttgaaggagctggaagtacgaagattgatgcgtatgagaggagatggaccctggtattactatgagacaattgataaggaacttattgatcattctccaaaagcaactcctgacaattaagcatttttttctccaaatacaaagtatgttctctttgttggaaaataaattagtaaatatattctgtatttttgctctgcgtgaaaaacaaacgagcttctgacattactgtctctgtgttggttcagactgaggctttcgtttagggaggttggcttccagtccacaaagaagatttcaaatgtgctaattaaaactggcgaactcggaattgtaaactcctaaagttgtagcactctgaaaggcttgcgtttttttacccgacaactggagttttgacacccatgctcttctggcaggacagtattggtgttatggcacatgccgccgcgatgctgtaagaagggacctgaagtaggccatcagacaccgttgggtcccacatatcaagtgctggaacaaaaaaagcggcatgcttctattgacgttctccttcttctctcttcttgtctttctgtcacctccttttccttatctcacatcacacaatagatccacgactacaaatactacacaagcacaatcacaacagacaaaggcacagtggagcggcagagcgatagaggtcagcacaggcagtaagcagaagaagaaagacacacgacctacagaacaacaagaaagtagggagaacagagaaaacagacgcgagacagacaagaacgagtagcgaaagcaaaaa

SEQ ID NO: 28209 - DNA, 845 bp, Macaca Mulatta
gggacagccgcctgtatctgtgtccagcccgggtaccgcctgtcccagctgcgctcgcccctcagtcccgcacccgttcgacccaggctaggttagccctcaccatgccggtcaaaggaggcaccaagtgcatcaaatacctgctgttcggatttaacttcatcttctggcttgccgggattgctgtccttgccattggactatggctgcgattcgactctcagaccaagagcatcttcgagcaagaaactaataataataattccagcttctacacaggagtctatattctgatcggagccggcgccctcatgatgctggtgggcttcctgggctgctgtggggctgtgcaggagtcccagtgcatgctgggactgttctttggcttcctcctggtgatattcgccattgaaatagctgcggccatctggggatattcccacaaggatgaggtgattaaggaagttcaggagttttacaaggacacctacaacaagctgaaaaccaaggatgagccccagcgggaaacgctgaaagccatccactatgcgttggactgctgtggtttggctgggggcgtggaacagtttatctcagacatctgccccaagaaggatgtcctcgaaaccttgaccataaagtcctgtcctgatgccatcaaagaggtcttcgacaataaattccacatcatcggcgcagtgggcatccgcattgccgtggtcatgataatttggcatgaatcttcagtatgatcctgtgctgtgctaacccgccagaaccgcccagatggtcctaaagtcaacttacatccccctgaccaggaaagtttaccccctgaagaattg

SEQ ID NO: 28210 - DNA, 392 bp, Macaca Mulatta
ttgcttcattctgcattctggaaggggcacagcacaggccgcagacaacaggggcatcatgggagtatcccaggtggggtgtttgcctaaagcaggtgggcagctccctctcagggaggcggagccttgggagcgtctgggagggatgtgggaaggaggtgaggctgagagggggctctggacagcagaagccacttggtattcagggccagctcccacccatcctggcaccggatgtaacatgtgtgctcagcacaggggctctggtgatgatggatggcattcatccctcagtctccttgaaaagggaggcttgtgccaggggtggtggctgccccgccctgccagggacgccctggggagcctgacagtgccatgatggcagaggcaga

SEQ ID NO: 28211 - DNA, 4323 bp, Macaca Mulatta
  misc_feature (1)...(4323): n = A,T,C or G
caggttgctgcaaaactgtaatgatgacagtttgaatgttgcgcttccaatggagaatgcttgaagtattttcgtctgaggatactnnnnnnnnnnnnnnnnnnnnnnnnnnnnnnnnnnnnnnnnnnnnnnnnnnnnnnnnnnnnnnnnnnnnnnnnnnnnnnnnnnnnnnnnnnnnnnnnnnnnnnnnnnnnnnnnnnnnnnnnnnnnnnnnnnnnnnnnnnnnnnnnnnnnnnnnnnnnnnnnnnnnnnnnnnnnnnnnnnnnnnnnnnnnnnnnnnnnnnnnnnnnnnnnnnnnnnnnnnnnnnnnnnnnnnnnnnnnnnnnnnnnnnnnnnnnnnnnnnnnnnnnnnnnnnnnnnnnnnnnnnnnnnnnnnnnnnnnnnnnnnnnnnnnnnnnnnnnnnnnnnnnnnnnnnnnnnnnnnnnnnnnnnnnnnnnnnnnnnnnnnnnnnnnnnnnnnnnnnnnnnnnnnnnnnnnnnnnnnnnnnnnnnnnnnnnnnnnnnnnnnnnnnnnnnnnnnnnnnnnnnnnnnnnnnnnnnnnnnnnnnnnnnnnnnnnnnnnnnnnnnnnnnnnnnnnnnnnnnnnnnnnnnnnnnnnnnnnnnnnnnnnnnnnnnnnnnnnnnnnnnnnnnnnnnnnnnnnnnnnnnnnnnnnnnnnnnnnnnnnnnnnnnnnnnnnnnnnnnnnnnnnnnnnnnnnnnnnnnnnnnnnnnnnnnnnnnnnnnnnnnnnnnnnnnnnnnnnnnnnnnnnnnnnnnnnnnnnnnnnnnnnnnnnnnnnnnnnnnnnnnnnnnnnnnnnnnnnnnnnnnnnnnnnnnnnnnnnnnnnnnnnnnnnnnnnnnnnnnnnnnnnnnnnnnnnnnnnnnnnnnnnnnnnnnnnnnnnnnnnnnnnnnnnnnnnnnnnnnnnnnnnnnnnnnnnnnnnnnnnnnnnnnnnnnnnnnnnnnnnnnnnnnnnnnnnnnnnnnnnnnnnnnnnnnnnnnnnnnnnnnnnnnnnnnnnnnnnnnnnnnnnnnnnnnnnnnnnnnnnnnnnnnnnnnnnnnnnnnnnnnnnnnnnnnnnnnnnnnnnnnnnnnnnnnnnnnnnnnnnnnnnnnnnnnnnnnnnnnnnnnnnnnnnnnnnnnnnnnnnnnnnnnnnnnnnnnnnnnnnnnnnnnnnnnnnnnnnnnnnnnnnnnnnnnnnnnnnnnnnnnnnnnnnnnnnnnnnnnnnnnnnnnnnnnnnnnnnnnnnnnnnnnnnnnnnnnnnnnnnnnnnnnnnnnnnnnnnnnnnnnnnnnnnnnnnnnnnnnnnnnnnnnnnnnnnnnnnnnnnnnnnnnnnnnnnnnnnnnnnnnnnnnnnnnnnnnnnnnnnnnnnnnnnnnnnnnnnnnnnnnnnnnnnnnnnnnnnnnnnnnnnnnnnnnnnnnnnnnnnnnnnnnnnnnnnnnnnnnnnnnnnnnnnnnnnnnnnnnnnnnnnnnnnnnnnnnnnnnnnnnnnnnnnnnnnnnnnnnnnnnnnnnnnnnnnnnnnnnnnnnnnnnnnnnnnnnnnnnnnnnnnnnnnnnnnnnnnnnnnnnnnnnngtgggtttggagtccccgccgctgtctgtgtctgaggaaagacagcttgccgtcttgacagagttgccttttgtggttccatttgaggaacgagtaaagnnnnnnnnnnnnnnnnnnnnnnnnnnnnnnnnnnnnnnnnnnnnnnnnnnnnnnnnnnnnnnnnnnnnnnnnnnnnnnnnnnnnnnnnnnnnnnnnnnnnnnnnnnnnnnnnnnnnnnnnnnnnnnnnnnnnnnnnnnnnnnnnnnnnnnnnnnnnnnnnnnnnnnnnnnnnnnnnnnnnnnnnnnnnnnnnnnnnnnnnnnnnnnnnnnnnnnnnnnnnnnnnnnnnnnnnnnnnnnnnnnnnnnnnnnnnnnnnnnnnnnnnnnnnnnnnnnnnnnnnnnnnnnnnnnnnnnnnnnnnnnnnnnnnnnnnnnnnnnnnnnnnnnnnnnnnnnnnnnnnnnnnnnnnnnnnnnnnnnnnnnnnnnnnnnnnnnnnnnnnnnnnnnnnnnnnnnnnnnnnnnnnnnnnnnnnnnnnnnnnnnnnnnnnnnnnnnnnnnnnnnnnnnnnnnnnnnnnnnnnnnnnnnnnnnnnnnnnnnnnnnnnnnnnnnnnnnnnnnnnnnnnnnnnnnnnnnnnnnnnnnnnnnnnnnnnnnnnnnnnnnnnnnnnnnnnnnnnnnnnnnnnnnnnnnnnnnnnnnnnnnnnnnnnnnnnnnnnnnnnnnnnnnnnnnnnnnnnnnnnnnnnnnnnnnnnnnnnnnnnnnnnnnnnnnnnnnnnnnnnnnnnnnnnnnnnnnnnnnnnnnnnnnnnnnnnnnnnnnnnnnnnnnnnnnnnnnnnnnnnnnnnnnnnnnnnnnnnnnnnnnnnnnnnnnnnnnnnnnnnnnnnnnnnnnnnnnnnnnnnnnnnnnnnnnnnnnnnnnnnnnnnnnnnnnnnnnnnnnnnnnnnnnnnnnnnnnnnnnnnnnnnnnnnnnnnnnnnnnnnnnnnnnnnnnnnnnnnnnnnnnnnnnnnnnnnnnnnnnnnnnnnnnnnnnnnnnnnnnnnnnnnnnnnnnnnnnnnnnnnnnnnnnnnnnnnnnnnnnnnnnnnnnnnnnnnnnnnnnnnnnnnnnnnnnnnnnnnnnnnnnnnnnnnnnnnnnnnnnnnnnnnnnnnnnnnnnnnnnnnnnnnnnnnnnnnnnnnnnnnnnnnnnnnnnnnnnnnnnnnnnnnnnnnnnnnnnnnnnnnnnnnnnnnnnnnnnnnnnnnnnnnnnnnnnnnnnnnnnnnnnnnnnnnnnnnnnnnnnnnnnnnnnnnnnnnnnnnnnnnnnnnnnnnnnnnnnnnnnnnnnnnnnnnnnnnnnnnnnnnnnnnnnnnnnnnnnnnnnnnnnnnnnnnnnnnnnnnnnnnnnnnnnnnnnnnnnnnnnnnnnnnnnnnnnnnnnnnnnnnnnnnnnnnnnnnnnnnnnnnnnnnnnnnnnnnnnnnnnnnnnnnnnnnnnnnnnnnnnnnnnnnnnnnnnnnnnnnnnnnnnnnnnnnnnnnnnnnnnnnnnnnnnnnnnnnnnnnnnnnnnnnnnnnnnnnnnnnnnnnnnnnnnnnnnnnnnnnnnnnnnnnnnnnnnnnnnnnnnnnnnnnnnnnnnnnnnnnnnnnnnnnnnnnnnnnnnnnnnnnnnnnnnnnnnnnnnnnnnnnnnnnnnnnnnnnnnnnnnnnnnnnnnnnnnnnnnnnnnnnnnnnnnnnnnnnnnnnnnnnnnnnnnnnnnnnnnnnnnnnnnnnnnnnnnnnnnnnnnnnnnnnnnnnnnnnnnnnnnnnnnnagtggttaggttggaaaagggaggacgatggtatttttttttgtgcttttaagccatttccccaaatgggactggcatgtttgttttcggtataccatggcctgcctcatgatgttttgaagatactgtctgtggatgtgaggtggggacttcattcattgtcctattctatctccacttgtgcctggagagcttcaggggagtggaagaggagggtctgcccagctcctgcaacatctgtcacccactatacccagttacttggggggaggacagacactggggtgtcgttaaagtcgtttgaaccaaagtggcagctgcatctttgtcccgatgctagccgtgccggtctctccatcatccgctcgccctccttgcccctgggctgcgcccacttgtcttcctggatatttgggggtgactggccgtgctcagcaccctctgcttcctggtgctgctctgactcgaagacgggacagtccctggtgcagatccagggaaggggagtgtcagtagttcttgcagtaggcactttatcaggacctgacttgttgctgggtggttttagtctcaacaaacagaaacgtttcaaagcgtcagctgtgggagcagagtgaccctttgctgatgctgggggaggggatttaaatcctcattcctctcttctgtctagtgttttactgtcactggaggctctgtgggctgtcatagttaattgaccataattagcaatatacttttaaatgtgggaagctgaatgacacttttaagacaatgaacatgatcaaaacaaaatgtgtaatttcttaatttgaataataaattaagcatttaaatgctattcgtagtcttgatatacagaaataaaataattagggttggtcttttttaggttgttttatgttgaatgttctatatcttattagttaatttgtatattttattatcagtattttggaaatagcatatctgagactgaagagaaattgacaattcacttatttgtgg

SEQ ID NO: 28212 - DNA, 91 bp, Macaca Mulatta
cagccctgaactagaagcctgagcaacgacggacgcaagccgaggaccttgctgccgccgtccctgaaaagacccgcgccgtcggcctcca

SEQ ID NO: 28213 - DNA, 2217 bp, Macaca Mulatta
  misc_feature (1)...(2217): n = A,T,C or G
gaagctttctcttcccgcggcatggaggccaggcctctgcggtcagggagctgacatgcaagcggccgccgggcggcggggcgtccccggtggtggcgggaagcggttcagtcccagccctccctccgagtcccgggtcagcggagtgtaaacagcccggctcgggcggggctgggggcgggcccgcccaggggaactgaagctctggaggcccgtgtgggtctctccggtgcctccgggggctttcggggtgagatcatggctttcactctgatgtcacgttggacatatgacgtcacgcgcagnnnnnnnnnnnnnnnnnnnnnnnnnnnnnnnnnnnnnnnnnnnnnnnnnnnnnnnnnnnnnnnnnnnnnnnnnnnnnnnnnnnnnnnnnnnnnnnnnnnnnnnnnnnnnnnnnnnnnnnnnnnnnnnnnnnnnnnnnnnnnnnnnnnnnnnnnnnnnnnnnnnnnnnnnnnnnnnnnnnnnnnnnnnnnnnnnnnnnnnnnnnnnnnnnnnnnnnnnnnnnnnnnnnnnnnnnnnnnnnnnnnnnnnnnnnnnnnnnnnnnnnnnnnnnnnnnnnnnnnnnnnnnnnnnnnnnnnnnnnnnnnnnnnnnnnnnnnnnnnnnnnnnnnnnnnnnnnnnnnnnnnnnnnnnnnnnnnnnnnnnnnnnnnnnnnnnnnnnnnnnnnnnnnnnnnnnnnnnnnnnnnnnnnnnnnnnnnnnnnnnnnnnnnnnnnnnnnnnnnnnnnnnnnnnnnnnnnnnnnnnnnnnnnnnnnnnnnnnnnnnnnnnnnnnnnnnnnnnnnnnnnnnnnnnnnnnnnnnnnnnnnnnnnnnnnnnnnnnnnnnnnnnnnnnnnnnnnnnnnnnnnnnnnnnnnnnnnnnnnnnnnnnnnnnnnnnnnnnnnnnnnnnnnnnnnnnnnnnnnnnnnnnnnnnnnnnnnnnnnnnnnnnnnnnnnnnnnnnnnnnnnnnnnnnnnnnnnnnnnnnnnnnnnnnnnnnnnnnnnnnnnnnnnnnnnnnnnnnnnnnnnnnnnnnnnnnnnnnnnnnnnnnnnnnnnnnnnnnnnnnnnnnnnnnnnnnnnnnnnnnnnnnnnnnnnnnnnnnnnnnnnnnnnnnnnnnnnnnnnnnnnnnnnnnnnnnnnnnnnnnnnnnnnnnnnnnnnnnnnnnnnnnnnnnnnnnnnnnnnnnnnnnnnnnnnnnnnnnnnnnnnnnnnnnnnnnnnnnnnnnnnnnnnnnnnnnnnnnnnnnnnnnnnnnnnnnnnnnnnnnnnnnnnnnnnnnnnnnnnnnnnnnnnnnnnnnnnnnnnnnnnnnnnnnnnnnnnnnnnnnnnnnnnnnnnnnnnnnnnnnnnnnnnnnnnnnnnnnnnnnnnnnnnnnnnnnnnnnnnnnnnnnnnnnnnnnnnnnnnnnnnnnnnnnnnnnnnnnnnnnnnnnnnnnnnnnnnnnnnnnnnnnnnnnnnnnnnnnnnnnnnnnnnnnnnnnnnnnnnnnnnnnnnnnnnnnnnnnnnnnnnntccatgcccttcccaggactccttatactcagaccccttggacagcacccctgcccgggcaggagagggagtgcaacggaagaaacctctctattgggacttgtttgagcatgcacagcagcagttgctgaaggccaagctgacggaccccaaagaggaccccatctatgatgaacctgaaggcttggccccagtccctccccagggcctttatgatctgcctcgggagcccaaggatgcatggtggtgccaagcccgggtgaaggaggagggctatgagctcccctacaaccctgccactgatgactatgctgtgccaccccctcggagcacaaagcccctccctgctcccaagcnnnnnnnnnnnnnnnncctgaacctggtactgcaactggcagtggcagcaaaagctacaactcagccctatacagccaggtccataaaagcggggcctcagggagctgagactgtgagctgtctagagtagggactgacaagactggggtcaagtcagaggcctctacctgagaaggagggcaaggctgaggtggctaaggaggaccatggggaggtggcactagggatctaagaaaatggttagaaccagcagaagccagaaggtgggaggggccgtgctgtatattaaggggggaccagagggataggggagtcaaaggaaggacatatggggaagtcctaagaagtggg

SEQ ID NO: 28214 - DNA, 1510 bp, Macaca Mulatta
  misc_feature (1)...(1510): n = A,T,C or G
ggcttatcggagatccaagaacagcctgtcggaaattctcaattccatcagcctgtggcagaagacgctgaagatcattggaggcaagtttggaaccagcgtcctctcctatttcaactttctgagatggcttttgaagttcaacattttctcattcatcgtgaacttcagtttcatcataatccctcagtttaccgtagccgaaaagaacacgctccagttcactgggctggagcttttcactggggtgnnnnnnnnnnnnnnnnnnnnnnnnnnnnnnnnnnnnnnnnnnnnnnnnnnnnnnnnnnnnnnnnnnnnnnnnnnnnnnnnnnnnnnnnnnnnnnnnnnnnnnnnnnnnnnnnnnnnnnnnnnnnnnnnnnnnnnnnnnnnnnnnnnnnnnnnnnnnnnnnnnnnnnnnnnnnnnnnnnnnnnnnnnnnnnnnnnnnnnnnnnnnnnnnnnnnnnnnnnnnnnnnnnnnnnnnnnnnnnnnnnnnnnnnnnnnnnnnnnnnnnnnnnnnnnnnnnnnnnnnnnnnnnnnnnnnnnnnnnnnnnnnnnnnnnnnnnnnnnnnnnnnnnnnnnnnnnnnnnnnnnnnnnnnnnnnnnnnnnnnnnnnnnnnnnnnnnnnnnnnnnnnnnnnnnnnnnnnnnnnnnnnnnnnnnnnnnnnnnnnnnnnnnnnnnnnnnnnnnnnnnnnnnnnnnnnnnnnnnnnnnnnnnnnnnnnnnnnnnnnnnnnnnnnnnnnnnnnnnnnnnnnnnnnnnnnnnnnnnnnnnnnnnnnnnnnnnnnnnnnnnnnnnnnnnnnnnnnnnnnnnnnnnnnnnnnnnnnnnnnnnnnnnnnnnnnnnnnnnnnnnnnnnnnnnnnnnnnnnnnnnnnnnnnnnnnnnnnnnnnnnnnnnnnnnnnnnnnnnnnnnnnnnnnnnnnnnnnnnnnnnnnnnnnnnnnnnnnnnnnnnnnnnnnnnnnnnnnnnnnnnnnnnnnnnnnnnnnnnnnnnnnnnnnnnnnnnnnnnnnnnnnnnnnnnnnnnnnnnnnnnnnnnnnnnnnnnnnnnnnnnnnnnnnnnnnnnnnnnnnnnnnnnnnnnnnnnnnnnnnnnnnnnnnnnnnnnnnnnnnnnnnnnnnnnnnnnnnnnnnnnnnnnnnnnnnnnnnnnnnnnnnnnnnnnnnnnnnnnnnnnnnnnnnnnnnnnnnnnnnnnnnnnnnnnnnnnnnnnnnnnnnnnnnnnnnnnnnnnnnnnnnnnnnnnnnnnnnnnnnnnnnnnnnnnnnnnnnnnnnnnnnnnnnnnnnnnnnnnnnnnnnnnnnnnnnnnnnnnnnnnnnnnnnnnnnnnnnnnnnnnnnngattgaagccttcagcggtcactggtccttttcgaggtctgcctttcttcattcactccatctacagctggattgacaccctgagtacacggcctggctacctgtgggttgtttggatctatcggaacctcattggaagtgtgcacttctttttcatcctcaccctcattgtgct

SEQ ID NO: 28215 - DNA, 521 bp, Macaca Mulatta
gagggcattttgtgccccaggacaccctggagtgccaggtggctgaagtcgaggctggggagcagagggtggtgaccctcaacgcgagaagccatctccgagccaggatccaggcccagagcaccaatgacgggcttgatttccaggagtctcagctggtgaagaagctggtggagccgccgccccagggctgccaagggagtgtcatcagcttccccagcccccactcggggcccggttccccagcccagtggctgctctacactcaccccacacactcctggcagagggccgatctgggcgcctacctcaacccgcgacctccagcccccgaggcctggtcggagccagtactgctggccaagggcagctgtgcctactcagatctccagagcatgggcactggccccgatgggtcccccttgtttgggtgtctgtacgaagccaatgattacgaggagattgtctttctcatgttcaccctgaagcaagcctttccggctgagtacctgcctcagtga

SEQ ID NO: 28216 - DNA, 339 bp, Macaca Mulatta
  misc_feature (1)...(339): n = A,T,C or G
aattgcaaattccacaaaaagcagcacaagaggtaaaattggccattaagccattttaccaaaataaagatatcaccaaggaagaatataaagaaattgtacggaaagcagtagataaagtngtttgtcatagtaagagtggagaagtaaattctactaaagtggcaaatctggttaaagcctatgtagacaaatacaaatattcacggaaggggagccaaaagaaaactctggaagaacctgtgtctactgaaaaaaacataggctgaaatggggaacgctgtcaaagacattatcaggatatctgcaaagtgcaatttcaacatgtaccattaactg

SEQ ID NO: 28217 - DNA, 180 bp, Macaca Mulatta
  misc_feature (1)...(180): n = A,T,C or G
gcatggagaagcatattgaagaagatgaggtcaggtcatcggcagaccttcggattcggaaatcccannagcactctgtcctttctcggaagtttgtggaggtgatgaccaaatacaatgaagctcaggtggactttcgagaacgaagcaaagggcgaatccagcggcagctcgaaatta

SEQ ID NO: 28218 - DNA, 274 bp, Macaca Mulatta
tgagacggctgctaaacccttctaataatataataaatggcactgctagagccagcatgcctgaaagatttggtgtctgtgtttaactacaaaggataacagagttctactgatggtttataacaattgggtctttggtgttccccgtgaccagggtctacactataaacaccttttccaccttactgcttctctctgatacctatgtgactctcccttggaaagtgaccagcatgggctgtgtgtttcagtgtctgcagtgtgtgtccactta

SEQ ID NO: 28219 - DNA, 178 bp, Macaca Mulatta
ggagcgtcacatgcaaacttttagtgcatccagcgttccgccctttcttcgttgggcccccttccgacccggcccagtgcgcaggcgcgggaaagttgaactaataaagtttgtacaagttgagtggaggcggccgcaggttgagtggaggaggcggcggtgaggccccggaccaggt

SEQ ID NO: 28220 - DNA, 83 bp, Macaca Mulatta
gtctaagccagaaatccagtatgcaccacatttggaacaggagtctacaaatttgagagaatcatctctaagcaaaatgtcct

SEQ ID NO: 28221 - DNA, 129 bp, Macaca Mulatta
ggcgcctcgttcagaggctgtcactgtccttggctctctggtctgctttccaaatacctaccaggagattcctttactgcagtcagtgccagaagtaaatgaggccattacaggaactgaagatgtcaa

SEQ ID NO: 28222 - DNA, 589 bp, Macaca Mulatta
cctgccttccctctgaggtcctagcatctgaactggagcacccagatggaggcctgatgcagtgtggggtggcgggagtgggatcagattactctgtcctgcttccgacagagactgatccccagaaaagaaggcttctgagattgcagccccctcccgagtcacctacccccagcgtccaggtgagagtctctcttcttcattatggggcccgtggcacccgccgctgccccaccatcttccagacggcatagcaggagccacccagcccgaggacagctagcactgtagccacaactcccaccagcagactgcggggctctgccttcagctcaccagctacctgcatctggaggtgcacagagggtgtgcctcaggggtcagttgagactgccaggaaggtggggagtgggaaggggctgagtaggtgtagctaggggaaggagacatggacgctggtactgccccagggagattccaccccaatccctttcgcctcactgcccatctgggcctgcctgctcaggcggcagggaacgtgacagcctggctgtaaggggtgtcaacccagctatggtagggggaagaa

SEQ ID NO: 28223 - DNA, 2698 bp, Macaca Mulatta
  misc_feature (1)...(2698): n = A,T,C or G
gacctgaccctgcagctgctggctgtgcggaggaagaacgggctacaggaccccggtctacagcannnnnnnnnnnnnnnnnnnnnnnnnnnnnnnnnnnnnnnnnnnnnnnnnnnnnnnnnnnnnnnnnnnnnnnnnnnnnnnnnnnnnnnnnnnnnnnnnnnnnnnnnnnnnnnnnnnnnnnnnnnnnnnnnnnnnnnnnnnnnnnnnnnnnnnnnnnnnnnnnnnnnnnnnnnnnnnnnnnnnnnnnnnnnnnnnnnnnnnnnnnnnnnnnnnnnnnnnnnnnnnnnnnnnnnnnnnnnnnnnnnnnnnnnnnnnnnnnnnnnnnnnnnnnnnnnnnnnnnnnnnnnnnnnnnnnnnnnnnnnnnnnnnnnnnnngaagggcccttctttgtcctgtgtcctgaccaccatgtgagagtgatgacgggtccccgggatgcaggaaatggcccccaggccctcaggcaggcttcgggggctccccagggagaggcggccccggaagcagactcttcaccaccgagccccagcgtgtcctccgaggaggtggcagtggcagccgccccggagcctttgattccgtttcatcagnnnnnnnnnnnnnnnnnnnnnnnnnnnnnnnnnnnnnnnnnnnnnnnnnnnnnnnnnnnnnnnnnnnnnnnnnnngctgtgggcctggcctgggccttggcagacttccagggctcggggcccgaagagatgaccttccaaggtggcgacctcatcgagatccttggggcgcaggtgcccggcctgccctggtgcgtgggccgacacgcagcctcnnnnnnnnnnnnnnnnnnnnnnnnnnnnnnnnnnnnnnnnnnnnnnnnnnnnnnnnnnnnnnnnnnnnnnnnnnnnnnnnnnnnnnnnnnnnnnnnnnnnnnnnnnnnnnnnnnnnnnnnnnnnnnnnnnnnnnnnnnnnnnnnnnnnnnnnnnnnnnnnnnnnnnnnnnnnnnnnnnnnnnnnnnnactcagtagaggaagctgagaccgagcagccgcaggaannagaaatacctccaccttgcctgggcccggagccacaggagaccctgccgaaggtgaagaatgttctggaacaatgcaagacctgcccaggctgcccccaggagccagcgtcctggggtctctgtgtagcatccagcaatgtgagcttgcaggaccccaaggagccctccttctgcttggaagctgaggacaactgggaggatccagaggtcatgagctcactgctgctgttcctgaacacctctggattcaaggccagcttctgtggcctgtacaacctggcgctgccatggctgagcagcatgttcagcagctttagcgacgaggaggagctgactgggtgcctggcacaggcccgaggggcggccaagaaaggtggcctcctcatggcactggccaggctctgcttcctcctggggcggctgtgcagcaggaggctcaagctgtcccaggcctgggtgtactttgaggaagcaccgggggccctggagggcagctttggggacctgttcctggtggtggctgtgtacgccaacctggccagtatttactggaagcagaagaaccgagagaagtgtacacaggtggttcccaaagctgtggccctgctcctggggacacctggccacatctgcagcactgaggtggagggggagctcctgcagctggtgctacggtgggcggtgggtggccagagcctgcaggccgaggcccgggcctgcttcctgctggccaggcaccacgtgcacctcaagcagcccgaggaggccctgcccttcctagagcggctactgcttttgcacagggactcgggagccccagaggctgcgtggctctcagactgtcacctactcctagctgacatctacagctgcaagtgcctgccccacctggtgctgagctgtgtcaaggtggcctcattgagggcacagcactcgctgtccagctcactgaggatcgtgaacctggtgctccagaacgtccttcagccccacagcctcccnnnnnnnnnnnnnnnnnnnnnnnnnnnnnnnnnnnnnnnnnnnnnnnnnnnnnnnnnnnnnnnnnnnnnnnnnnnnnnnnnnnnnnnnnnnnnnnnnnnnnnnnnnnnnnnnnnnnnnnnnnnnnnnnnnnnnnnnnnnnnnnnnnnnnnnnnnnnnnnnnnnnnnnnnnnnnnnnnnnnnnnnnnnnnnnnnnnnnnnnnnnnnnnnnnnnnntgcacgtgcttcatgggcagagcccagtggcctggacatcctgcagtctgtccagtggtggccagcgaggaccaggagggcgtgattgccaacatggtggccgtggctctgaagagtacgggccggatgaggcaggcagccgagggctactaccgtgccctacgggtggctcgagacctgggccagcggaggaaccaggcaatggtgctggccaacttcggggcccggtgcctgcatgcgggtgccagcatgctggcccagcacgacctcctggaggccatgaggctgttctcgaaactgccctgtggagagtgtggccgggacttcacccatgtgctcctgcagctgggccacctctgcacccaccagggcccggctcagcagggcaagggctactactatgagtgggcccgtctggtcgccgtggagatgggccacgtggagag

SEQ ID NO: 28224 - DNA, 257 bp, Macaca Mulatta
ccatcttaactcccttgctcaatcctctgatttacactttcaggaataaggaagtaaatcaggccatgaggagaatatggaacagattgatggtggtttctgataagaaataaaatgttaaacttaaaaaaatccaaagttatgagtaaaaaaggtcaaaatgatcttaagtaaaaacttaatgagatatacctttcatggcaagatataaagtaatgctagaaaaaaagcattaatgtgggatcagaaaaattatg

SEQ ID NO: 28225 - DNA, 1405 bp, Macaca Mulatta
  misc_feature (1)...(1405): n = A,T,C or G
agaaagcatcaaaactgcgaggaatctcaacaaagccagtctacatccccgaggtggaactgaaccgcaagctgataaaaggcatctaccatagcaccttagacctcaaaaacgagctgaagcagtgcatcaggcagctccaggagcccacccccagctcaggtgaccnnnnnnnnnnnnnnnnnnnnnnnnnnnnnnnctgtccctgcctcatccagcaagcttcccacatttggagccccggaacagttagtggatttaaaacaacctggctcggaggngctgcagccaaagccaccagctcgcatccgaactcagcatctctcaaggccaaggtgctggagaccttcctggccaagtccagacccgagctcctggagtnnnnnnnnnnnnnnnnnnnnnnnnnnnnnnnnnnnnnnnnnnnnnnnnnnnnnnnnnnnnnnnnnnnnnnnnnnnnnnnnnnnnnnnnnnnnnnnnnnnnnnnnnnnnnnnnnnnnnnnnnnnnnnnnnnnnnnnnnnnnnnnnnnnnnnnnnnnnnnnnnnnnnnnnnnnnnnnnnnnnnnnnnnnnnnnnnnnnnnnnnnnnnnnnnnnnnnaggcatctgctatggcagcatgaaccgcagggacccagagagcaggctcgcccgcaacagcgcctcctggtgcgtggagtggttcaacaccaagatctctgcctggcacaataacgtggagaaaaccctgccctccaccaaggccacgcgggtgggcgtgcttctcaactgtgaccacggctttgtcatcttcttcgctgttgccgacagggtccacctgatgtataagttcaaggtggactttaccgaggctttgtacccggctttctgggtgttttctgctggtgccacactctccatctgctcccccaagtaggcaggctgtagacacttgggctgactgcctgcagaggtcccaagaccctaggtgaaaatgcagcaggcagaactctccttagacaattccccaagaggtaccaaggattgggagcatgggaggggagctggtgggagggtgggatatgggatttagccaggaaaggggtgagggtgattgtgttgtaggtgaggaggcatttccacccctcggtgcctatcagggcagagtgacctgctccccattgttctggaaatctccaggctgctgggcagctgggcagagctctggggagtgaagtcatgagtgcccgattcctcttagagaaaatccatagctactgtaggttctgtcttgggtcacttggatctgaaggctgcccctttgctctctggggtagccttcagatcttggtgttttgattactcactatagatgtttttaaaattccaaagtcattgagtttcaatattatataacctccattacccgca

SEQ ID NO: 28226 - DNA, 2374 bp, Macaca Mulatta
  misc_feature (1)...(2374): n = A,T,C or G
gctgcagtattctgaaaggataagcgtatgtcaggcagtctaatgaaaagaactcgtctgtgtaatctcttgaaatcattagttgttcaaaacagaataccacagtgcttctctggatacaaaaagaagcaggtgatgttgttaggggttctaaacccctttgggagcgtctcttgtgctttgggaccataatcaacatctgctataagaagtatcacctgtaacgcacagnnnnnnnnnnnnnnnnnnnnnnnnnnnnnnnnnnnnnnnnnnnnnnnnnnnnnnnnnnnnnnnnnnnnnnnnnnnnnnnnnnnnnnnnnnnnnnnnnnnnnnnnnnnnnnnnnnnnnnnnnnnnnnnnnnnnnnnnnnnnnnnnnnnnnnnnnnnnnnnnnnnnnnnnnnnnnnnnnnnnnnnnnnnnnnnnnnnnnnnnnnnnnnnnnnnnnnnnnnnnnnnnnnnnnnnnnnnnnnnnnnnnnnnnnnnnnnnnnnnnnnnnnnnnnnnnnnnnnnnnnnnnnnnnnnnnnnnnnnnnnnnnnnnnnnnnnnnnnnnnnnnnnnnnnnnnnnnnnnnnnnnnnnnnnnnnnnnnnnnnnnnnnnnnnnnnnnnnnnnnnnnnnnnnnnnnnnnnnnnnnnnnnnnnnnnnnnnnnnnnnnnnnnnnnnnnnnnnnnnnnnnnnnnnnnnnnnnnnnnnnnnnnnnnnnnnnnnnnnnnnnnnnnnnnnnnnnnnnnnnnnnnnnnnnnnnnnnnnnnnnnnnnnnnnnnnnnnnnnnnnnnnnnnnnnnnnnnnnnnnnnnnnnnnnnnnnnnnnnnnnnnnnnnnnnnnnnnnnnnnnnnnnnnnnnnnnnnnnnnnnnnnnnnnnnnnnnnnnnnnnnnnnnnnnnnnnnnnnnnnnnnnnnnnnnnnnnnnnnnnnnnnnnnnnnnnnnnnnnnnnnnnnnnnnnnnnnnnnnnnnnnnnnnnnnnnnnnnnnnnnnnnnnnnnnnnnnnnnnnnnnnnnnnnnnnnnnnnnnnnnnnnnnnnnnnnnnnnnnnnnnnnnnnnnnnnnnnnnnnnnnnnnnnnnnnnnnnnnnnnnnnnnnnnnnnnnnnnnnnnnnnnnnnnnnnnnnnnnnnnnnnnnnnnnnnnnnnnnnnnnnnnnnnnnnnnnnnnnnnnnnnnnnnnnnnnnnnnnnnnnnnnnnnnnnnnnnnnnnnnnnnnnnnnnnnnnnnnnnnnnnnnnnnnnnnnnnnnnnnnnnnnnnnnnnnnnnnnnnnnnnnnnnnnnnnnnnnnnnnnnnnnnnnnnnnnnnnnnnnnnnnnnnnnnnnnnnnnnnnnnnnnnnnnnnnnnnnnnnnnnnnnnnnnnnnnnnnnnnnnnnnnnnnnnnnnnnnnnnnnnnnnnnnnnnnnnnnnnnnnnnnnnnnnnnnnnnnnnnnnnnnnnnnnnnnnnnnnnnnnnnnnnnnnnnnnnnnnnnnnnnnnnnnnnnnnnnnnnnnnnnnnnnnnnnnnnnnnnnnnnnnnnnnnnnnnnnnnnnnnnnnnnnnnnnnnnnnnnnnnnnnnnnnnnnnnnnnnnnnnnnnnnnnnnnnnnnnnnnnnnnnnnnnnnnnnnnnnnnnnnnnnnnnnnnnnnnnnnnnnnnnnnnnnnnnnnnnnnnnnnnnnnnnnnnnnnnnnnnnnnnnnnnnnnnnnnnnnnnnnnnnnnnnnnnnnnnnnnnnnnnnnnnnnnnnnnnnnnnnnnnnnnnnnnnnnnnnnnnnnnnnnnnnnnnnnnnnnnnnnnnnnnnnnnnnnnnnnnggaaattaccaagctgctgcctttccataggatatttttggatcgactagaagagaatgaagccatcgaccaggacctgcaggcttacatcctgcaccggatacacagcagctcagagatccagaataacatttcacttaatggcaaaatggacaatactacatttgggaaactcagttctcatctcaagaccctcagtcaagggtcctatctatacctaaaactcacctttgacctcatagagaaaggctacctagtgttaaagagctctagctacaaagtagttcctgtttcgctctcagaggtttacttactccaatgcaatatgaagtttccaacccagtcttcttttgatcgggtgatgcctctcctgaatgtggcagtggcctctctccacccactgactgatgagcatatcttccaggccatcaatgctgggagcattgaaggcacactagaatgggaggattttcagcagagaatggagaacctctccatgttcctaatcaagcgcagagacatgactcgtatgtttgtacatccttcttttcgagaatggcttatctggagagaagaaggagagaaaaccaagtttctctgtgatcc

SEQ ID NO: 28227 - DNA, 680 bp, Macaca Mulatta
atcttgggaaagggagccttgtcccggtgtgagcactgactgctttatttgtgcccctgtagtgtggaaggggagtatgtcccagtggaaggcgacgaggtcacctataagatgtgctccatcccgcccaagaatgagaagctgcaggctgtggaggtcgttatcacccacctggcaccaggcaccaagcatgagacctggtccggacacgtcgtcagttcctaggagatgctggaagcaccccttctcctgtgcttgtgggagactttgcggggaggcggcggcagacactggagatgacattcttccatacgagacggggcttcggcagggcatggtccctttcaagtatctcctggaggaaggggtttggggggcaggcgtggggtgttccggccaccagcacagcctctgaccatcacaacaacctctcaccatctgaagtgcattaaaagcatttaaaaaggagaggtgcccactggtggctgagtagagattccaaccccagcccagggagtggatcaagggtgatatttctccagctgctcagacacaggggctcaacccacagaccctcttcctcctggagctagaggctccagattcccggatctggcccactggcagctgacgtggaccttgcgtgacttccccaagaacaaatttccacctaagtgccc

SEQ ID NO: 28228 - DNA, 644 bp, Macaca Mulatta
ggacagtgactgaattatttttttcttcctggctccatccacagtaccagaagccaaaggagtttgtggtggctgagtccgagctacagaaggaactaaagaaggtaaagacagcccacggcaacgatggggactgcaagacccagtagttggcccctgagccttatacctccagcacagggggtgccgtgagacttcaaggcttggtccttcttgaccacggcagcctcctatcttctaggagctatcacgggtctacaagaactgggccgtggggcactcctagccagtgagtcatggtcgtatttcctgagtaaagtcattctgagctacttactgcacagggactgccctcttgtttacctctgtatgctacctggccccagaccccactggcctccctcgggagggtgtgatgacattcccttctctatcccagggaccttcaacataaagcttcccaaaaaggggagaatggggtgggagcacatggccctagtagggcagggctggcctttccctgcaacctgtttacacaaactcacaggaagaccaggctggagggaacctgtgctaccatagcttgtggaagtggctcagaggaaactcctgaagatatgtgggaaagggaacgttttaaaaat

SEQ ID NO: 28229 - DNA, 100 bp, Macaca Mulatta
tgcccaaaaaacttgcgtcaccgacagagctgtgcacttctcattgcagcctgtgacaaggcacctaaggactggctgttctccaaaacaacctgtaaaa

SEQ ID NO: 28230 - DNA, 123 bp, Macaca Mulatta
ggacagagctgcccagcccgccatctgtgtggtttgaagcagaatttttccaccacatcctccactggacacccatcccaaatcagtctgaaagtacctgctatgaagtggcactcctgaggt

SEQ ID NO: 28231 - DNA, 768 bp, Macaca Mulatta
gtaagtggtggcagagccagtccccggatcctgtgtaacacccacctcttactgaaaagagctcctgtgctggtgccacaccagctacctgtgccctaagtccccagactcatgtattagttatgccccatttgtccttccaggtgacaggggccctgctgggccaccaggtcatcgtgggccacctggccctcgagggcacaagggagaaaaaggagacaaaggtaagtgttgactgctccatgatttgcatgttctggagagctgcaaggctgacgctcagtagagaagcaggtgatttgttccagagcaagcctgagaaattcaggcaaatgccaattactccaggcagacactgccaaaagcagaatttgcataacaatcccattcacagtgaggaagaaaaggggagtgccaaagcagggaggaaaaggagaaccaagctggtgttgaaatggggcaaacaagttaaataaatgtatagtcttacaaaagatttcacctttgaagccatctttgcagtagtcacagttgccataattgcccaagccaagatccccacaggccacaagatgttttaacttcctcccgatcttctaactttcaggtgaccaaatctatgctgggcggagaaggagaagaagtattgctgtcaagccatgagctagccatggcaggacagctcctggaccaggtgtcatcatgcatatggcacttaggtccaagctctctagagggtgaaagctggagtctgtcaatgtcctactg

SEQ ID NO: 28232 - DNA, 824 bp, Macaca Mulatta
  misc_feature (1)...(824): n = A,T,C or G
acaagagaaaacaggatcgattaaaataaattaggatcttggggtggagggacagtgacgtttagagcacatgaactcaaggtcagtgattctgcaggacttcacagagagagctgtgaccatcatcattcagtccaagtgctttctctgcccagacagcacagaactccagccctgccacttacatgggtcatcgagtttccacctaaaatatgattctatttattttgagtcactgttaccaaattagaattaaaacaaagttacataaaaagttattgtgattacacttaattttagtcacatattctgtatatataggccaacctataccacatccaaaattatgtatctactacagcccctagaagctttatgaatacagtgtgtctttttttattcacaaaatttttgaaatcttggtaatatggtttgaagtctgtatcttannnnnnnnnnnnnnnnntgagacagggtctcactctgtcacccaatttggaatgcagtggcacaatctcgcctcactgcaacctctgcctctcaggctcaagcaaacctctgacctcagcctcctaagtggctgggaatacaggcacatgccaccaaacctggctgattttcgtcttatgtacagaccagatgtcaccattttgcccagactggtctcaaactcctgggctcaagcaatgtattttaattttaaaacaaccagacactcattcttatgaatgaataaacatttggaggtatataaagtaaaaagttaaagtctttcctgtaagttaacacaaatgtttactattgctaaaacctttacaggtagc

SEQ ID NO: 28233 - DNA, 4559 bp, Macaca Mulatta
  misc_feature (1)...(4559): n = A,T,C or G
aggaagcctggaagcacgcaatcgagaaggccaagcacatgcccgacccctgggctgagttccacctagaagacattgccaccgaacgtgctactcgacacaggnnnnnnnnnnnnnnnnnnnnnnnnnnnnnnnnnnnnnnnnnnnnnnnnnnnnnnnnnnnnnnnnnnnnnnnnnnnnnnnnnnnnnnnnnnnnnnnnnnnnnnnnnnnnnnnnnnnnnnnnnnnnnnnnnnnnnnnnnnnnnnnnnnnnnnnnnnnnnnnnnnnnnnnnnnnnnnnnnnnnnnnnnnnnnnnnnnnnnnnnnnnnnnnnnnnnnnnnnnnnnnnnnnnnnnnnnnnnnnnnnnnnnnnnnnnnnnnnnnnnnnnnnnnnnnnnnnnnnnnnnnnnnnnnnnnnnnnnnnnnnnnnnnnnnnnnnnnnnnnnnnnnnnnnnnnnnnnnnnnnnnnnnnnnnnnnnnnnnnnnnnnnnnnnnnnnnnnnnnnnnnnnnnnnnnnnnnnnnnnnnnnnnnnnnnnnnnnnnnnnnnnnnnnnnnnnnnnnnnnnnnnnnnnnnnnnnnnnnnnnnnnnnnnnnnnnnnnnnnnnnnnnnnnnnnnnnnnnnnnnnnnnnnnnnnnnnnnnnnnnnnnnnnnnnnnnnnnnnnnnnnnnnnnnnnggtgtccgtgggatggcgctcttcttctactctcatgcctgcaaccggatttgcgagagcatgggccttgctccctttgacctctcgccccgggagagggacgcggtgaatcagaacaccaagctgctgnnnnnnnnnnnnnnnnnnnnnnnnnnnnnnnnnnnnnnnnnnnnnnnnnnnnnnnnnnnnnnnnnnnnnnnnnnnnnnnnnnnnnnnnnnnnnnnnnnnnnnnnnnnnnnnnnnnnnnnnnnnnnnnnnnnnnnnnnnnnnnnnnnnnnnnnnnnnnnnnnnnnnnnnnnnnnnnnnnnnnnnnnnnnnnnnnnnnnnnnnnnnnnnnnnnnnnnnnnnnnnnnnnnnnnnnnnnnnnnnnnnnnnnnnnnnnnnnnnnnnnnnnnnnnnnnnnnnnnnnnnnnnnnnnnnnnnnnnnnnnnnnnnnnnnnnnnnnnnnnnnnnnnnnnnnnnnnnnnnnnnnnnnnnnnnnnnnnnnnnnnnnnnnnnnnnnnnnnnnnnnnnnnnnnnnnnnnnnnnnnnnnnnnnnnnnnnnnnnnnnnnnnnnnnnnnnnnnnnnnnnnnnnnnnnnnnnnnnnnnnnnnnnnnnnnnnnnnnnnnnnnnnnnnnnnnnnnnnnnnnnnnnnnnnnnnnnnnnnnnnnnnnnnnnnnnnnnnnnnnnnnnnnnnnnnnnnnnnnnnnnnnnnnnnnnnnnnnnnnnnnnnnnnnnnnnnnnnnnnnnnnnnnnnnnnnnnnnnnnnnnnnnnnnnnnnnnnnnnnnnnnnnnnnnnnnnnnnnnnnnnnnnnnnnnnnnnnnnnnnnnnnnnnnnnnnnnnnnnnnnnnnnnnnnnnnnnnnnnnnnnnnnnnnnnnnnnnnnnnnnnnnnnnnnnnnnnnnnnnnnnnnnnnnnnnnnnnnnnnnnnnnnnnnnnnnnnnnnnnnnnnnnnnnnnnnnnnnnnnnnnnnnnnnnnnnnnnnnnnnnnnnnnnnnnnnnnnnnnnnnnnnnnnnnnnnnnnnnnnnnnnnnnnnnnnnnnnnnnnnnnnnnnnnnnnnnnnnnnnnnnnnnnnnnnnnnnnnnnnnnnnnnnnnnnnnnnnnnnnnnnnnnnnnnnnnnnnnnnnnnnnnnnnnnnnnnnnnnnnnnnnnnnnnnnnnnnnnnnnnnnnnnnnnnnnnnnntcaggggacttgtatacccaggcagcagaggcagcgatggaagccatgaagggccggctggccaaccagtactaccaaaaggctgaagaggcctgggcccagatggaggagtaaccaggaaaatcactgccggctagtcccaagcaaaagggctaggaggaaagatnnnnnnnnnnnnnnnnnnnnnnnnnnnnnnnnnnnnnnnnnnnnnnnnnnnnnnnnnnnnnnnnnnnnnnnnnnnnnnnnnnnnnnnnnnnnnnnnnnnnnnnnnnnnnnnnnnnnnnnnnnnnnnnnnnnnnnnnnnnnnnnnnnnnnnnnnnnnnnnnnnnnnnnnnnnnnnnnnnnnnnnnnnnnnnnnnnnnnnnnnnnnnnnnnnnnnnnnnnnnnnnnnnnnnnnnnnnnnnnnnnnnnnnnnnnnnnngagtcttgctctgtcccccaggctggagtgcagtggcatgatctcagctcactgcaacctccgcctcccgggttcaagcaattctcctgcctcagcctcctgagtagctgggactacaggtgtgccaccacacccagctaatttttgtatttttagtagagatggggtttcactatgttggccagattggtctcaaactcctgacctcaggtgatccacctgcctcggcctcccaaagttttgggattacagnnnnnnnnnnnnnnnnnnnnnnnnnnnnnnnnnnnnnnnnnnnnnnnnnnnnnnnnnnnnnnnnnnnnnnnnnnnnnnnnnnnnnnnnnnnnnnnnnnnnnnnnnnnnnnnnnnnnnnnnnnnnnnnnnnnnnnnnnnnnnnnnnnnnnnnnnnnnnnnnnnnnnnnnnnnnnnnnnnnnnnnnnnnnnnnnnnnnnnnnnnnnnnnnnnnnnnnnnnnnnnnnnnnnnnnnnnnnnnnnnnnnnnnnnnnnnnnnnnnnnnnnnnnnnnnnnnnnnnnnnnnnnnnnnnnnnnnnnnnnnnnnnnnnnnnnnnnnnnnnnnnnnnnnnnnnnnnnnnnnnnnnnnnnnnnnnnnnnnnnnnnnnnnnnnnnnnnnnnnnnnnnnnnnnnnnnnnnnnnnnnnnnnnnnnnnnnnnnnnnnnnnnnnnnnnnnnnnnnnnnnnnnnnnnnnnnnnnnnnnnnnnnnnnnnnnnnnnnnnnnnnnnnnnnnnnnnnnnnnnnnnnnnnnnnnnnnnnnnnnnnnnnnnnnnnnnnnnnnnnnnnnnnnnnnnnnnnnnnnnnnnnnnnnnnnnnnnnnnnnnnnnnnnnnnnnnnnnnnnnnnnnnnnnnnnnnnnnnnnnnnnnnnnnnnnnnnnnnnnnnnnnnnnnnnnnnnnnnnnnnnnnnnnnnnnnnnnnnnnnnnnnnnnnnnnnnnnnnnnnnnnnnnnnnnnnnnnnnnnnnnnnnnnnnnnnnnnnnnnnnnnnnnnnnnnnnnnnnnnnnnnnnnnnnnnnnnnnnnnnnnnnnnnnnnnnnnnnnnnnnnnnnnnnnnnnnnnnnnnnnnnnnnnnnnnnnnnnnnnnnnnnnnnnnnnnnnnnnnnnnnnnnnnnnnnnnnnnnnnnnnnnnnnnnnnnnnnnnnnnnnnnnnnnnnnnnnnnnnnnnnnnnnnnnnnnnnnnnnnnnnnnnnnnnnnnnnnnnnnnnnnnnnnnnnnnnnnnnnnnnnnnnnnnnnnnnnnnnnnnnnnnnnnnnnnnnnnnnnnnnnnnnnnnnnnnnnnnnnnnnnnnnnnnnnnnnnnnnnnnnnnnnnnnnnnnnnnnnnnnnnnnnnnnnnnnnnnnnnnnnnnnnnnnnnnnnnnnnnnnacaaactgctttgatcaaccctaaattcgaaagcagcctctttttctttgtttaaaagtcaaaacaaaaaagcagagtataacatacaaaccgttcttaactgttcattaaaatgggtccttcaacaccttagtggggtttgttgttgtgcttatgcacagagactattttctttttattattataatttttgaaatagagatggggtttcactgtgttgcccaggctggtctcgaactcctgggcttaagtgagcctcctgcctcagccttccaaagtgctggggttacaggcaggagccactgtgcccagccaacacttnnnnnnnnnnnnnnnnnnnnnnnnnnnnnnnnnnnnnnnnnnnnnnnnnnnnnnnnnnnnnnnnnnnnnnnnnnnnnnnnnnnnnnnnnnnnnnnnnnnnnnnnnnnnnnnnnnnnnnnnnnnnnnnnnnnnnnnnnnnnnnnnnnnnnnnnnnnnnnnnnnnnnnnnnnnnnnnnnnnnnnnnnnnnnnnnnnnnnnnnnnnnnnnnnnnnnnnnnnnnnnnnnnnnnnnnnnnnnnnnnnnnnnnnnnnnnnnnnnnnnnnnnnnnnnnnnnnnnnnnnnnnnnnnnnnnnnnnnnnnnnnnnnnnnnnnnnnnnnnnnnnnnnnnnnnnnnnnnnnnnnnnnnnnnnnnnnnnnnnnnnnnnnnnnnnnnnnnnnnnnnnnnnnnnnnnnnnnnnnnnnnnnnnnnnnnnnnnnnnnnnnnnnnnnnnnnnnnnnnnnnnnnnnnnnnnnnnnnnnnnnnnnnnnnnnnnnnnnnnnnnnnnnnnnnnnnnnnnnnnnnnnnnnnnnnnnnnnnnnnnnnnnnnnnnnnnnnnnnnnnnnnnnnntgttgtaatgtaaaagctgccacagacactgcgtgaacacgaatgagtgtggctggtgttccaataaaactttatttac

SEQ ID NO: 28234 - DNA, 1018 bp, Macaca Mulatta
  misc_feature (1)...(1018): n = A,T,C or G
gtgtagcccacaatgccctggagtgtgcacgagccatctacgcctacgccctgcaggtgtttcccagcaagaagagtgtgtggctgcgtgccgcgtacttcgagaagaaccatggcactcggnnnnnnnnnnnnnnnnnnnnnnnnnnnnnnnnnnnnnnnnnnnnnnnnnnnnnnnnnnnnnnnnnnnnnnnnnnnnnnnnnnnnnnnnnnnnnnnnnnnnnnnnnnnnnnnnnnnnnnnnnnnnnnnnnnnnnnnnnnnnnnnnnnnnnnnnnnnnnnnnnnnnnnnnnnnnnnnnnnnnnnnnnnnnnnnnnnnnnnnnnnnnnnnnnnnnnnnnnnnnnnnnnnnnnnnnnnnnnnnnnnnnnnnnnnnnnnnnnnnnnnnnnnnnnnnnnnnnnnnnnnnnnnnnnnnnnnnnnnnnnnnnnnnnnnnnnnnnnnnnnnnnnnnnnnnnnnnnnnnnnnnnnnnnnnnnnnnnnnnnnnnnnnnnnnnnnnnnnnnnnnnnnnnnnnnnnnnnnnnnnnnnnnnnnnnnnnnnnnnnnnnnnnnnnnnnnnnnnnnnnnnnnnnnnnnnnnnnnnnnnnnnnnnnnnnnnnnnnnnnnnnnnnnnnnnnnnnnnnnnnnnnnnnnnnnnnnnnnnnnnnnnnnnnnnnnnnnnnnnnnnnnnnnnnnnnnnnnnnnnnnnnnnnnnnnnnnnnnnnnnnnnnnnnnnnnnnnnnnnnnnnnnnnnnnnnnnnnnnnnnnnnnnnnnnnnnnnnnnnnnnnnnnnnnnnnnnnnnnnnnnnnnnnnnnnnnnnnnnnnnnnnnnnnnnnnnnnnnnnnnnnnnnnnnnnnnnnnnnnnnnnnnnnnnnnnnnnnnnnnnnnnnnnnnnnnnnnnnnnnnnnnnnnnnnnnnnnngctgttctggagtcagcggaagatcaccaaggccagggagtggttccaccgcactgtgaagattgactcggacctgggggatgcttgggccttcttctacaagtatgagctgcagcatgg

SEQ ID NO: 28235 - DNA, 783 bp, Macaca Mulatta
gggggtgactttcaaagagaataaaacactatttcccttgccttttcatactagggcagtatctcctctagctcgtgcctatacagaaaattctatcaccatacaaaatttcatgcagtatttatgtttttaagcacaggtgtacccaaaactgtgaaaagtctaaatttatgggttctatacatgtatttttgcctgacctagagaaagagtttgataaatttttaccagctttgaagatggattaacttttgactttgggctttaaacttttaaatcagacatttcaggactaatttgattttgtagatatcattgtaagaactttatatgaaagacttgataaagggatttgatttgttttcatcatttaaacacagtcttgtgatgatgagaatgtaagtgtgattcttttctgtattttgaggtccctaatccaaaggccattttgctaggattttttctgctatcagatgtgttttcactctaaacctagtcttttatgacatgaatcgattacttcctgttaattttctatcctcccttactatcccccctttttgttttcagtattcagtatttcagtattctagagtggattttgatataaaagaaaataattcttacatcatcttttgcaacaaaattgttttctgaattgataaacaatttaaaaagtaaattcccaattttccatatgttcatatgcccctaggtttggggggcatcactcaatttttccctttttgggtaaagatgtttttgtaaacaaaataaacctca

SEQ ID NO: 28236 - DNA, 3605 bp, Macaca Mulatta
  misc_feature (1)...(3605): n = A,T,C or G
gggaccattgcaatttagagacgtggccatagaattttctctggaggagtggcattgcctggacactgcacagcgaaatctatataagaatgtgatgttagagaactacagtaacctggtcttccttggtnnnnnnnnnnnnnnnnnnnnnnnnnnnnnnnnnnnnnnnnnnnnnnnnnnnnnnnnnnnnnnnnnnnnnnnnnnnnnnnnnnnnnnnnnnnnnnnnnnnnnnnnnnnnnnnnnnnnnnnnnnnnnnnnnnnnnnnnnnnnnnnnnnnnnnnnnnnnnnnnnnnnnnnnnnnnnnnnnnnnnnnnnnnnnnnnnnnnnnnnnnnnnnnnnnnnnnnnnnnnnnnnnnnnnnnnnnnnnnnnnnnnnnnnnnnnnnnnnnnnnnnnnnnnnnnnnnnnnnnnnnnnnnnnnnnnnnnnnnnnnnnnnnnnnnnnnnnnnnnnnnnnnnnnnnnnnnnnnnnnnnnnnnnnnnnnnnnnnnnnnnnnnnnnnnnnnnnnnnnnnnnnnnnnnnnnnnnagaatgttgcaaagcttttaaccagttttataaacttactgtacataagagaattcatactggagagaaaccctacaaatgtgaagaatgtggaaaagcttttaatcactcctcaatccttgggaaacataagataatccatagtggggaaaaaccctacaaatgtgaagagtgtggcaaagcttttaatcgctcatcaatccttaggaaacataaggtaatccacagtggagaaaaaccctacaaatgtgaagaatgtggcaaggcttttaatcacccatcaacccttagtaaacataagagaattcatagtggagataaaccctacaaatgtgaagaatgtggaaaagctttcaagcagttatcaaaccttaatagccataagagaattcatactggagagaagcccttcaaatgtgaaacatgtggcaaagcttttacccagctatcaacccttaggaaacataagataatccatagtggagaaaaaccctacaaatgtgaagaatgtgggaaagcttttaagcagtcatcaacccttatcaaacataagagaattcatagtggagagaaaccgttcaaatgtgaagaatgtggcaaaggcttttgtgattcctcatctcttatgacacataagagaattcatagtggagagaaacccttcaaatgtgaagaatgtggcaaaggcctttgtgactcctcatctcttgcgacacacaagagaattcatagtggagagaaacccttcaaatgtgaagaatgtggcaaaggtttttgtgactcctcatcccttacgacacataagagagttcatagtggagaaaaaccctacaaatgtgaagaatgtggcaaaggtttttgcaagtcctcatcccttactacacataaggggaatcatagtggggaaaaaccctacaaatgtgaagaatnnnnnnnnnnnnnnnnnnnnnnnnnnnnnnnnnnnnnnacataagagaattcataatggagcaaagtccttcaaatgtgaagaatgttgcaaagcttttaaccagttttataaacttactgtacataagagaattcatactggagagaaaccctacaaatgtgaagaatgtggaaaagcttttaatcactcctcaatccttgggaaacataagataatccatagtggggaaaaaccctacaaatgtgaagagtgtggcaaagcttttaatcgctcatcaatccttaggaaacataaggtaatccacagtggagaaaaaccctacaaatgtgaagaatgtggcaaggcttttaatcacccatcaacccttagtaaacataagagaattcatagtggagataaaccctacaaatgtgaagaatgtggaaaagctttcaagcagttatcaaaccttaatagccataagagaattcatactggagagaagcccttcaaatgtgaaacatgtggcaaagcttttacccagctatcaacccttaggaaacataagataatccatagtggagaaaaaccctacaaatgtgaagaatgtgggaaagcttttaagcagtcatcaacccttatcaaacataagagaattcatagtggagagaaaccgttcaaatgtgaagaatgtggcaaaggcttttgtgattcctcatctcttatgacacataagagaattcatagtggagagaaacccttcaaatgtgaagaatgtggcaaaggcctttgtgactcctcatctcttgcgacacacaagagaattcatagtggagagaaacccttcaaatgtgaagaatgtggcaaaggtttttgtgactcctcatcccttacgacacataagagagttcatagtggagaaaaaccctacaaatgtgaagaatgtggcaaaggtttttgcaagtcctcatcccttactacacataagnnnnnnnnnnnnnnnnnnnnnnnnnnnnnnnnnnnnnnnnnnnnnnnnnnnnnnnnnnnnnnnnnnnnnnnnnnnnnnnnnnnnnnnnnnnnnnnnnnnnnnnnnnnnnnnnnnnnnnnnnnnnnnnnnnnnnnnnnnnnnnnnnnnnnnnnnnnnnnnnnnnnnnnnnnnnnnnnnnnnaagcttttaaccagttttcaaacctaaccacacataagagaattcataatggagcaaagtccttcaaatgtgaagaatgttgcaaagcttttaaccagttttataaacttactgtacataagagaattcatactggagagaaaccctacaaatgtgaagaatgtggaaaagcttttaatcactcctcaatccttgggaaacataagataatccatagtggggaaaaaccctacaaatgtgaagagtgtggcaaagcttttaatcgctcatcaatccttaggaaacataaggtaatccacagtggagaaaaaccctacaaatgtgaagaatgtggcaaggcttttaatcacccatcaacccttagtaaacataagagaattcatagtggagataaaccctacaaatgtgaagaatgtggaaaagctttcaagcagttatcaaaccttaatagccataagagaattcatactggagagaagcccttcaaatgtgaaacatgtggcaaagcttttacccagctatcaacccttaggaaacataagataatccatagtggagaaaaaccctacaaatgtgaagaatgtgggaaagcttttaagcagtcatcaacccttatcaaacataagagaattcatagtggagagaaaccgttcaaatgtgaagaatgtggcaaaggcttttgtgattcctcatctcttatgacacataagagaattcatagtggagagaaacccttcaaatgtgaagaatgtggcaaaggcctttgtgactcctcatctcttgcgacacacaagagaattcatagtggagagaaacccttcaaatgtgaagaatgtggcaaaggtttttgtgactcctcatcccttacgacacataagagagttcatagtggagaaaaaccctacaaatgtgaagaatgtggcaaaggtttttgcaagtcctcatcccttactacacataaggggaatcatagtggggaaaaaccctacaaatgtgaagaat

SEQ ID NO: 28237 - DNA, 764 bp, Macaca Mulatta
gggtcatgccattattgcatattacacaaaagatgcaatgcctatcaacaaagctacaatcatgccccggggaccaacacttggacatgtgtccctgttacctgagaatgacagatggaatgaaactagagcccagctgcttgcacaaatggatgttagtatgggaggaagagtggcagaggagcttatatttggaactgaccatattacaacaggtgcttccagtgattttgataatgccactaaaatagcaaagcggatggttaccaaatttggaatgagtgaaaagcttggagttatgacctacagtgatacagggaaactaagtccagaaacccaatctgccattgaacaagaaataagaatccttctaagggactcatatgaacgagcaaaacatatcttgaaaactcatgcaaaggagcataagaatcttgcagaagctttattgacctatgagactttggatgccaaagagattcaaattgttcttgaggggaaaaagttggaagtgagatgataactctcttgatatggatgcttgctggttttattgcaagaatataagtagcattgcagtagtctacttttgcaacactttcccctcattcttgacgtggtgtaatttgaagggtgtgaaatgcttttgtcaatcattttgtcacattttatcccagtttttggtttaattctcaattatgaacacctaatgcaaattagcatcccatggcaaatatattttgaaaaaataaagaactatcagg

SEQ ID NO: 28238 - DNA, 3586 bp, Macaca Mulatta
  misc_feature (1)...(3586): n = A,T,C or G
aggcagcactatgtgctgttcatgtcatcaggaaagttcctgaacttatggagatgtttttaccagcaacaaaaaatttattgaatgagaagaaccatggnnnnnnnnnnnnnnnnnnnnnnnnnnnnnnnnnnnnnnnnnnnnnnnnnnnnnnnnnnnnnnnnnnnnnnnnnnnnnnnnnnnnnnnnnnnnnnnnnnnnnnnnnnnnnnnnnnnnnnnnnnnnnnnnnnnnnnnnnnnnnnnnnnnnnnnnnnnnnnnnnnnnnnnnnnnnnnnnnnnnnnnnnnnnnnnnnnnnnnnnnnnnnnnnnnnnnnnnnnnnnnnnnnnnnnnnnnnnnnnnnnnnnnnnnnnnnnnnnnnnnnnnnnnnnnnnnnnnnnnnnnnnnnnnnnnnnnnnnnnnnnnnnnnnnnnnnnnnnnnnnnnnnnnnnnnnnnnnnnnnnnnnnnnnnnnnnnnnnnnnnnnnnnnnnnnnnnnnnnnnnnnnnnnnnnnnnnnnnnnnnnnnnnnnnnnnnnnnnnnnnnnnnnnnnnnnnnnnnnnnnnnnnnnnnnnnnnnnnnnnnnnnnnnnnnnnnnnnnnnnnnnnnnnnnnnnnnnnnnnnnnnnnnnnnnnnnnnnnnnngcgtgcaatggaattgagttttgccctggtaaatgggaataatatccgaggcatgatgaaagaattactttattttctggattcctgtgagccagaatttaaagcagattgtgcatctggaatctttcttgctgcagaaaagtannnnnnnnnnnnnnnnnnnnnnnnnnnnnnnnnnnnnnnnnnnnnnnnnnnnnnnnnnnnnnnnnnnnnnnnnnnnnnnnnnnnnnnnnnnnnnnnnnnnnnnnnnnnnnnnnnnnnnnnnnnnnnnnnnnnnnnnnnnnnnnnnnnnnnnnnnnnnnnnnnnnnnnnnnnnnnnnnnnnnnnnnnnnnnnnnnnnnnnnnnnnnnnnnnnnnnnnnnnnnnnnnnnnnnnnnnnnnnnnnnnnnnnnnnnnnnnnnnnnnnnnnnnnnnnnnnnnnnnnnnnnnnnnnnnnnnnnnnnnnnnnnnnnnnnnnnnnnnnnnnnnnnnnnnnnnnnnnnnnnnnnnnnnnnnnnnnnnnnnnnnnnnnnnnnnnnnnnnnnnnnnnnnnnnnnnnnnnnnnnnnnnnnnnnnnnnnnnnnnnnnnnnnnnnnnnnnnnnnnnnnnnnnnnnnnnnnnnnnnnnnnnnnnnnnnnnnnnnnnnnnnnnnnnnnnnnnnggtctgctctacttgagagaatgcctgttatggaaaaagtgaccacaaatggccctactgagattgtgcagacaaatggagagacagaaccagctccactagagaccaaaccgccaccctctgggccacagcccaccagccaggnnnnnnnnnnnnnnnnnnnnnnnnnnnnnnnnnnnnnnnnnnnnnnnnnnnnnnnnnnnnnnnnnnnnnnnnnnnnnnnnnnnnnnnnnnnnnnnnnnnnnnnnnnnnnnnnnnnnnnnnnnnnnnnnnnnnnnnnnnnnnnnnnnnnnnnnnnnnnnnnnnnnnnnnnnnnnnnnnnnnnnnnnnnnnnnnnnnnnnnnnnnnnnnnnnnnnnnnnnnnnnnnnnnnnnnnnnnnnnnnnnnnnnnnnnnnnnnnnnnnnnnnnnnnnnnnnnnnnnnnnnnnnnnnnnnnnnnnnnnnnnnnnnnnnnnnnnnnnnnnnnnnnnnnnnnnnnnnnnnnnnnnnnnnnnnnnnnnnnnnnnnnnnnnnnnnnnnnnnnnnnnnnnnnnnnnnnnnnnnnnnnnnnnnnnnnnnnnnnnnnnnnnnnnnnnnnnnnnnnnnnnnnnnnnnnnnnnnnnnnnnnnnnnnnnnnnnnnnnnnnnnnnnnnnnnnnnnnnnnnnnnnnnnnnnnnnnnnnnnnnnnnnnnnnnnnnnnnnnnnnnnnnnnnnnnnnnnnnnnnnnnnnnnnnnnnnnnnnnnnnnnnnnnnnnnnnnnnnnnnnnnnnnnnnnnnnnnnnnnnnnnnnnnnnnnnnnnnnnnnnnnnnnnnnnnnnnnnnnnnnnnnnnnnnnnnnnnnnnnnnnnnnnnnnnnnnnnnnnnnnnnnnnnnnnnnnnnnnnnnnnnnnnnnnnnnnnnnnnnnnnnnnnnnnnnnnnnnnnnnnnnnnnnnnnnnnnnnnnnnnnnnnnnnnnnnnnnnnnnnnnnnnnnnnnnnnnnnnnnnnnnnnnnnnnnnnnnnnnnnnnnnnnnnnnnnnnnnnnnnnnnnnnnnnnnnnnnnnnnnnnnnnnnnnnnnnnnnnnnnnnnnnnnnnnnnnnnnnnnnnnnnnnnnnnnnnnnnnnnnnnnnnnnnnnnnnnnnnnnnnnnnnnnnnnnnnnnnnnnnnnnnnnnnnnnnnnnnnnnnnnnnnnnnnnnnnnnnnnnnnnnnnnnnnnnnnnnnnnnnnnnnnnnnnnnnnnnnnnnnnnnnnnnnnnnnnnnnnnnnnnnnnnnnnnnnnnnnnnnnnnnnnnnnnnnnnnnnnnnnnnnnnnnnnnnnnnnnnnnnnnnnnnnnnnnnnnnnnnnnnnnnnnnnnnnnnnnnnnnnnnnnnnnnnnnnnnnnnnnnnnnnnnnnnnnnnnnnnnnnnnnnnnnnnnnnnnnnnnnnnnnnnnnnnnnnnnnnnnnnnnnnnnnnnnnnnnnnnagttaaaaagagcttttgttgagatttggcatgaaggatatggtgctctatttgtaatagaaacttccaaggctcttccagctcncctttcgctccattctttagctgtagtcatgaatagtntccatgatattcaaaactgattccctttaaagtacaaaatggtcaccttctaaaagatatattcatagttattaatgaccctgttcccaccgcaaattttaaagtgctcctaaacccataacttgcctgtttgaactatggtaatgggtggaagaggagttcaccagttttaaagatcagactctgtatcaaaagtacctttgcccttaggaagagtgagtattggagtcatctattactccaaacctccctttttatttcctgagcctggcttggaccttggcattccgtttgaattccttctaactggaacatttgtgttgtatctgtaacactggcactgaaataaagaccacacggttaaagaaatctttcctatattgtactttatggtgttggagtgaagccttgtagcttccatacccctatgtcagaggaggtcttacggataccatagggtaggaataacctttcgtcagtctgagaaattggtctcttttaaaagacaaatctcatgagtatccacatcaaagacttgagctttttaaactagtgagagtgccaagtgcttttaagaaaggacccatgtgttatcaaactttgaaattgagtagctggagtgaagtagaggtgactctctctgtggtacacgttgaatgtactatgtacgttcaagtattcaggcgccgtgtcttatatactgaagaaagaaaaagtgaggcccaccttgcacgtaacaatgtttgcaattgttactgtattgaatacagaatagtgactac

SEQ ID NO: 28239 - DNA, 345 bp, Macaca Mulatta
  misc_feature (1)...(345): n = A,T,C or G
agtggatgcgtgcccgctggacctccgacccctgctacgccttcttcggggtggacggcaccgaatgctccttcctcatctacctcagtgaggtcgagtggttctgccccccgctgccctggaggaaccagacggctgcccagagggcacccaagcccctccccaaagtccaggntccaggcagttttccgaagcaacctgtctcacctcctggacctgatgggcagcgggaaggagtccctgatcttcatgaagaagcggaccaagaggctcacagcccagtgggcgctggctgcccagcgcctggcgcagaagctgggggccacccggagggaccagaagcag

SEQ ID NO: 28240 - DNA, 1030 bp, Macaca Mulatta
  misc_feature (1)...(1030): n = A,T,C or G
agatcatacctcactcctgttagggatgaagagtctgaatcccaaagaaaagcaagatctagacaagcaagacaatccagaagatcaggacagggagtgacattaactgatcttcaagaagctgagaaaaccataggaagaagtcgttcatacccgaaccagagaacaagnnnnnnnnnnnnnnnnnnnnnnnnnnnnnnnnnnnnnnnataaagagaaacaagaagaaaagaaggagtcagaaacatctagagaagacgaatataaacaaaaatactccagaacgtatgatgagacttaccagcgttataggccagtatcaacttcaagttcagccactccatcctcttcactttctactatgagcagttcactctatgcttcaagtcaactaaacaggccaaatagtcttgtaggcataacttcttactccagaggaataacaaaagaaaatgaaagagagggagaaaaaagagaagaggaaaaagaaggagaagataaatcacaatctaaatcaattagagaacgacggcgaccaagagagaaaagaagatctacaggagtttcattttggacacaagatagtgatgaaaatgaacaagaacaacaatcagacacagaagagggatccaataagaaagaaactcagacggattccatttctagatatgaaaccagttctacatcagctggtgatcgatatgattccttgctgggtcgctctggatcatacagttacttagaagaaagaaaaccttacagcagcaggctagaaaaggatgactcaactgactttaaaaagctttatgaacaaattctcgctgaanatgaanagctgaaggcacagctacatgatacaaatatggaactaacagatcttnaattacagttggaaaaaggcacccagagacnagaaagatttgctgataggtcactgttggnaaatgggannaaagggaaccngaagagctctagaaagaagaatatctgaanatgggaagaagaagctcaaaaatgtttacccagaccc

SEQ ID NO: 28241 - DNA, 702 bp, Macaca Mulatta
  misc_feature (1)...(702): n = A,T,C or G
ggttgaagaatatatcactcctgaaaaattcaaatactgggagaaagtaggaaatgaacttggatttcattatactgcaagtggccctttggtgcgttcttcatataaagcaggtnnnnnnnnnnnnnnnnnnnnnnnnnnnnnnnnnnnnnnnnnnnnnnnnnnnnnnnnnnnnnnnnnnnnnnnnnnnnnnnnnnnnnnnnnnnnnnnnnnnnnnnnnnnnnnnnnnnnnnnnnnnnnnnnnnnnnnnnnnnnnnnnnnnnnnnnnnnnnnnnnnnnnnnnnnnnnnnnnnnnnnnnnnaggcatggtggctcacacctataatcccaacattttgggaggccaaggcaggcagatcacttgagcccaggagttcgagaccagcctgagcaacatggtgnnnnnnnnnnnnnnnnnnnnnacaaaaattagccgggcgtggtggcgggtgcctgtaatcccagctactcggtagactgaggcagaagaatcacttgaacctgggagggggagggaggttgcagtgagccgagatcgcaccattgccttccagcctgggtgacgagcaaaactccatctnnnnnnnnnnnnnnnnnnnnnnngtcaataaactacagatttaattacagtaattcatttggctttttgtatatcttctttgtcccaataaacagttgcttgctgtgatgtaatcttaaaat

SEQ ID NO: 28242 - DNA, 1893 bp, Macaca Mulatta
  misc_feature (1)...(1893): n = A,T,C or G
nagcgctggccgccggcagcctctgcggcagcgctagtcgcctcctccgaatcggctccgcacannnnnnnnnnnnnnnnnnnnnnnnnnnnnnnnnnnnnnnnnnnnnnnnnnnnnnnnnnnnnnnnnnnnnnnnnnnnnnnnnnnnnnnnnnnnnnnnnnnnnnnnnnnnnnnnnnnnnnnnnnnnnnnnnnnnnnnnnnnnnnnnnnnnnnnnnnnnnnnnnnnnnnnnnnnnnnnnnnnnnnnnnnnnnnnnnnnnnnnnnnnnnnnnnnnnnnnnnnnnnnnnnnnnnnnnnnnnnnnnnnnnnnnnnnnnnnnnnnnnnnnnnnnnnnnnnnnnnnnnnnnnnnnnnnnnnnnnnnnnnnnnnnnnnnnnnnnnnnnnnnnnnnnnnnnnnnnnnnnnnnnnnnnnnnnnnnnnnnnnnnnnnnnnnnnnnnnnnnnnnnnnnnnnnnnnnnnnnnnnnnnnnnnnnnnnnnnnnnnnnnnnnnnnnnnnnnnnnnnnnnnnnnnnnnnnnnnnnnnnnnnnnnnnnnnnnnnnnnnnnnnnnnnnnnnnnnnnnnnnnnnnnnnnnnnnnnnnnnnnnnnnnnnnnnnnnnnnnnnnnnnnnnnnnnnnnnnnnnnnnnnnnnnnnnnnnnnnnnnnnnnnnnnnnnnnnnnnnnnnnnnnnnnnnnnnnnnnnnnnnnnnnnnnnnnnnnnnnnnnnnnnnnnnnnnnnnnnnnnnnnnnnnnnnnnnnnnnnnnnnnnnnnnnnnnnnnnnnnnnnnnnnnnnnnnnnnnnnnnnnnnnnnnnnnnnnnnnnnnnnnnnnnnnnnnnnnnnnnnnnnnnnnnnnnnnnnnnnnnnnnnnnnnnnnnnnnnnnnnnnnnnnnnnnnnnnnnnnnnnnnnnnnnnnnnnnnnnnnnnnnnnnnnnnnnnnnnnnnnnnnnnnnnnnnnnnnnnnnnnnnnnnnnnnnnnnnnnnnnnnnnnnnnnnnnnnnnnnnnnnnnnnnnnnnnnnnnnnnnnnnnnnnnnnnnnnnnnnnnnnnnnnnnnnnnnnnnnnnnnnnnnnnnnnnnnnnnnnnnnnnnnnnnnnnnnnnnnnnnnnnnnnnnnnnnnnnnnnnnnnnnnnnnnnnnnnnnnnnnnnnnnnnnnnnnnnnnnnnnnnnnnnnnnnnnnnnnnnnnnnnnnnnnnnnnnnnnnnnnnnnnnnnnnnnnnnnnnnnnnnnnnnnnnnnnnnnnnnnnnnnnnnnnnnnnnnnnnnnnnnnnnnnnnnnnnnnnnnnnnnnnnnnnnnnnnnnnnnnnnnnnnnnnnnnnnnnnnnnnnnnnnnnnnnnnnnnnnnnnnnnnnnnnnnnnnnnnnnnnnnnnnnnnnnnnnnnnnnnnnnnnnnnnnnnnnnnnnnnnnnnnnnnnnnnnnnnnnnnnnnnnnnnnnnnnnnnnnnnnnnnnnntggggaatagcagcatagcgtggtctcttggctacatgctcagcctgaccaaccagataccagctgaaagccctctgatccgtctgcccatagaaccacctgtctttgtgggcacccttgctttcttcacagcggcagccttgctgtgtctggcatttcttgcgtacctgtgttcagcatccagaaaaaagaggcactccgagcatgcctttgaccaggcagtggattctgactgagccttcaaagcagctcctggagtccagtggctgcttagagtcagcctgggtggcaccaggcaacacaggtaaagtggctgccttcaggaaatacaactaactaaaatcaaacacctaggtcacgtgcctctcaaatactgatttctgccacagtacctcttggggcgtcccttggctattctgtgcatattgctcttcagagacctcactacccatgtgctgatctat

SEQ ID NO: 28243 - DNA, 704 bp, Macaca Mulatta
agcagcacggcatccacctgcaacatgacgctactcttctccttcgcccaggctgtggcctgtgccgaggcaggtgtgaccctcatctccccatttgttgggcgcatccttgattggcatgtggcaaacaccgacaagaaatcctacgagcccctggaagaccctggggtaaagagtgtcactaaaatctacaactactacaagaagtttggctacaaaaccattgtcatgggcgcctccttccgcaacacgggcgagatcaaagcactggccggctgtgacttcctcaccatctcacccaagctcctgggagagctgctccaggacaatgccaagctggtgcctgtgctctcagccaaggcggcccaagccagtgacctggaaaaaatccacctggatgagaagtctttccgctggttgcacaacgaggaccagatggctgtggagaagctctctgacgggatccgcaagtttgccgctgacgcagtgaagctggagcggatgctgacagaacaaatgttcaatgcagagaacggaaagtagtgcaatcctgagggtggactccagatctgcaccgtcggccagctggggtctgactgcacatggcttctcatgaatcttgcgttttttacaaattggagcagggacagatcatagatttctgattttatgtaaaattttgcctaatacattaaagcagtcac

SEQ ID NO: 28244 - DNA, 454 bp, Macaca Mulatta
  misc_feature (1)...(454): n = A,T,C or G
gatcagtgtgcgtgtgaccaccatggatgcagagctggagtttgccatccagcccaacaccaccgggaagcagctatttgaccaggnnnnnnnnnnnnnnnnnnnnnnnnnnnnnnnnnnnnnnnnnnnnnnnnnnnnnnnnnnnnnnnnnnnnnnnnnnnnnnnnnnnnnnnnnnnnnnnnnnnnnnnnnnnnnnnnnnnnnnnnnnnnnnnnnnnnnnnnnnnnnnnnnnnnnnnnnnnnnnnnnnnnnnnnnnnnnnnnnnnnnnnnnnnnnnnnnnnnnnnnnnnnnnnnnnnnnnnnnnnnnnnnnnnnnnnnnnnnnnnnnnnnnnnnnnnnnnnnnnnnnnnnnnnnnnnnnnnnnnnnnnnnnnnnnnnnnnnnnnnnnnnnnnnnnnnnnnntaaggaggtgcataagtctggctacctggccggagacaagttgctcccacaga

SEQ ID NO: 28245 - DNA, 215 bp, Macaca Mulatta
agagcccaggctaccagagcacctgtccctcggccgcctggcacggctcctgctctcagcaggtgacgctcgcggcctggaaggggaaggtgtccgtggagcccccacccaccctcagcggttcccgtcaccactgcagttccagcccgagtctcagctgccctgggacccgtgtgcagatgcttgtgtgatggatggtcctaagcctgtggaga

SEQ ID NO: 28246 - DNA, 143 bp, Macaca Mulatta
aaaagcagttggaaaacgtttgcaagactatgaatatagaattgctgcttttatattttaactgcagattgtgaatttcactgccttatattatttatttctgaaacaaaagaggcatttttcaataaaactactgaaaattt

SEQ ID NO: 28247 - DNA, 6128 bp, Macaca Mulatta
  misc_feature (1)...(6128): n = A,T,C or G
ggcccctgattgctaagaagaatcctaagatcccaatgtctaagatgatgaccatccttggggccaaatggagagagttcagcgccaacaaccccttcaaggggtnnnnnnnnnnnnnnnnnnnnnnnnnnnnnnnnnnnnnnnnnnnnnnnnnnnnnnnnnnnnnnnnnnnnnnnnnnnnnnnnnnnnnnnnnnnnnnnnnnnnnnnnnnnnnnnnnnnnnnnnnnnnnnnnnnnnnnnnnnnnnnnnnnnnnnnnnnnnnnnnnnnnnnnnnnnnnnnnnnnnnnnnnnnnnnnnnnnnnnnnnnnnnnnnnnnnnnnnnnnnnnnnnnnnnnnnnnnnnnnnnnnnnnnnnnnnnnnnnnnnnnnnnnnnnnnnnnnnnnnnnnnnnnnnnnnnnnnnnnnnnnnnnnnnnnnnnnnnnnnnnnnnnnnnnnnnnnnnnnnnnnnnnnnnnnnnnnnnnnnnnnnnnnnnnnnnnnnnnnnnnnnnnnnnnnnnnnnnnnnnnnnnnnnnnnnnnnnnnnnnnnnnnnnnnnnnnnnnnnnnnnnnnnnnnnnnnnnnnnnnnnnnnnnnnnnnnnnnnnnnnnnnnnnnnnnnnnnnnnnnnnnnnnnnnnnnnnnnnnnnnnnnnnnnnnnnnnnnnnnnnnnnnnnnnnnnnnnnnnnnnnnnnnnnnnnnnnnnnnnnnnnnnnnnnnnnnnnnnnnnnnnnnnnnnnnnnnnnnnnnnnnnnnnnnnnnnnnnnnnnnnnnnnnnnnnnnnnnagaaggagggggtccagtgggaggccnnnnnnnnnnnnnnnnnnnnnnnnnnnnnnnnnnnnnnnnnnnnnnnnnnnnnnnnnnnnnnnnnnnnnnnnnnnnnnnnnnnnnnnnnnnnnnnnnnnnnnnnnnnnnnnnnnnnnnnnnnnnnnnnnnnnnnnnnnnnnnnnnnnnnnnnnnnnnnnnnnnnnnnnnnnnnnnnnnnnnnnnnnnnnnnnnnnnnnnnnnnnnnntgccctgtgctgaagggtcgagtgcagaagatcttgcattggcggtggggggagccgcctgtagcaatgccagcccctcaacaggcagacgggaatccagatgtcccagccccgcgtcctctacgaggcagatcagagcgagagttctttgtcaagtgggtgagagtatcctactggcactgctcctgggccaaggagcttcagnnnnnnnnnnnnnnnnnnnnnnnnnnnnnnnnnnnnnnnnnnnnnnnnnnnnnnnnnnnnnnnnnnnnnnnnnnnnnnnnnnnnnnnnnnnnnnnnnnnnnnnnnnnnnnnnnnnnnnnnnnnnnnnnnnnnnnnnnnnnnnnnnnnnnnnnnnnnnnnnnnnnnnnnnnnnnnnnnnnnnnnnnnnnnnnnnnnnnnnnnnnnnnccacagtgtggataaaaaggggaattaccactatctagtaaaatggagggacttgccatatgaccagtccacggggaggaagatgaaatgaatatccctgaatatgaagaacataagcaaagctnnnnnnnnnnnnnnnnnnnnnnnnnnnnnnnnnnnnnnnnnnnnnnnnnnnnnnnnnnnnnnnnnnnnnnnnnnnnnnnnnnnnnnnnnnnnnnnnnnnnnnnnnnnnnnnnnctaccgtgaaatatgagactcagccacggtttatcacagccactggaggcaccctgcacatgtaccagctggaagggctgaactggctgcgcttctcctgggcccagggcactgataccattctagctgatgagatggggctgggcaagaccatacaaactattgtcttcctctactcactctataaggaggnnnnnnnnnnnnnnnnnnnnnnnnnnnnnnnnnnnnnnnnnnnnnnnnnnnnnnnnnnnnnnnnnnnnnnnnnnnnnnnnnnnnnnnnnnnnnnnnnnnnnnnnnnnnnnnnnnnnnnnnnnnnnnnnnnnnnnnnnnnnnnnnnnnnnnnnnnnnnnnnnnnnnnnnnnnnnnnnnnnnnnnnnnnnnnnnnnnnnnnnnnnnnnnnnnnnnnnnnnnnnnnnnnnnnnnnnnnnnnnnnnnnnnnnnnnnnnnnnnnnnnnnnnnnnnnnnnnnnnnnnnnnnnnnnnnnnnnnnnnnnnnnnnnnnnnnnnnnnnnnnnnnnnnnnnnnnnnnnnnnnnnnnnnnnnnnnnnnnnnnnnnnnnnnnnnnnnnnnnnnnnnnnnnnnnnnnnnnnnnnnnnnnnnnnnnnnnnnnnnnnnnnnnnnnnnnnnnnnnnnnnnnnnnnnnnnnnnnnnnnncaacttggagggcttcctggaggagtttgctgacatatccaaagaggaccagatcaagaaactgcatgatttgctggggccacatatgctacggaggctcaaggcagatgtctttaagaacatgccagccaagacagagctcatcgttcgggtggagctaagccccatgcagaannnnnnnnnnnnnnnnnnnnnnnnnnnnnnnnnnnnnnnnnnnnnnnnnnnnnnnnnnnnnnnnnnnnnnnnnnnnnnnnnnnnnnnnnnnnnnnnnnnnnnnnnnnnnnnnnnnnnnnnnnnnnnnnnnnnnnnnnnnnnnnnnnnnnnnnnnnnnnnnnnnnnnnnnnnnnnnnnnnnnnnnnnnnnnnnnnnnnnnnnnnnnnnnnnnnnnnnnnnnnnnnnnnnnnnnnnnnnnnnnnnnnnnnnnnnnnnnnnnnnnnnnnnnnnnnnnnnnnnnnnnnnnnnnnnnnnnnnnnnnnnnnnnnnnnnnnnnnnnnnnnnnnnnnnnnnnnnnnnnnnnnnnnnnnnnnnnnnnnnnnnnnnnnnnnnnnnnnnnnnnnnnnnnnnnnnnnnnnnnnnnnnnnnnnnnnnnnnnnnnnnnnnnnnnnnnnnnnnnnnnnnnnnnnnnnnnnnnnnnnnnnnnnnnnnnnnnnnnnnnnnnnnnnnnnnnnnnnnnnnnnnnnnnnnnnncaggcctttagccgggctcatcggattggccaggccaacaaagtgatgatttaccggtttgtgactcgtgcgtcagtggaagagcgaatcacacaagtggccaaaagaaagatgatgctgacacacctggttgtgcggcctgggctgggctccaaggcaggctccatgtctaagcaggagcttgacgaaagtctcaaatttggcactgaagagctgttcaaggatgaaatcgagggtgagaacnggggagaacaaggaggaagacagcagtgtgattcattatgacaatgaggccatcgctcggctgttggaccggaaccaggatgcaactgaggacactgacgtgcagaacatgaatgagtatctcagctccttcaaagtggcacagtacgtcgtgcgagaagaagacaagnnnnnnnnnnnnnnnnnnnnnnnnnnnnnnnnnnnnnnnnnnnnnnnnnnnnnnnnnnnnnnnnnnnnnnnnnnnnnnnnnnnnnnnnnnnnnnnnnnnnnnnnnnnnnnnnnnnnnnnnnnnnnnnnnnnnnnnnnnnnnnnnnnnnnnnnnnnnnnnnnnnnnnnnnnnnnnnnagacaaccagtcagagtattcggtgggttcagaggaggaggatgaagacttcgatgaacgtcctgaagnnagggcgtagacagtcaaagaggcagctccggaatgagaaagataagccactgcctccactgctggcccgagtcgggggcaacattgaggtnnnnggtgctgggcttcaatacccgtcagcggaaggctttcctcaatgccgtgatgcgctgggggatttttttcaggacgccttcaccacgcagtggttggtgcgggacccgacgggcaagactgagaaggagtttaagnnnnnnnnnnnnnnnnnnnnnnnnnnnnnnnnnnnnnnnnnnnnnnnnnnnnnnnnnnnnnnnnnnnnnnnnnnnnnnnnnnnnnnnnnnnnnnnnnnnnnnnnnnnnnnnnnnnnnnnnnnnnnnnnnnnnnnnnnnnnnnnnnnnnnnnnnnnnnnnnnnnnnnnnnnnnnnnnnnnnnnnnnnnnnnnnnnnnnnnnnnnnnnnnnnnnnnnnnnnnnnnnnnnnnnnnnnnnnnnnnnnnnnnnnnnnnnnnnnnnnnnnnnnnnnnnnnnnnnnnnnnnnnnnnnnnnnnnnnnnnnnnnnnnnnnnnnnnnnnnnnnnnnnnnnnnnnnnnnnnnnnnnnnnnnnnnnnnnnnnnnnnnnnnnnnnnnnnnnnnnnnnnnnnnnnnnnnnnnnnnnnnnnnnnnnnnnnnnnnnnnnnnnnnnnnnnnnnnnnnnnnnnnnnnnnnnnnnnnnnnnnnnnnnnnnnnnnnnnnnnnnnnnnnnnnnnnnnnnnnnnnnnnnnnnnnnnnnnnnnnnnnnnnnnnnnnnnnnnnnnnnnnnnnnnnnnnnnnnnnnncagccacagagtagacgccaggagaaaggggggaggagaagccgatggatggacaggaacccagggagaggccggagnnnnnnnnnnnnnnnnnnnnnnnnnnnnnnnnnnnnnnnnnnnnnnnnnnnnnnnnnnnnnnnnnnnnnnnnnnnnnnnnnnnnnnnnnnnnnnnnnnnnnnnnnnnnnnnnnnnnnnnnnnnnnnnnnnnnnnnnnnnnnnnnnnnnnnnnnnnnnnnnnnnnnnnnnnnnnnnnnnnnnnnnnnnnnnnnnnnnnnnnnnnnnnnnnnnnnnnnnnnnnnnnnnnnnnnnnnnnnnnnnnnnnnnnnnnnnnnnnnnnnnnnnnnnnnnnnnnnnnnnnnnnnnnnnnnnnnnnnnnnnnnnnnnnnnnnnnnnnnnnnnnnnnnnnnnnnnnnnnnnnnnnnnnnnnnnnnnnnnnnnnnnnnnnnnnnnnnnnnnnnnnnnnnnnnnnnnnnnnnnnnnnnnnnnnnnnnnnnnnnnnnnnnnnnnnnnnnnnnnnnnnnnnnnnnnnnnnnnnnnnnnnnnnnnnnnnnnnnnnnnnnnnnnnnnnnnnnnnnnnnnnnnnnnnnnnnnnnnnnnnnnnnnnnnnnnnnnnnnnnnnnnnnnnnnnnnnnnnnnnnnnnnnnnnnnnnnnnnnnnnnnnnnnnnnnnnnnnnnnnnnnnnnnnnnnnnnnnnnnnnnnnnnnnnnnnnnnnnnnnnnnnnnnnnnnnnnnnnnnnnnnnnnnnnnnnnnnnnnnnnnnnnnnnnnnnnnnnnnnnnnnnnnnnnnnnnnnnnnnnnnnnnnnnnnnnnnnnnnnnnnnnnnnnnnnnnnnnnnnnnnnnnnnnnnnnnnnnnnnnnnnnnnnnnnnnnnnnnnnnnnnnnnnnnnnnnnnnnnnnnnnnnnnnnnnnnnnnnnnnnnnnnnnnnnnnnnnnnnnnnnnnnnnnnnnnnnnnnncagccgccaccaacggccctccagtgctggtgaagaaggagaaggaaatggtgggggcgttggtgtcagacgggctggatcggaaggagccccgagccggggaggtgatctgtatagacgactgactggatcccaggcctgcccttcacccaggccccgtccccgaggccgacccccagctcaagcgctggggcctgctgccagccctccaccttccccaccccttgggccatcactgggctaggaacccctttgcccctctctgcagctcctctcttcaagaaggnnnnnnnnnnnnnnnnnnnnnnnnnnnnnnnnnnnnnnnnnnnnnnnnnnnnnnnnnnnnnnnnnnnnnnnnnnnnnnnnnnnnnnnnnnnnnnnnnnnnnnnnnnnnnnnnnnnnnnnnnnnnnnnnnnnnnnnnnnnnnnnnnnnnnnnnnnnnnnnnnnnnnnnnnnnnnnnnnnnnnnnnnnnnnnnnnnnnnnnnnnnnnnnnnnnnnnnnnnnnnnnnnnnnnnnnnnnnnnnnnnnnnnnnnnnnnnnnnnnnnnnnnnnnnnnnnnnnnnnnggagggggacttttagagagggatgaaaatgattcatgggagggaggaagggacgaggaggggtggctgcctgttaccgttccctacctctccccacaatgagggtggagcagttatgagggaggaagtcaattgctgttcagcctcagaataaaggcgccgttcactggctcagtt

SEQ ID NO: 28248 - DNA, 718 bp, Macaca Mulatta
  misc_feature (1)...(718): n = A,T,C or G
aggaagcttgctgtgtgggcctggaagccggcatcaaccccacagaccatctcataacagcctaccgggctcatggctttaccttcacccggggccttnnnnnnnnnnnnnnnnnnnnnnnnnnnnaggacgaaaaggaggttgtgctaaagggaaaggaggatcgatgcacatgtatgccaagaacttctacgggggcaatggcatcgtgggagcgcaggtnnnnnnnnnnnnnnnnnnnnnnnnnnnnnnnnnnnnnnnnnnnnnnnnnnnnnnnnnnnnnnnnnnnnnnnnnnnnnnnnnnnnnnnnnnnnnnnnnnnnnnnnnnnnnnnnnnnnnnnnnnnnnnnnnnnnnnnnnnnnnnnnnnnnnnnnnnnnnnnnnnnnnnnnnnnnnnnnnnnnnnnnnnnnnnnnnnnnnnnnnnnnnnnnnnnnnnnnnnnnnnnnnnnnnnnnnnnnnnnnnnnnnnnnnnnnnnnnnnnnnnnnnnnnnnnnnnnnnnnnnnnnnnnnnnnnnnnnnnnnnnnnnnnnnnnnnnnnnnnnnnnnnnnnnnnnnnnnnnnnnnnnnnnnnnnnnnnnnnnnnnnnnnnnnnnnnnnnnnnnnnnnnagttaccgtacacgagaagaaattcaggaagtaagaagtaagagtgaccctattatgcttctcaaggacaggatggtgaacagcaatcttgccagtgtggaagaactaaag

SEQ ID NO: 28249 - DNA, 743 bp, Macaca Mulatta
ggaaccaaggaaactaattatgtaggttactagtgaataccccaatggtttctccaattatgcccatgccaccaaaacaataaaataaaattctctaacactgcaaagaatgagccatgcctgttaacactgtaaagaatgcaacatgtgggggacacacaggggcaggtgggatggtttaatttaggattttattattgcgtgccctgccctctgggggaacatcccatctgaggttttcttctgggtgggaggatttaactcctgtcctagggaaaacagtgtctgatgaggagtgtttccaacacgggctgcatgaattccccaataccagtgcgaaagcagccaggagtccccgttggaaaagaacaatgccactctcttttatgtatcttggttctgcaactcatttgttgtaagtagcattcatcgagtgtcaggttcacagtatcctgcccttaatattttatgattcactgactcaagttccacgaagtccttagaaatggtcctcttcatgtaaatatcttgagaataataaacgtgagggaataagaaaggcaagctttggacccagatatgataggtgcatcagcttcgaaagagaagaaggatgtacagagtgttaggaagacatctgggctgctgagactcgggattagaagaaggagaggtaaataaagtgggtcctggaatcttttaggacttttgctgcaagacaaacagctgcctttggtgttttt

SEQ ID NO: 28250 - DNA, 700 bp, Macaca Mulatta
ccatggtgcccacatcccgggtgcccgggactctggcaccagtggctacctcccctagtccagcttccaatctcccaccatcctctgcatccacagcaccatcccaggctgagccagcctgcccaccccggcaaacctgtggtgctggggggtcccatgggccaggctggcaagcagcaatggcctccacagccatcatggtacccgtggggctcgtgtttgtggcctttgccctgcatttctaccgctccttggtggcacacaagactgaccgctataagcaggaactagaggaactgaatcgcctgcagggggagctgcaggctgtgtgaggctggtgttagccactgctgcaagcactgcctccctcccgagtctgcaagaggcctcaggggcctatagacctcattccccccatcccctggctggagccacttgcagtggccactctcaggcagaggtcagattcctgcctgcagggtcctctgggctgggccttggggcagctcccacattcccagggattttccccatcagtctgtcccttgggttttgcaagctactctgcacctgggctggcctcagttgaaagatcatgccgtagatataggggaggcagggagagcttgtgggacctttggtgctgaccttagccaccatttccattcctatacaggatgggaagatcacaaggcagcca

SEQ ID NO: 28251 - DNA, 113 bp, Macaca Mulatta
gcaagtgccactgttagaaatggaaatcaggccagccgctggggcggcaagcagcaggaatgcaaatgtccacgacccctcagatccacacaaagccttctgaccttggaatt

SEQ ID NO: 28252 - DNA, 166 bp, Macaca Mulatta
  misc_feature (1)...(166): n = A,T,C or G
agggcttccagctcatctagatgaggagctccaagccacactccacgacttcagacatcaaatcctgcagacaaggggagnagccctcagtctacaggagtccatactggcagtaggagggaaggtcttctccaccaatgggcagtctgccacttttgatgccatt

SEQ ID NO: 28253 - DNA, 720 bp, Macaca Mulatta
  misc_feature (1)...(720): n = A,T,C or G
ggggtctgtggctaaacagcaaattcagaagaaaaatacctggcaattgagtgtgtaacttcaagaataggaatcaagaacatactgtcagctttcaaaagttagtaacctggccttatgccttgcttaatgggaaagtgccattcttaaatttcaaaatgctttcatgtgtcctcttacttaaaaatcagaatctatttgaaataacattttgaatgtttattacagccaggtactcttctaagctcttgtcttaacctctcaaccttggctggaaatagatgcagaggttaagtaacttgctcaagctcagatcataagtagtggaggatttaaaaccaggctggctggctctagggtctatctcttaatttgccatattgtattaatttaccatattgaattatacttatgttcaccaagttaggcattttggcagccattgtttacgtttttattttggaataatttagaaaagttgccagagtaatatgaaagttcttgtgtgatctttaccctcatttttattattttgccacgtttttttcattttctctgtacatgcatttatacatacttcctgagctatttgagagtttgtgcacacttgtgcttcttacccttcctagtacttggcgtatgtccagtatagaatattctatactagagtaaatacaactcnggaatggaactcttactcatattgtntgtgtccatacc

SEQ ID NO: 28254 - DNA, 482 bp, Macaca Mulatta
  misc_feature (1)...(482): n = A,T,C or G
acagactcccagaagatctgagcgagtcgcgtagctgagcccggcaggggctggggttgtgctgctgctatgagctgcaccatcgagaagatcctgacagacgccaagacgcttctggagaggctgcgggagcacgatgcggctgccgagtcgctagtggatcagtcggcagcgctgcaccggcgggtagccgctatgcgggaggcggggacagcgcttccggaccagnccagtatcaagaggatgcatccgatatgaaggacatgtccaaatacaaacctcacattctgctgtctcaagagaacacacagattagagacttgcaacaggaaaacagagnnnnnnnnnnnnnnnnnnnnnnnnnccaggatgctttggagctcatcatgagcaagtaccggaaacagatgttacagttaatggttgctaaaaaagctgtggatgctgaaccagtcctgaaagctcaccagtctcactctgca

SEQ ID NO: 28255 - DNA, 2036 bp, Macaca Mulatta
  misc_feature (1)...(2036): n = A,T,C or G
ggtaaagcgagaaatcttggtggaggttctgaccaaaagaaaaacggtgaccgtcaacgacaagctcatccttccctacagcctcagcgaggnnnnnnnnnnnnnnnnnnnnnnnnnnnnnnnnnnnnnnnnnnnnnnnnnnnnnnnnnnnnnnnnnnnnnnnnnnnnnnnnnnnnnnnnnnnnnnnnnnnnnnnnnnnnnnnnnnntgcctgtccatcggggtcctggacatcttcggatttgaagacttcgagaggaacagcttcgagcagttctgtatcaactacgccaatgagcagctacagtattacttcaaccagcacatcttcaagctggagcannnnnnnnnnnnnnnnnnnnnnnnnnnnnnnnnnnnnnnnnnnnnnnnnnnnnnnnnnnnnnnnnnnnnnnnnnnnnnnnnnnnnnnnnnnnnnnnnnnnnnnnnnnnnnnnnnnnnnnnnnncttcccccacgccacgagccagaccctgctggccaagttcaaacagcagcatgaggacaataagtacttcctgggcaccccggtcatggagccagccttcatcatccagcacttcgcaggaaaggtgaaatatcagatcaagnnggacttccgggagaagaacatggactacatgcggccagacatcgtggccctgctgcggggcagtgacagctcctacgtgcgggagctcattggcatggaccctgtggccgtgttccgctgggccgtgctccgggccgctatccgggccatggctgtgcttcgggagggcggacgcctgcgggccgagagggctgaaaaggctgcaggtnnnnnnnnnnnnnnnnnnnnnnnnnnnnnnnnnnnnnnnnnnnnnnnnnnnnnnnnnnnnnnnnnnnnnnnnnnnnnnnnnnnnnnnnnnnnnnnnnnnnnnnnnnnnnnnnnnnnnnnnnnnnnnnnnnnnnnnnnnnnnnnnnnnnnnnnnnnnnnnnnnnnnnnnnnnnnnnnnnnnnnnnnnnnnnnnnnnnnnnnnnnnnnnnnnnnnnnnnnnnnnnnnnnnnnnnnnnnnnnnnnnnnnnnnnnnnnnnnnnnnnnnnnnnnnnnnnnnnnnnnnnnnnnnnnnnnnnnnnnnnnnnnnnnnnnnnnnnnnnnnnnnnnnnnnnnnnnnnnnnnnnnnnnnnnnnnnnnnnnnnnnnnnnnnnnnnnnnnnnnnnnnnnnnnnnnnnnnnnnnnnnnnnnnnnnnnnnnnnnnnnnnnnnnnnnnnagaaagagctgtgctttgacgacgagctggtcctgcagcagctgcgctacaccggtatgctggagaccgtgcgcatccggaggtcagggtacagtgccaagtacacattccagnnnnnnnnnnnnnnnnnnnnnnnnnnnnnnnnnnnnnnnnnnnnnnnnnnnnnnnnnnnnnnnnnnnnnnnnnnnnnnnnnnnnnnnnnnnnnnnnnnnnnnnnnnnnnnnnnnnnnnnnggtcttcctgaaggagacggagcggcaagccctacaggagacgctacaccgggaggtggtgcggaaaatcctgctgctgcagagctggtttcggatggtgctggagcgtcggcacttcctgcagatgaagcgggccgccgtcaccatccaggcctgctggcggtcctaccgggtccggagggctctggagaggacgcaggccgcggtgtacctccaggccgcatggaggggctactggcagcggaagctctaccggcgccggaaacagagcatcatccgcctgcagagcctctgccgggggcacctgcagcgcaagagnngcttcagccagatgatcttggagaagcagaaggcagaggagaaggagagggaagccctggaagccgaaagagcaggcgctgaggagggcgggctgggtcaggcggccggcgggcagcaggtagctgagcaggggccagagccggcagaggatggcaggcacctggcatcagagcctgaggtgtggccaagtgacaggtccccgccagagcactcctcacctgagaaggaggccc

SEQ ID NO: 28256 - DNA, 136 bp, Macaca Mulatta
tttcctacattttaagtatattacaatctagtatctaaaatattttctctaaatagacaatctcactagctctagccaagtggttattctttaatagaatatactaaaacaaaacacccatacgaagtcaggattt

SEQ ID NO: 28257 - DNA, 881 bp, Macaca Mulatta
gggggctcttcgggtaaagatggcggagcgcgggtacagcttttcgctgactacattcagcccgtctggtaaacttgtccagattgaatatgctttggctgctgtagctggaggagccccgtcagtgggaattaaagctgcaaatggtgtggtattagcaactgagaaaaaacagaaatccattctgtatgatgagcgaagtgtacacaaagtggaaccaattaccaagcatataggtttggtgtacagtggcatgggccccgattacagagtgcttgtgcacagagctcgaaagctagctcaacagtactatcttgtgtaccaagaacccattcctacagctcagctagtacagagagtagcttctgtgatgcaagaatatactcagtcaggtggtgttcgtccatttggagttttctttacttatttgtggttggaatgagggacgaaccatattttatttttcattcagatcccatctgggagcttacttttgcctggaaagcttacagcaatggggaagagaactatgtgaatggggaaaaactttcctttgagaaaaggtataatggagattctgggaactttgaaagatgccattccataccagccatcttaaccccttaaagggaaagcttttgaaagggcacaatggccagagggaattaacctttaagtttggggaatcttgcaatggcaagcctgggatttcagaaaaaatttctctccacctcgaaagtctaggggattacctttggctctgtccttagcgacttatccgcctgaaacttgaatctgaaaaaatccaccaaaatttcacgaaaaaagtcctatcccagcacttataaactgtgttttataagtatgtttttgttcttgca

SEQ ID NO: 28258 - DNA, 864 bp, Macaca Mulatta
gggaactcggtggtggccactgctcagaccagacttcgctcgttttcgtgcgcctcgctccgcttttcctccgcaaccatgtctgacaaacccgatatggctgagatcgagaaattcgataagtcgaaactgaagaagacagagacgcaagagaaaaatccactgccttccaaagaaacgattgaacaggagaagcaagcaggcgaatcgtaatgaggcgtgcgccgccaatatgcactgtacattccacaagcattgccttcttattttacttcttttagctgtttaactttgtaagatgcaaagaggttggatcaagtttaaatgactgtgctgcccctttcacatcaaagaactactgacaacgaaggccgcgcctgcctttcccatctgtctatctggctggcagggaaggaaagaacttgcatgttggtgaaggaagaagtgggggtggaagaagtgggggtggggacgaccgtgaaattctagagtaaaacccaacttgggcccaggtggcctggcaggctgtaatggcggttttaatcacaagggcctttttttttttgccccaaatgggttttatattatcgggaatggccccctctctttttgatttcgcccgcgcgcaggacgccgcggccccaaaaaggagctctgttcgggccgccccggggcccctttaaaaaacctttttctacaaccttttctacttggggccccggtcggtcctcaccctggcaatatgaccctggggccattggtgggcctccccaagcagaagagccgcgggcctcgcacgtagcggggtgcgtggttcctcccccccattgttatgaggcctggcccgtgaggttagccatgcgt

SEQ ID NO: 28259 - DNA, 298 bp, Macaca Mulatta
  misc_feature (1)...(298): n = A,T,C or G
ctccgtggacggccgcatgagacgctatgacctgaggatgggccagctcttctcagactacgtgggcagngccccatcacctgcacctgcttcagccgggacgggcagtgcaccctggtgtccagtctggactccacattgcggctcctggacaaagacacaggggagctgctgggcgagtngtacaagggccataagaaccaggagtacaagctggactgctgcctaagcgagcgtgacacacatgtggtcagctgctctgaggacgggaaggtgttcttctgggacctggtggagg

SEQ ID NO: 28260 - DNA, 831 bp, Macaca Mulatta
  misc_feature (1)...(831): n = A,T,C or G
ccctaggtcccctcgcacccaaaagattgaacttatatgccccctcccaacagcgctttaaaagcgacccctcttgaggtgggagaggcgggagaactgaagtttccgccttctgccacccagggcaaggactcagcgcggttttttccacgcagcacccttcccggagatccattgtgatggccgctccgtgttcctcggtgggccagagctgaaccttgaggggccaagttcagctttctcgcgccctcccccatgggggtgaaaccctcccagacctaagccctgcaccgggatgcaccggtaatttggggggcgtgaggcccaggtgcactcctgtcccaaatgtagcaggtgtaaccgtaacccactcccaacccgttccccggttcaggaccactttttataatacttttgtaatctattactgtaaataagagttgctttgccagagcaggagcccctggggctgtatttatctctgaggcatggtgtgtggtgctacagggaatttgtacgtttataccgcaggcgggcgagccgcgggcgctcgctcaggtgttcaaaataaaggcgctaatttatactgcggtggctccagctttccctgggcatgggagtgggatccggaggaaaatccgcanactgggccagctgtgcctcagcgacccctgtaggcagcaggcggattgcaaggaggaagcctgctgcctggggaaggaaggaggggtgcaaatttgtccaatacgtggggaagttccctctgacttgactacctcaccacacacttccgtggctcttatggaagggtacacaggttgatatgagtat

SEQ ID NO: 28261 - DNA, 703 bp, Macaca Mulatta
cagcctgaacagacaattctggggctggcagtgctgggctttttacctccttggcatttccaagctggcatcttgccccttgacagcagaataaaaattttagctgccccagtttgtgcctccggcatatgaaaaggactgttcgaatccccaaaacatcaggagtcaggaaacttctggaagacagcagcgcctggctctgcagctgcatgcagtgcttcacttggccagcagaggtcatttttgctgagctgccccagccatgagaagagaagcttgcccttgccggcaggtggctgtggctggcccagagccttcctgtgcagctgctgcagccctgctgcctgggatcaggctgggagatgggccttcctgaccgccagccttcctctcccccagcacacgcacatgtagattcggggggaagctgcctgctctttcttagaggagccagggcagttaatctgctggtccctttctgaacaactgttgatgtgtgagctgtgtctgtgtgttatgtgcgtaagcggcggtgtaacatgcacacacatgtactgttccttgtgccctggcttcagctctccagctgccttctcagcctgaaggctgggcttctctgctggcgtgagggcctagattgcatgtcccctgcttactacgcgtcacaaggccagggctgggggcaatgagaaggttggggcaa

SEQ ID NO: 28262 - DNA, 746 bp, Macaca Mulatta
atcctgaacagtctcaagtatgtccgtcctgggggtggataccagcctactttcacccttgtccaaaaatgtgaggtgaatgggcagaatgagcatcctgtcttcgcctacctgaaggacaagctcccctaccctcatgatgacccattttccctcatgaccgatcccaagctcatcatttggagccccgtgcgccgttcagatgtggcctggaactttgagaagttcctcatagggccggagggagagcccttccgacgctacagccgcaccttcccaaccatcaacattgagcctgacatcaagcgcctccttaaagttgccatatagacatgagcttctcagcacacagatctactccatccagtcctgaggagcctcaggatgtagcatgcccccaggagatactgctggacctcagcattcccttgataccagtccccttcactgcagagccttgtctttcccctctgcctgtttccttttcctctcccagccctctggttggtgattcaacttgggctctaagacttgggtaagctctgggccttcacagaatgatggcaccttcctaaaccctcatgggtggtgtctgagaggcgtgaagggcctgaagccaccctgctagaggaaaccaataaagggcacgtgtggaaatggccagcctctgtgtgtcttctttgacagagggcggagggaagctacaaactgcaggtgggatagaggagctgctggcaagcaaagct

SEQ ID NO: 28263 - DNA, 365 bp, Macaca Mulatta
  misc_feature (1)...(365): n = A,T,C or G
ggttccagttacagccatctcttgtcaaaatttttgaactatatttggaaaactactggccaggaaagaaaaatgataaaatttttcctcatggtgaataaacaagggcagactcgactttctaagtactatgaacatgtggatattaataagcgtacacttctggaaacagaagttataaagagctgtctctctcggtccaatgannnnnnnnnnnnnnnnnnnnnnnnnnnnnnnnnnnnnnnnnnnnnnnnnnnnnnnnnnnnnnnnnnnnnnnnnnnnnnnnnnnnnnnnnagaacgagatggctatttatgaattcattcataactttgtggaagttttagatgagtatttcagccgagt

SEQ ID NO: 28264 - DNA, 311 bp, Macaca Mulatta
cattagatgagaccctattgtgttatactgggttcataaatagcactcctccttttcccttcccgcagagtaaaatgaatagaagactcttctctgcacccgaaaagctcaatgctgatggtgagaagggaatgctgggtggaggggttcctagaacccctgtgagggttgctcttccctcagatgtctagaaatgaggcagggtccctacatcttccacccccaaccacggttgccttgcatttcccagctggctctataattcctagaaactaccacttttctgcttccattacttcatggcccagtca

SEQ ID NO: 28265 - DNA, 893 bp, Macaca Mulatta
  misc_feature (1)...(893): n = A,T,C or G
cagcctgcaggaggctcacccgtaacgggctgcctctcattcccgggcgctgacgctgccctctgcgctgcatttcgcctcttcactgttgctcacccgggccggtgccaatgtgcatgaggcctgcacctttgatgacacctctgagggtgctgtgcactatttctacgatgagagcggtgnggtgtgcggcgttcctacacctttggtttggctggaggcggctacgagaaccctgtagggcagcaaggggagcaggcagctaatggagtctggnnnnnnnnnnnnnnnnnnnnnnnnnnnnnnnnnnnnnnnnnnnnnnnnnnnnnnnnnnnnnnnnnnnnnnnnnnnnnnnnnnnnnnnnnnnnnnnnnnnnnnnnnnnnnnnnnnnnnnnnnnnnnnnnnnnnnaggagcagacactgatggaggaagggccaccccgggcccagcatagctataagtactggcttatcgcctggccgctggacctctgtgcgctnnnnnnnnnnnnnnnnnnnnnnnnnnnnnnnnnnnnnnnnnnnnnnnnnnnnnnnnnnnnnnnnnnnnnnnnnnnnnnnnnnnnnnnnnnnnnnnnnnnnnnnnnnnnnnnnnnnnnnnnnnnnnnnnnnnnnnnnnnnnnnnnnnnnnnnnnnnnnnnnnnnnnnnnnnnnnnnnnnnnnnnnngagcgtccagcctgatgcggcgtcccccatgcacgnggccacaactgggtgatcgcgtacagccggcctgtctacttctgcatctgctgtctgctcatctggctgctggacgccctgggctcagctcagcccttcccacctgtctccctctatggcctcacgcttttctccgcctccttcttcttctgtgcccgagacgtggccactg

SEQ ID NO: 28266 - DNA, 266 bp, Macaca Mulatta
cctggagacgaggctgcagaccccttctcacctcttgagggggttctccccctcctggtgctccctcggggtccccctggttgttgtagcagcttaacttaactgtatctggggccaggacctgaactcgcacctcctacctcttcatgtttacatatacccagtatctttgcacaaaccaggggttgggggagggtctctggctttatttttctgctgtgcagaatctaatggtatattttttaaagcccagtttaggtaataaa

SEQ ID NO: 28267 - DNA, 1341 bp, Macaca Mulatta
  misc_feature (1)...(1341): n = A,T,C or G
ggttcttgatgctgttctgcccgtcatgaacaaggcctatggtggtgagaagaccgtgttccgggccaggtttagctccatcacagacacagacatctgtaatgccatggcctgcctgggcgagcctgaccacaacgaggcgctctcagtggatgctcgccaggaactggacctgcgaatcggctgtgcattcaccaggtnnnnnnnnnnnnnnnnnnnnnnnnnnnnnnnnnnnnnnnnnnnnnnnnnnnnnnnnnnnnnnnnnnnnnnnnnnnnnnnnnnnnnnnnnnnnnnnnnnnnnnnnnnnnnnnnnnnnnnnnnnnnnnnnnnnnnnnnnnnnnnnnnnnnnnnnnnnnnnnnnnnnnnnnnnnnnnnnnnnnnnnnnnnnnnnnnnnnnnnnnnnnnnnnnnnnnnnnnnnnnnnnnnnnnnnnnnnnnnnnnnnnnnnnnnnnnnnnnnnnnnnnnnnnnnnnnnnnnnnnnnnnnnnnnnnnnnnnnnnnnnnnnnnnnnnnnnnnnnnnnnnnnnnnnnnnnnnnnnnnnnnnnnnnnnnnnnnnnnnnnnnnnnnnnnnnnnnnnnnnnnnnnnnnnnnnnnnnnnnnnnnnnnnnnnnnnnnnnnnnnnnnnnnnnnnnnnnnnnnnnnnnnnnnnnnnnnnnnnnnnnnnnnnnnnnnnnnnnnnnnnnnnnnnnnnnnnnnnnnnnnnnnnnnnnnnnnnnnnnnnnnnnnnnnnnnnnnnnnnnnnnnnnnnnnnnnnnnnnnnnnnnnnnnnnnnnnnnnnnnnnnnnnnnnnnnnnnnnnnnnnnnnnnnnnnnnnnnnnnnnnnnnnnnnnnnnnnnnnnnnnnnnnnnnnnnnnnnnnnnnnnnnnnnnnnnnnnnnnnnnnnnnnnnnnnnnnnnnnnnnnnnnnnnnnnnnnnnnnnnnnnnnnnnnnnnnnnnnnnnnnnnnnnnnnnnnnnnnnnnnnnnnnnnnnnnnnnnnnnnnnnnnnnnnnnnnnnnnnnnnnnnnnnnnnnnnnnnnnnnnnnnnnnnnnnnnnnnnnnnnnnnnnnnnnnnnnnnnnnnnnnnnnnnnnnnnnnnnnnnnnnnnnnnnnnnnnnnnnnnnnnnnnnnnnnnnnnnnnnnnnnnnnnnnnnnnnnnnnnnngcacagatgccagcatccctgtgcatatcaacattatctgccagcgcaactacgtctccgtggagagcgggcgccggctcaagcccaccaacctcggcatcgtcctggtgcacggctactacaagattgngatgcagagctggtgctccccaccatccgcagtgcagtggagaagcagctgaacctgatcgcccagggca

SEQ ID NO: 28268 - DNA, 6001 bp, Macaca Mulatta
  misc_feature (1)...(6001): n = A,T,C or G
agggactctgccatctccagtaacaagaccccccacaacagctccatcaaccacattgagacggtgctgcagcagctggatgaggcgcagtcgcagatggaggagctcttccaggagcgcaagatcaaactggagctcttcctgcagctgcggatcttcgagagggacgccatcgacnnnnnnnnnnnnnnnnnnnnnnnnnnnnnnnnnnnnnnnnnnnnnnnnnnnnnnnnnnnnnnnnnnnnnnnnnnnnnnnnnnnnnnnnnnnnnnnnnnnnnnnnnnnnnnnnnnnnnnnnnnnnnnnnnnnnnnnnnnnnnnnnnnnnnnnnnnnnnnnnnnnnnnnnnnnnnnnnnnnnnnnnnnnnnnnnnnnnnnnnnnnnnnnnnnnnnnnnnnnnnnnnnnnnnnnnnnnnnnnnnnnnnnnnnnnnnnnnnnnnnnnnnnnnnnnnnnnnnnnnnnnnnnnnnnnnnnnnnnnnnnnnnnnnnnnnnnnnnnnnnnnnnnnnnnnnnnnnnnnnnnnnnnnnnnnnnnnnnnnnnnnnnnnnnnnnnnnnncgcaacggagagtccatgttaaatgccggacttatcacagccagctcattacaagaggcagagcagctccaacgagagcacgagcagttccagcatgccattgagnnnnnnnnnnnnnnnnnnnnnnnnnnnnnnnnnnnnnnnnnnnnnnnnnnnnnnnnnnnnnnnnnnnnnnnnnnnnnnnnnnnnnnnnnnnnnnnnnnnnnnnnnnnnnnnnnnnnnnnnnnnnnnnnnnnnnnnnnnnnnnnnnnnnnnnnnnnnnnnnnnnnnnnnnnnnnnnnnnnnnnnnnnnnncaggtctgcagcgtcctcgagagcctggaacaggagtacaagagagaagaagactggtgtggcggggcggataagctgggcccaaactccgagacagaccacgtgacaccgatgatcagcaagcacctggagcagaaggagacgttccttaagnnnnnnnnnnnnnnnnnnnnnnnnnnnnnnnnnnnnnnnnnnnnnnnnnnnnnnnnnnnnnnnnnnnnnnnnnnnnnnnnnnnnnnnnnnnnnnnnnnnnnnnnnnnnnnnnnnnnnnnnnnnnnnnnnnnnnnnnnnnnnnnnnnnnnnnnnnnnnnnnnnnnnnnnnnnnnnnnnnnnnnnnnnnnnnnnnnnnnnnnnnnnnnnnnnnnnnnnnnnnnnnnnnnnnnnnnnnnnnnnnnnnnnnnnnnnnnnnnnnnnnnnnnnnnnnnnnnnnnnnnnnnnnnnnnnnnnnnnnnnnnnnnnnnnnnnnnnnnnnnnnnnnnnnnnnnnnnnnnnnnnnnnnnnnnnnnnnnnnnnnnnnnnnnnnnnnnnnnnnnnnnnnnnnnnnnnnnnnnnnnnnnnnnnnnnnnnnnnnnnnnnnnnnnnnnnnnnnnnnnnnnnnnnnnnnnnnnnnnnnnnnnnnnnnnnnnnnnnnnnnnnnnnnnnnnnnnnnnnnnnnnnnnnnnnnnnnnnnnnnnnnnnnnnnnnnnnnnnnnnnnnnnnnnnnnnnnnnnnnnnnnnnnnnnnnnnnnnnnnnnnnnnnnnnnnnnnnnnnnnnnnnnnnnnnnnnnnnnnnnnnnnnnnnnnnnnnnnnnnnnnnnnnnnnnnnnnnnnnnnnnnnnnnnnnnnnnnnnnnnnnnnnnnnnnnnnnnnnnnnnnnnnnnnnnnnnnnnnnnnnnnnnnnnnnnnnnnnnnnnnnnnnnnnnnnnnnnnnnnnnnnnnnnnnnnnnnnnnnnnnnnnnnnnnnnnnnnnnnnnnnnnnnnnnnnnnnnnnnnnnnnnnnnnnnnnnnnnnnnnnatattcctaaaggagctggaaaaatatgaacagttgccagaggatgttggacattgttttgttacttgggnnnnnnnnnnnnnnnnnnnnnnnnnnnnnnnnnnnnnnnnnnnnnnnnnnnnnnnnnnnnnnnnnnnnnnnnnnnnnnnnnnnnnnnnnnnnnnnnnnnnnnnnnnnnnnnnnnnnnnnnnnnnnnnnnnnnnnnnnnnnnnnnnnnnnnnnnnnnnnnnnnnnnnnnnnnnnnnnnnnnnnnnnnnnnnnnnnnnnnnnnnnnnnnnnnnnnnnnnnnnnnnnnnnnnnnnnnnnnnnnnnnnnnnnnnnnnnnnnnnnnnnnnnnnnnnnnnnnnnnnnnnnnnnnnnnnnnnnnnnnnnnnnnnnnnnnnnnnnnnnnnnnnnnnnnnnnnnnnnnnnnnnnnnnnnnnnnnnnnnnnnnnnnnnnnnnnnnnnnnnnnnnnnnnnnnnnnnnnnnnnnnnnnnnnnnnnnnnnnnnnnnnnnnnnnnnnnnnnnnnnnnnnnnnnnnnnnnnnnnnnnnnnnnnnnnnnnnnnnnnnnnnnnnnnnnnnnnnnnnnnnnnnnnnnnnnnnnnnnnnnnnnnnnnnnnnnnnnnnnnnnnnnnnnnnnnnnnnnnnnnnnnnnnnnnnnnnnnnnnnnnnnnnnnnnnnnnnnnnnnnnnnnnnnnnnnnnnnnnnnnnnnnnnnnnnnnnnnnnnnnnnnnnnnnnnnnnnnnnnnnnnnnnnnnnnnnnnnnnnnnnnnnnnnnnnnnnnnnnnnnnnnnnnnnnnnnnnnnnnnnnnnnnnnnnnnnnnnnnnnnnnnnnnnnnnnnnnnnnnnnnnnnnnnnnnnnnnnnnnnnnnnnnnnnnnnnnnnnnnnnnnnnnnnnnnnnnnnnnnnnnnnnnnnnnnnnnnnnnnnnnnnnnnnnnnnnnnnnnnnnnnnnnnnnnnnnnnnnnnnnnnnnnnnnnnnnnnnnnnnnnnnnnnnnnnnnnnnnnnnnnnnnnnnnnnnnnnnnnnnnnnnnnnnnnnnnnnnnnnnnnnnnnnnnnnnnnnnnnnnnnnnnnnnnnnnnnnnnnnnnnnnnnnnnnnnnnnnnnnnnnnnnnnnnnnnnnnnnnnnnnnnnnnnnnnnnnnnnnnnnnnnnnnnnnnnnnnnnnnnnnnnnnnnnnnnnnnnnnnnnnnnnnnnnnnnnnnnnnnnnnnnnnnnnnnnnnnnnnnnnnnnnnnnnnnnnnnnnnnnnnnnnnnnnnnnnnnnnnnnnnnnnnnnnnnnnnnnnnnnnnnnnnnnnnnnnnnnnnnnnnnnnnnnnnnnnnnnnnnnnnnnnnnnnnnnnnnnnnnnnnnnnnnnnnnnnnnnnnnnnnnnnnnnnnnnnnnnnnnnnnnnnnnnnnnnnnnnnnnnnnnnnnnnnnnnnnnnnnnnnnnnnnnnnnnnnnnnnnnnnnnnnnnnnnnnnnnnnnnnnnnnnnnnnnnnnnnnnnnnnnnnnnnnnnnnnnnnnnnnnnnnnnnnnnnnnnnnnnnnnnnnnnnnnnnnnnnnnnnnnnnnnnnnnnnnnnnnnnnnnnnnnnnnnnnnnnnnnnnnnnnnnnnnnnnnnnnnnnnnnnnnnnnnnnnnnnnnnnnnnnnnnnnnnnnnnnnnnnnnnnnnnnnnnnnnnnnnnnnnnnnnnnnnnnnnnnnnnnnnnnnnnnnnnnnnnnnnnnnnnnnnnnnnnnnnnnnnnnnnnnnnnnnnnnnnnnnnnnnnnnnnnnnnnnnnnnnnnnnnnnnnnnnnnnnnnnnnnnnnnnnnnnnnnnnnnnnnnnnnnnnnnnnnnnnnnnnnnnnnnnnnnnnnnnnnnnnnnnnnnnnnnnnnnnnnnnnnnnnnnnnnnnnnnnnnnnnnnnnnnnnnnnnnnnnnnnnnnnnnnnnnnnnnnnnnnnnnnnnnnnnnnnnnnnnnnnnnnnnnnnnnnnnnnnnnnnnnnnnnnnnnnnnnnnnnnnnnnnnnnnnnnnnnnnnnnnnnnnnnnnnnnnnnnnnnnnnnnnnnnnnnnnnnnnnnnnnnnnnnnnnnnnnnnnnnnnnnnnnnnnnnnnnnnnnnnnnnnnnnnnnnnnnnnnnnnnnnnnnnnnnnnnnnnnnnnnnnnnnnnnnnnnnnnnnnnnnnnnnnnnnnnnnnnnnnnnnnnnnnnnnnnnnnnnnnnnnnnnnnnnnnnnnnnnnnnnnnnnnnnnnnnnnnnnnnnnnnnnnnnnnnnnnnnnnnnnnnnnnnnnnnnnnnnnnnnnnnnnnnnnnnnnnnnnnnnnnnnnnnnnnnnnnnnnnnnnnnnnnnnnnnnnnnnnnnnnnnnnnnnnnnnnnnnnnnnnnnnnnnnnnnnnnnnnnnnnnnnnnnnnnnnnnnnnnnnnnnnnnnnnnnnnnnnnnnnnnnnnnnnnnnnnnnnnnnnnnnnnnnnnnnnnnnnnnnnnnnnnnnnnnnnnnnnnnnnnnnnnnnnnnnnnnnnnnnnnnnnnnnnnnnnnnnnnnnnnnnnnnnnnnnnnnnnnnnnnnnnnnnnnnnnnnnnnnnnnnnnnnnnnnnnnnnnnnnnnnnnnnnnnnnnnnnnnnnnnnnnnnnnnnnnnnnnnnnnnnnnnnnnnnnnnnnnnnnnnnnnnnnnnnnnnnnnnnnnnnnnnnnnnnnnnnnnnnnnnnnnnnnnnnnnnnnnnnnnnnnnnnnnnnnnnnnnnnnnnnnnnnnnnnnnnnnnnnnnnnnnnnnnnnnnnnnnnnnnnnnnnnnnnnnnnnnnnnnnnnnnnnnnnnnnnnnnnnnnnnnnnnnnnnnnnnnnnnnnnnnnnnnnnnnnnnnnnnnnnnnnnnnnnnnnnnnnnnnnnnnnnnnnnnnnnnnnnnnnnnnnnnnnnnnnnnnnnnnnnnnnnnnnnnnnnnnnnnnnnnnnnnnnnnnnnnnnnnnnnnnnnnnnnnnntgcggtggtgcccccagcacgagcaggagccggccctcccggatcccccagcctgtccgacaccacccccccgtgctggtctcctctgcagcctcgagccaggcagaggcagacaagatgtcannnnnnnnnnnnnnnnnnnnnnnnnnnnnnnnnnnnnnnnnnnnnnnnnnnnnnnnnnnnnnnnnnnnnnnnnnnnnnnnnnnnnnnnnnnnnnnnnnnnnnnnnnnnnnnnnnnnnnnnnnnnnnnnnnnnnnnnnnnnnnnnnnnnnnnnnnnnnnnnnnnnnnnnnnnnnnnnnnnnnnnnnnnnnnnnnnnnnnnnnnnnnnnnnnnnnnnnnnnnnnnnnnnnnnnnnnnnnnnnnnnnnnnnnnnnnnnnnnnnnnnnnnnnnnnnnnnnnnnnnnnnnnnnnnnnnnnnnnnnnnnnnnnnnnnnnnnnnnnnnnnnnnnnnnnnnnnnnnnnnnnnnnnnnnnnnnnnnnnnnnnnnnnnnnnnnnnnnnnnnnnnnnnnnnnnnnnnnnnnnnnnnnnnnnnnnnnnnnnnnnnnnnnnnnnnnnnnnnnnnnnnnnnnnnnnnnnnnnnnnnnnnnnnnnnnnnnnnnnnnnngtcgagtctgtggccgccccatagcctcaattacctggaagggccctgaacacaacaccttgaacaacgatggtcactacagcatctcctacagncagtgacctgggagaggccactctgaagattgtgggcgtgaccacggaagatgacggcatctacacgtgcatcgctgtcaatgacatgggttcagcctcatcgtcggccagcctgagggtcctaggtnnnnnnnnnnnnnnnnnnnnnnnnnnnnnnnnnnnnnnnnnnnnnnnnnnnnnnnnnnnnnnnnnnnnnnnnnnnnnnnnnnnnnnnnnnnnnnnnnnnnnnnnnnnnnnnnnnnnnnnnnnnnnnnnnnnnnnnnnnnnnnnnnnnnnnnnnnnnnnnnnnnnnnnnnnnnnnnnnnnnnnnnnnnnnnnnnnnnnnnnnnnnnnnnnnnnnnnnnnnnnnnnnnnnnnnnnnnnnnnnnnnnnnnnnnnnnnnnnnnnnnnnnnnnnnnnnnnnnnnnnnaccagggtcgcctcctggactgcgtggtgcgatggggaagcctcaccgaaggcaagatcagggcgcacctgggggaggttctggaagctgtccggtacctgcacaactgcaggatagcacacctggacctaaag

SEQ ID NO: 28269 - DNA, 385 bp, Macaca Mulatta
  misc_feature (1)...(385): n = A,T,C or G
gctcaatgaaatccttccttcctgtccacatcaccgtgcttatcagggagaatgtgtgcaagtgtggctatgcccagagccagcacatggagggcacccagatcaaccaaagcgagaaatggaactacaagaaacacaccaaggaatttcctacggacgcctttggggatattcagtttgagacactggggaagaaagggaanagtatatccgtctgtcctgcgacacggacgcagaaatcctctacgagctgctgacccagcactggcacctgaaaacacccaacctggtcatttccgtgaccgggggcgccaagaacttcgccctgaagccgcgcatgcgcaagatcttcagccggctcatctacatcgcgcagtccaaaggt

SEQ ID NO: 28270 - DNA, 192 bp, Macaca Mulatta
atggcggcggccgcctccaatgccggggcttcggcccctgaggcagcgggttccgccgaagctccgctgcagtacagccttctcctgcagtacctggtgggtgacaagcgtcagccccggctcctggagcctgggagcctgggcgggatcccaagtccagccaagagtgaggagcagaagatggtcaagaag

SEQ ID NO: 28271 - DNA, 174 bp, Macaca Mulatta
actgtggtacagacctccatgagccggtcccaggtagccctgctgggcctgggtctgctgctcattttcctactgtatgtggggctgccaggccccccagagcacaattcctggatttgcgtagaccccaatgccactgtcctggctggacttactcctggcaactcccccatc

SEQ ID NO: 28272 - DNA, 661 bp, Macaca Mulatta
agggtgactccgggggacccctggtctgtgggggcgtcctgcagggcattgtgtcctggggtgatgtgccttgtgacaacaccaccaagcctggtgtctataccaaagtctgccactacttgaagtggatcagggaaaccatgaagaggaactgactattctggcctattacctgtgcccctgactgagcagaggcctccacagctggccagcagccccacctgacatggaacagaatggagccatcccccaagaccctgtccaaggcccagatgttagccaaggattgtcccacctgaggacaaagctggtgctcaaggtcacctgtttaatgccaagataacaaagcactgatccaagcttctctgtaggaatttctgtgacttttttctggggtcaaagggaaacccagagacactgtacactgttccttttcacccaccaccccgatccctaggtgaggtgaagcggcttgaagcagggctccattcattcaacacacatgaccacccatgtgatcttgaacaagaggcccaatctcccttggccttggtttccccatctgtaaaatgagaccatcttattgctgacttcaaagggctattttgaggattaaatgagatgattcctctgaactgattaaaatagtgtctggcactga

SEQ ID NO: 28273 - DNA, 4254 bp, Macaca Mulatta
  misc_feature (1)...(4254): n = A,T,C or G
agttgaagctttatatcaaactacatacccagaatatctccagtacatttatttggtggcaccaatatctcttatgatgttaaaccctatagggtttatcttctgtgaaatccaaaagtggaaagacactcaaaatgcttctcaaaataaagtaaaaattgtgggacttggactcctgcgtgtattacagaacccaatagtatttatggtcttcattggcatcgccttcaattttattcttgatcgaaaggtacctgtatatgtcgaaaattttcttgatggacttggaaattctttttctggatcagccctattttaccttggtctcacgatggtgggaaaaataaagagactgaagaagtcagcatttgttgtactaattcttctcatcacagctaaacnnnnnnnnnnnnnnnnnnnnnnnnnnnnnnnnnnnnnnnnnnnnnnnnnnnnnnnnnnnnnnnnnnnnnnnnnnnnnnnnnnnnnnnnnnnnnnnnnnnnnnnnnnnnnnnnnnnnnnnnnnnnnnnnnnnnnnnnnnnnnnnnnnnnnnnnnnnnnnnnnnnnnnnnnnnnnnnnnnnnnnnnnnnnnnnnnnnnnnnnnnnnnnnnnnnnnnnnnnnnnnnnnnnnnnnnnnnnnnnnnnnnnnnnnnnnnnnnnnnnnnnnnnnnnnnnnnnnnnnnnnnnnnnnnnnnnnnnnnnnnnnnnnnnnnnnnnnnnnnnnnnnctggtctctggctattcttcttttgagtaagaagtataaacagcttcctcatatgcttacaactaatttactcattgctcagnagtctattgtctgtgctggaatgatgatatggaattttgttaaagaaaaaaattttgttggacaaattttggtgtttgttctgttgtacagctccctctatagcacctacctgtggacaggnnnnnnnnnnnnnnnnnnnnnnnnnnnnnnnnnnnnnnnnnnnnnnnnnnnnnnnnnnnnnnnnnnnnnnnnnnnnnnnnnnnnnnnnnnnnnnnnnnnnnnnnnnnnnnnnnnnnnnnnnnnnnnnnnnnnnnnnnnnnnnnnnnnnnnnnnnnnnnnnnnnnnnnnnnnnnnnnnnnnnnnnnnnnnnnnnnnnnnnnnnnnnnnnnnnnnnnnnnnnnnnnnnnnnnnnnnnnnnnnnnnnnnnnnnnnnnnnnnnnnnnnnnnnnnnnnnnnnnnnnnnnnnnnnnnnnnnnnnnnnnnnnnnnnnnnnnnnnnnnnnnnnnnnnnnnnnnnnnnnnnnnnnnnnnnnnnnnnnnnnnnnnnnnnnnnnnnnnnnnnnnnnnnnnnnnnnnnnnnnnnnnnnnnnnnnnnnnnnnnnnnnnnnnnnnnnnnnnnnnnnnnnnnnnnnnnnnnnnnnnnnnnnnnnnnnnnnnnnnnnnnnnnnnnnnnnnnnnnnnnnnnnnnnnnnnnnnnnnnnnnnnnnnnnnnnnnnnnnnnnnnnnnnnnnnnnnnnnnnnnnnnnnnnnnnnnnnnnnnnnnnnnnnnnnnnnnnnnnnnnnnnnnnnnnnnnnnnnnnnnnnnnnnnnnnnnnnnnnnnnnnnnnnnnnnnnnnnnnnnnnnnnnnnnnnnnnnnnnnnnnnnnnnnnnnnnnnnnnnnnnnnnnnnnnnnnnnnnnnnnnnnnnnnnnnnnnnnnnnnnnnnnnnnnnnnnnnnnnnnnnnnnnnnnnnnnnnnnnnnnnnnnnnnnnnnnnnnnnnnnnnnnnnnnnnnnnnnnnnnnnnnnnnnnnnnnnnnnnnnnnnnnnnnnnnnnnnnnnnnnnnnnnnnnnnnnnnnnnnnnnnnnnnnnnnnnnnnnnnnnnnnnnnnnnnnnnnnnnnnnnnnnnggtgtggtgcaacaacttctgctggaactttctgcggctgtgacctggtgaactggctaattgaagtcggccttgcctctgaccgtggtgaagctgtgatatacggagacaggctggtacaagggggagtcatccaacatattaccaacgagtatgaattccgggatgagtacttgttttacagatttcttcaaaggagtcctgaacagagtcctcctgctattaatgcaaacactctcccacaggaaagatataaagaaattgagcatttgtcctcaccctcacattcccctaagacctaaattatgaaggggagaaccctacatggaatcatattctagccccatattcattagtttttagctgggtgaccttgggcaagttaacagaggcaacctctgtgagcctcagttgtctcttctgtannnnnnnnnnnnnnnnnnnnnnnnnnnnnnnnnnnnnnnnnnnnnnnnnnnnnnnnnnnnnnnnnnnnnnnnnnnnnnnnnnnnnnnnnnnnnnnnnnnnnnnnnnnnnnnnnnnnnnnnnnnnnnnnnnnnnnnnnnnnnnnnnnnnnnnnnnnnnnnnnnnnnnnnnnnnnnnnnnnnnnnnnnnnnnnnnnnnnnnnnnnnnnnnnnnnnnnnnnnnnnnnnnnnnnnnnnnnnnnnnnnnnnnnnnnnnnnnnnnnnnnnnnnnnnnnnnnnnnnnnnnnnnnnnnnnnnnnnnnnnnnnnnnnnnnnnnnnnnnnnnnnnnnnnnnnnnnnnnnnnnnnnnnnnnnnnnnnnnnnnnnnnnnnnnnnnnnnnnnnnnnnnnnnnnnnnnnnnnnnnnnnnnnnnnnnnnnnnnnnnnnnnnnnnnnnnnnnnnnnnnnnnnnnnnnnnnnnnnnnnnnnnnnnnnnnnnnnnnnnnnnnnnnnnnnnnnnnnnnnnnnnnnnnnnnnnnnnnnnnnnnnnnnnnnnnnnnnnnnnnnnnnnnnnnnnnnnnnnnnnnnnnnnnnnnnnnnnnnnnnnnnnnnnnnnnnnnnnnnnnnnnnnnnnnnnnnnnnnnnnnnnnnnnnnnnnnnnnnnnnnnnnnnnnnnnnnnnnnnnnnnnnnnnnnnnnnnnnnnnnnnnnnnnnnnnnnnnnnnnnnnnnnnnnnnnnnnnnnnnnnnnnnnnnnnnnnnnnnnnnnnnnnnnnnnnnnnnnnnnnnnnnnnnnnnnnnnnnnnnnnnnnnnnnnnnnnnnnnnnnnnnnnnnnnnnnnnnnnnnnnnnnnnnnnnnnnnnnnnnnnnnnnnnnnnnnnnnnnnnnnnnnnnnnnnnnnnnnnnnnnnnnnnnnnnnnnnnnnnnnnnnnnnnnnnnnnnnnnnnnnnnnnnnnnnnnnnnnnnnnnnnnnnnnnnnnnnnnnnnnnnnnnnnnnnnnnnnnnnnnnnnnnnnnnnnnnnnnnnnnnnnnnnnnnnnnnnnnnnnnnnnnnnnnnnnnnnnnnnnnnnnnnnnnnnnnnnnnnnnnnnnnnnnnnnnnnnnnnnnnnnnnnnnnnnnnnnnnnnnnnnnnnnnnnnnnnnnnnnnnnnnnnnnnnnnnnnnnnnnnnnnnnnnnnnnnnnnnnnnnnnnnnnnnnnnnnnnnnnnnnnnnnnnnnnnnnnnnnnnnnnnnnnnnnnnnnnnnnnnnnnnnnaggtgtggtagcacatgcctgtagtcccagctacttgggagactgaggtgggagtacccctggagcctgggaggcggaggttgcagtaagccaagatcacatcactgcacttcagcctgggtgacagagcgagannnnnnnnnnnnnnnnnnnnnnnnnnnnnnnnnnnnnnnnnnnnnnnnnnnnnnnnaagtttgtcttttcttttctacccaaattactaatctatgccattaaggaataaaaacctccatatgtattattatctccacagtccttctgcagaagtacaatctgatctttaacttttatgctacaaatactaatttgaacagattaatttgaacttgaaaatattgccatataatgtatcatttctgtatttgaacaaagcatcataatgcaggataacccttttactttattcccnnnnnnnnnnnnnnnnnnnnnnnnnnnnnnnnnnnnnnnnnnnnnnnnnnnnnnnnnnnnnnnnnnntggtggctcacacctgtaatcccatcactttgggaggctgaggcaggtgaattgcttagcccaggagttcgagaccagcctggccaacctagtgaaatcctgtctctactaaaaacaaacaaacaaaattagccaggtgtggtggcatgcgcctgtaatcccagctacttgggaggctgaggcaggagaattgcttgaaaccaggaggtaggggttgcagtgagctgagattgtgcaactgcactctagcct

SEQ ID NO: 28274 - DNA, 250 bp, Macaca Mulatta
  misc_feature (1)...(250): n = A,T,C or G
ttgataggtcaggaaatgttcatcaccagtttcaaaagcttctgactgaattaaacaaatccactgatgcatatgagctgaagatcgccaataagctcttcggagaaaagacgtttcaatttttacaggnaggaatatttagatgccatcaagaaattttaccagaccagtgtggaatctgttgattttgcaaaggctccagaagaaagtcgaaagaagattaactcctgggtggaaagtcaaacgaatg

SEQ ID NO: 28275 - DNA, 156 bp, Macaca Mulatta
aggtatggcaggatcgtcatttacttgctctcttgccttggtgttggcgtcactggggttgtggtggcctttgcaccaaacttccctgtgtttgtgatcttccgcttcctgcaaggtgtgtttggaaaggggacatggatgacttgctacgtgatt

SEQ ID NO: 28276 - DNA, 783 bp, Macaca Mulatta
  misc_feature (1)...(783): n = A,T,C or G
tgttgcactttctgcattttacaggaattagtcagtacacgttgaaatgtttaaccctttaagattggaagcttaattactgggagtcggtctaatgaagtcctgggactattgtaatggaatatgatttgagttcactgtgctcnnnnnnnnnnnnnnnnnnnncatatgtacattaggagcttttattttaaaacaaccacagtaacattaataatagaaaaatcatttggaaatattcacaatctagtcactgaaaaatgggaaaacctctaccatgccttattatcacccttcgccgtttgaggagccagaaatagaggtgcagttagagaaaggtcaccttttccaacaaaactcactccatagccatgtggatttttatccaaaggctcaaccaccagagggaatggtgagaactgataactaaaatactgttactggcaagggtttgaaatgagtaagaacctaggagggaaaggaaattgagcaacataggaaaaggggaagagaggctgtcaccaaggtccaatctccatttataaaaatagtgcaaaaccaggagttgattatagaagcgcccatgatccatggcaggaataaatcccttcacctcctctaactctatgaaaactctagagttggagcaagtcttccatttgcttcttatccccttaaaataatgccttccactcccccacagcccccatcaaaggaacccccgcaagaggccaccatgctctgatctcactctttcctattccccttgcctgaatctggagt

SEQ ID NO: 28277 - DNA, 142 bp, Macaca Mulatta
  misc_feature (1)...(142): n = A,T,C or G
ngtgaacagtgagagagttttcttcattttgaggaaccctaaacacctatctttcccaaggcaacctgtctggactgagcatttctgtgacttgacataactccccatccagccaggagtctgcactcttccgtctttgcag

SEQ ID NO: 28278 - DNA, 791 bp, Macaca Mulatta
  misc_feature (1)...(791): n = A,T,C or G
ccctcgggctcgagacagaggcggcgtttaaagctgagcgacccagtaccactgggacggccagcttttccactcaggctcctccagcctgagccagaagaccccctcccccagaattctgggggcctatggaagggagccgagtcggatcgcgaggtacccagagccgacaaacccgagccacagagtgttgccagaagccccgcccctaggagggatcggaaagcctcacccatccgggtgaggaacctggagggaccgcctcagggcggagcccgccgaccatggctacgcccccggnggccggtcctgcagctctacgcttcgccgccgcagctagctggcaggttgtgcgcggacgctgtgtggnnnnnnnnnnnnnnnnnnnnnnnnnnnnnnnnnnnnnnnnnnnnnnnnnnnnnnnnnnnnnnnnnnnnnnnnnnnnnnnnnnnnnnnnnnnnnnnnnnnnnnnnnnnnnnnnnnnnnnnnnnnnnnnnnnnnnnnnnnnnnnnnnnnnnnnnnnnnnnnnnnnnnnnnnnnnnnnnnnnnnnnnnnnnnnnnnnnnnnnnnnnnnnnnnnnnnnnnnnnnnnnnnnnnnnnnnnnnnnnnnnnnnnnnnnnnnnnnnnnnnnnnnnnnnnnnnnnnnnnnnnnnnnnnnnnnnnnnnnnnnnnnnnnngctgcaggaacttgaacaagaatatggggaaccctttctggctgccatggaaaagctgctttttgagtacttgtgtcagctggagaaagcactgcctacaccgcaggcacagca

SEQ ID NO: 28279 - DNA, 665 bp, Macaca Mulatta
  misc_feature (1)...(665): n = A,T,C or G
gggggaagatgctgcttcttcctctccccctnctgctcttttttttgtgctccagagctgaagctggggagatcatcgggggcacagaatgcaagccacactcccgcccctacatggcctacctggaaattgtcacctccaacggtccctcaaaatcttgtggtggtttcctgataagacggaactttgtgctgacagccgctcattgtgcaggaaggtctataacagtcacccttggagcccataacataacagagaaagaagacacatggcagaagtttgaggttataaagcaattccgtcatccaaaatataacacttctactcttcaccacgatatcatgttactaaagttgaaggagaaagccagcctgaccctggctgtggggacactccccttcccatcccaattcaactttgtcccacctgggagaatgtgccgggtggctggctggggaagaacaggtgttgttgaagccgggctcagacactctgcaagaggtgaagctgagactcatggatccccaggcctgcagccacttcagatactttgaccacaatcttcagctgtgtgtgggcaatcccaggaagacaaaatctgcattaaagggagactctggaggccctcttctgtgtgctgcggtgcccaggccatcgtatcctat

SEQ ID NO: 28280 - DNA, 808 bp, Macaca Mulatta
  misc_feature (1)...(808): n = A,T,C or G
gggcttttcgatccgccttctgcggtggagccgtcacaaaaatgcagattttcgtgaaaacccttacggggnnnnnnnnnnnnnnnnnnnnnnnnnnnnnnnnnnnnnnnnnnnnnnnnnnnnnnnnnnnnnnnnnnnnnnnnnnnnnnnnnnnnnnnnnnnnnnnnnnnnnnnnnnnnnnnnnnnnnnnnnnnnnnnnnnnnnnnnnnnnnnnnnnnnnnnnnnnnnnnnnnnnnnnnnnnnnnnnnnnnnnnnnnncttcgtggtggtgctaagaaaaggaagaagaagtcttacaccactcccaagaagaataagcacaagagaaagaaggttaagctggctgtcctgaaatattataaggtttgtacttttcaggtggatgagaatggcaaaattagtcgccttcgtcgagagtgcccatctgatgaatgtggtactggggtgtttatggcaagccactttgatagaacttattgtggcaaatgttgtctgacttactgtttcaaccacccagaagacaagtaactgtatgaattaataaaagacacgaactacggaaaggaacgcaatcagtattacaatcattaaatcatgcaacgtaatcatgaaacaaaaccggcaaaaataattaacctttttgggccccttctggcccctcaaaaaaccctttttaaaacctattctatatggggcccggggccccaaaaaggataaggtaacaatgggttaaaaccctttttccccaaggaaaacctggggactgaaatagagagcttggaattcccacacaaataaaaaaaccccc

SEQ ID NO: 28281 - DNA, 439 bp, Macaca Mulatta
agaccaaggggctgctcccctgcaaggactccaggatgtaggacacccactggctctccctttcttctgggacacatccagcacccccatgtctcactcatgtacacagacccaggattacgctgtgagcctgcaggctttggaagtggccctgtcacccgtgctgcacaggattcgcagccctagccgcatgtcccctctccacacctcaaaactcctgccccacaacgtcctccgcacccactttccagctcagcagctgcatcccaggcccagcctgaggggtgtgtgcccaggctctcccgcttcccgagttgtctgcctctcctcaaatgctgtgtgctgcaattgtccaggcgatgacaatggtgatggctccagagaacacaccagctatttatgagcctctgtccgcaggctgggcctgtcactggcatag

SEQ ID NO: 28282 - DNA, 254 bp, Macaca Mulatta
ataattatccttttatgtttgaggcacactttcaaatggtagaatttttggcagcacactttaagggattaaaaatacagtgcttaaagtaaagactaagcaaatcagcaactaactacaacctgatccccttggaatcacaaagagtctgtattggcatccacagttagtgtactctacaccctttatacctatctcactacttcagttgcactttttactactttgactgttatctcttctgtcctcacaga

SEQ ID NO: 28283 - DNA, 129 bp, Macaca Mulatta
ggccgttttgccgtgcgcgacatgaggcattcggtgaccgtgggcgtcatcaagaacgtggagaagaagagcggcggcgccggcaaggtcaccaagtcggcgcagaaggcgcagaaggcgggcaagtga

SEQ ID NO: 28284 - DNA, 547 bp, Macaca Mulatta
  misc_feature (1)...(547): n = A,T,C or G
tgatccactttcggagctccagcatcaaatcgctcagccaggagatgaaatgcaccatccggctgctggacgactcggagatatcttgccacatccagnnnnnnnnnnnnnnnnnnnnnnnnnnnnnnnnnnnnnnnnnnnnnnnnnnnnnnnnnnnnnnnnnnnnnnnnnnnnnnnnnnnnnnnnnnnnnnnnnnnnnnnnnnnnnnnnnnnnnnnnnnnnnnnnnnnnnnnnnnnnnnnnnnnnnnnnnnnnnnnnnnnnnnnnnnnnnnnnnnnnnnnnnnnnnnnnnnnnnnnnnnnnnnnnnnnnnnnnnnnnnnnnnnnnnnnnnnnnnnnnnnnnnnnnnnnnnnnnnnnnnnnnnnnnnnnnnnnnnnnnnnnnnnnnnnnnnnnnnnnnnnnnnnnnnnnnnnnnnnnnnnngctgagcttggtgattacgatcctgatgagcatcctgagaattacatcagtgagtttgagattttccccaagcagtcgcagaagctggaaagaaaaatagtggaaattcataaaaacgaactcagg

SEQ ID NO: 28285 - DNA, 229 bp, Macaca Mulatta
ggaggatgctcagggtattggggtcagggtggcattagcccagctcaagccgggccgggctgactcagcatcctgccccagccaagttccatccccgacacctctgcactcccttgggcagagatgggagatggcgccggtgttacccctggtgctgcccctgcagccccgcatccgcctggcacaagggctctggcttctctcctggctgctggtgctggctggtggc

SEQ ID NO: 28286 - DNA, 152 bp, Macaca Mulatta
gtcaaacaaggtttctgcccacgcaagcccttgctatgtgcccagatcgataaacccaggtgcctgcaggatgatgagtgcccattggtggaaaagtgctgctcactttgtggactgaaatgtacggatcccaagcattgaatagtaagtag

SEQ ID NO: 28287 - DNA, 830 bp, Macaca Mulatta
ggtctttgactttgaactgagcaaccaggatatgaccaccttactcagctacaacaggaactggagggtctgtgccttgttgaggtgagtgagccccagcgtgaggagcagttcccaggagatcctcagatactgcagagcagaagagtgatccctgcaggcctcagcgcccatgcgctcctgtcacagctgttcttgctttgcacattaccttgctttctctgccacatgaccttacattagctgaactgcatgaagccaagatgccaagagatgcgctcctgataccttcttctaaccacggggcattgttggcctggcctgaagtaactacatattttggcatttaattttaaaatcctagtggttcatctgaaaccaggtgatcccaggtgaccctggatcaaactctggaagaatttgcctgtgactttttgtcttaatgaccctaatgaaaggggtttggtcggaagcccctggggctggggtttgagacagtcccagctctgaccctggtaagccacgtggctccaaaacaggccctccctctgagcagcaggcacctccgtccctccagccatacatcctctggttctgtttcctctgcgtggtagtttggaaggagctgcctaggaaggttttctgggggttttctcttttcctaccattacaataactaggtgacgcgtgtaagtcacttcctgcttttcaagaaggaactgctcattttgcagtggagactaagaccctgtttctctttcactacccttattctcatttgagctctctgtttccacacgctctcctttagtgcttcctcttctaagcaa

SEQ ID NO: 28288 - DNA, 417 bp, Macaca Mulatta
agagcttgggtgccacctctgacccctgcccttcgcactctggtgagttgagggagggagaagcctggtgggagctggaggaggggctggatctgagggggactgaggaccctccaccctctctagagagggtctcagatctctcttatctgtctacagacctctcctgctccagtggagaccctcggttctctggggacacagcctaaccatgtcccactgtggagcagtgtggccggacctggtccaccagatgccttctatatggagagacctccttttccctcaatgtcctctccacacatcttttgggcccccagcccccacaggttcttctgcaccccacagtctgggccttgggtatcccttggggctgttcctcccacgcagtcggcctccaccctagcacatctgggc

SEQ ID NO: 28289 - DNA, 3375 bp, Macaca Mulatta
  misc_feature (1)...(3375): n = A,T,C or G
agagatgtcggcttatttataggaattgcttgaagccagagtcatggtggatgtcggaaagtggcccatcttcactctgctgtcccctcaggagatcgcgtctattcggaaggcatgtgtcttcggcacctcagccagtgaagcactgtacgttactgatgatgatgaggtnnnnnnnnnnnnnnnnnnnnnnnnnnnnnnnnnnnnnnnnnnnnnnnnnnnnnnnnnnnnnnnnnnnnnnnnnnnnnnnnnnnnnnnnnnnnnnnnnnnnnnnnnnnnnnnnnnnnnnnnnnnnnnnnnnnnnnnnnnnnnnnnnnnnnnnnnnnnnnnnnnnnnnnnnnnnnnnnnnnnnnnnnnnnnnnnnnnnnnnnnnnnnnnnnnnnnnnnnnnnnnnnnnnnnnnnnnnnnnnnnnnnnnnnnnnnnnnnnnnnnnnnnnnnnnnnnnnnnnnnnnnnnnnnnnnnnnnnnnnnnnnnnnnnnnnnnnnnnnnnnnnnnnnnnnnnnnnnnnnnnnnnnnnnnnnnnnnnnnnnnnnnnnnnnnnnnnnnnnnnnnnnnnnnnnnnnnnnnnnnnnnnnnnnnnnnnnnnnnnnnnnnnnnnnnnnnnnnnnnnnnnnnnnnnnnnnnnnnnnnnnnnnnnnnnnnnggtatatggctggggttacaatggcaacggtcagctgggcttgggaaacaatgggaaccagctgacccctgtgagggtggcagctttgcacagcgtgtgtgtgaaccagnnnnnnnnnnnnnnnnnnnnnnnnnnnnnnnnnnnnnnnnnnnnnnnnnnnnnnnnnnnnnnnnnnnnnnnnnnnnnnnnnnnnnnnnnnnnnnnnnnnnnnnnnnnnnnnnnnnnnnnnnnnnnnnnnnnnnnnnnnnnnnnnnnnnnnnnnnnnnnnnnnnnnnnnnnnnnnnnnnnnnnnnnnnnnnnnnnnnnnnnnnnnnnnnnnnnnnnnnnnnnnnnnnnnnnnnnnnnnnnnnnnnnnnnnnnnnnnnnnnnnnnnnnnnnnnnnnnnnnnnnnnnnnnnnnnnnnnnnnnnnnnnnnnnnnnnnnnnnnnnnnnnnnnnnnnnnnnnnnnnnnnnnnnnnnnnnnnnnnnnnnnnnnnnnnnnnnnnnnnnnnnnnnnnnnnnnnnnnnnnnnnnnnnnnnnnnnnnnnnnnnnnnnnnnnnnnnnnnnnnnnnnnnnnnnnnnnnnnnnnnnnnnnnnnnnnnnnnnnnnnnnnnnnnnnnnnnnnnnnnnnnnnnnnnnnnnnnnnnnnnnnnnnnnnnnnnnnnnnnnnnnnnnnnnnnnnnnnnnnnnnnnnnnnnnnnnnnnnnnnnnnnnnnnnnnnnnnnnnnnnnnnnnnnnnnnnnnnnnnnnnnnnnnnnnnnnnnnnnnnnnnnnnnnnnnnnnnnnnnnnnnnnnnnnnnnnnnnnnnnnnnnnnnnnnnnnnnnnnnnnnnnnnnnnnnnnnnnnnnnnnnnnnnnnnnnnnnnnnnnnnnnnnnnnnnnnnnnnnnnnnnnnnnnnnnnnnnnnnnnnnnnnnnnnnnnnnnnnnnnnnnnnnnnnnnnnnnnnnnnnnnnnnnnnnnnnnnnnnnnnnnnnnnnnnnnnnnnnnnnnnnnnnnnnnnnnnnnnnnnnnnnnnnnnnnnnnnnnnnnnnnnnnnnnnnnnnnnnnnnnnnnnnnnnnnnnnnnnnnnnnnnnnnnnnnnnnnnnnnnnnnnnnnnnnnnnnnnnnnnnnnnnnnnnnnnnnnnnnnnnnnnnnnnnnnnnnnnnnnnnnnnnnnnnnnnnnnnnnnnnnnnnnnnnnnnnnnnnnnnnnnnnnnnnnnnnnnnnnnnnnnnnnnnnnnnnnnnnnnnnnnnnnnnnnnnnnnnnnnnnnnnnnnnnnnnnnnnnnnnnnnnnnnnnnnnnnnnnnnnnnnnnnnnnnnnnnnnnnnnnnnnnnnnnnnnnnnnnnnnnnnnnnnnnnnnnnnnnnnnnnnnnnnnnnnnnnnnnnnnnnnnnnnnnnnnnnnnnnnnnnnnnnnnnnnnnnnnnnnnnnnnnnnnnnnnnnnnnnnnnnnnnnnnnnnnnnnnnnnnnnnnnnnnnnnnnnnnnnnnnnnnnnnnnnnnnnnnnnnnnnnnnnnnnnnnnnnnnnnnnnnnnnnnnnnnnnnnnnnnnnnnnnnnnnnnnnnnnnnnnnnnnnnnnnnnnnnnnnnnnnnnnnnnnnnnnnnnnnnnnnnnnnnnnnnnnnnnnnnnnnnnnnnnnnnnnnnnnnnnnnnnnnnnnnnnnnnnnnnnnnnnnnnnnnnnnnnnnnnnnnnnnnnnnnnnnnnnnnnnnnnnnnnnnnnnnnnnnnnnnnnnnnnnnnnnnnnnnnnnnnnnnnnnnnnnnnnnnnnnnnnnnnnnnnnnnnnnnnnnnnnnnnnnnnnnnnnnnnnnnnnnnnnnnnnnnnnnnnnnnnnnnnnnnnnnnnnnnnnnnnnnnnnnnnnnnnnnnnnnnnnnnnnnnnnnnnnnnnnnnnnnnnnnnnnnnnnnnnnnnnnnnnnnnnnnnnnnnnnnnnnnnnnnnnnnnnnnnnnnnnnnnnnnnnnnnnnnnnnnnnnnnnnnnnnnnnnnnnnnnnnnnnnnnnnnnnnnnnnnnnnnnnnnnnnnnnnnnnnnnnnnnnnnnnnnnnnnnnnnnnnnnnnnnnnnnnnnnnnnnnnnnnnnnnnnnnnnnnnnnnnnnnnnnnnnnnnnnnnnnnnnnnnnnnnnnnnnnnnnnnnnnnnnnnnnnnnnnnnnnnnnnnnnnnnnnnnnnnnnnnnnnnnnnnnnnnnnnnnnnnnnnnnnnnnnnnnnnnnnnnnnnnnnnnnnnnnnnnnnnnnnnnnnnnnnnnnnnnnnnnnnnnnnnnnnnnnnnnnnnnnnnnnnnnnnnnnnnnngttttgctttgctctctggtccatgaactcatttccattggagtgagctcccttagtgaactttgtctcctgcttggaaggtctctcttctgaacctggagcctgagtacattttcagagccaaattacaagtgggtgaagacatgctgcagttactatttttagcaatgttttaaaatttgtgtctgttggggtgggaaggggagtgaggcctcaaagataggaattcattgatagctgaaatagagacaagcctagtagctccagcccccttttcttgaccatatcacaagtgattgaagcccagtgaattattctgttagaattcattctacaacatgatagaacctttcttactgggttcagaaatgcacattgatttgtgctgtgatgggtggtgtttgtaacaatcactgttgtataggcttatgatctgagcaaaatgtgaactttagtatgtttactattgctcttacttgaaaa

SEQ ID NO: 28290 - DNA, 2361 bp, Macaca Mulatta
  misc_feature (1)...(2361): n = A,T,C or G
aggaaactttgataacgagcgcctggcgattgctagacagagaatcccctaccggcttggtcgagtagtagatgagtggctgctcgacaaagnnnnnnnnnnnnnnnnnnnnnnnnnnnnnnnnnnnnnnnnnnnnnnnnnnnnnnnnnnnnnnnnnnnnnnnnnnnnnnnnnnnnnnnnnnnnnnnnnnnnnnnnnnnnnnnnnnnnnnnnnnnnnnnnnnnnnnnnnnnnnnnnnnnnnnnnnnnnnnnnnnnnnnnnnnnnnnnnnnnnnnnnnnnnnnnnnnnnnnnnnnnnnnnnnnnnnnnnnnnnnnnnnnnnnnnnnnnnnnnnnnnnnnnnnnnnnnnnnnnnnnnnnnnnnnnnnnnnnnnnnnnnnnnnnnnnnnnnnnnnnnnnnnnnnnnnnnnnnnnnnnnnnnnnnnnnnnnnnnnnnnnnnnnnnnnnnnnnnnnnnnnnnnnnnnnnnnnnnnnnnnnnnnnnnnnnnnnnnnnnnnngaggagagttaatattgcccattatcacggaggactccttagacccccctcccgtggccacccgatnnnnnnnnnnnnnnnnnnnnnnnnnnnnnnnnnnnnnnnnnnnnnnnnnnnnnnnnnnnnnnnnnnnnnnnnnnnnnnnnnnnnnnnnnnnnnnnnnnnnnnnnnnnnnnnnnnnnnnnnnnnnnnnnnnnnnnnnnnnnnnnnnnnnnnnnnnnnnnnnnnnnnnnnnnnnnnnnnnnnnnnnnnnnnnnnnnnnnnnnnnnnnnnnnnnnnnnnnnnnnnnnnnnnnnnnnnnnnnnnnnnnnnnnnnnnnnnnnnnnnnnnnnnnnnnnnnnnnnnnnnnnnnnnnnnnnnnnnnnnnnnnnnnnnnnnnnnnnnnnnnnnnnnnnnnnnnnnnnnnnnnnnnnnnnnnnnnnnnnnnnnnnnnnnnnnnnnnnnnnnnnnnnnnnnnnnnnnnnnnnnnnnnnnnnnnnnnnnnnnnnnnnnnnnnnnnnnnnnnnnnnnnnnnnnnnnnnnnnnnnnnnnnnnnnnnnnnnnnnnnnnnnnnnnnnnnnnnnnnnnnnnnnnnnnnnnnnnnnnnnnnnnnnnnnnnnnnnnnnnnnnnnnnnnnnnnnnnnnnnnnnnnnnnnnnnnnnnnnnnnnnnnnnnnnnnnnnnnnnnnnnnnnnnnnnnnnnnnnnnnnnnnnnnnnnnnnnnnnnnnnnnnnnnnnnnnnnnnnnnnnnnnnnnnnnnnnnnnnnnnnnnnnnnnnnnnnnnnnnnnnnnnnnnnnnnnnnnnnnnnnnnnnnnnnnnnnnnnnnnnnnnnnnnnnnnnnnnnnnnnnnnnnnnnnnnnnnnnnnnnnnnnnnnnnnnnnnnnnnnnnnnnnnnnnnnnnnnnnnnnnnnnnnnnnnnnnnnnnnnnnnnnnnnnnnnnnnnnnnnnnnnnnnnnnnnnnnnnnnnnnnnnnnnnnnnnnnnnnnnnnnnnnnnnnnnnnnnnnnnnnnnnnnnnnnnnnnnnnnnnnnnnnnnnnnnnnnnnnnnnnnnnnnnnnnnnnnnnnnnnnnnnnnnnnnnnnnnnnnnnnnnnnnnnnnnnnnnnnnnnnnnnnnnnnnnnnnnnnnnnnnnnnnnnnnnnnnnnnnnnnnnnnnnnnnnnnnnnnnnnnnnnnnnnnnnnnnnnnnnnnnnnnnnnnnnnnnnnnnnnnnnnnnnnnnnnnnnnnnnnnnnnnnnnnnnnnnnnnnnnnnnnnnnnnnnnnnnnnnnnnnnnnnnnnnnnnnnnnnnnnnnnnnnnnnnnnnnnnnnnnnnnnnnnnnnnnnnnnnnnnnnnnnnnnnnnnnnnnnnnnnnnnnnnnnnnnnnnnnnnnnnnnnnnnnnnnnnnnnnnnnnnnnnnnnnnnnnnnnnnnnnnnnnnnnnnnnnnnnnnnnnnnnnnnnnnnnnnnnnnnnnnnnnnnnnnnnnnnnnnnnnnnnnnnnnnnnnnnnnnnnnnnnnnnnnnnnnnnnnnnnnnnnnnnnnnnnnnnnnnnnnnnnnnnnnnnnnnnnnnnnnnnnnnnnnnnnnnnnnnnnnnnnnnnnnnnnnnnnnnnnnnnnnnnnnnnnnnnnnnnnnnnnnnnnnnnnnnnnnnnnnnnnnnnnnnnnnnnnnnnnnnnnnnnnnnnnnnnnnnnnnaaggcaaatgcagatatatattacagacaaatactctagattccacgagcagcagcctgtggcacctgctgggtgcaggcagcagggaagagggagcaaggcattgtccacagactgctggggtcacttctctgcccacgggctccctgctcccccagtttttttgtctatatttgttaacaaacgtgtctgagtcttggaaaacaccccaacccc

SEQ ID NO: 28291 - DNA, 2008 bp, Macaca Mulatta
  misc_feature (1)...(2008): n = A,T,C or G
gaatcggacgagggacaacatcgtgatcttccccatgggatgcgtcgtcctggggatgcttcagctgggggcagacggcaggaccaagaagcagctcaccacggtgatgagatacggcgtgaatggagttggtaaaatattaaagaagatcaacaaggccatcgtctccaagaagaataaagacattgtgacagtggctaacgccgtgtttgttaagaatgcctctgaaattgaagtgccttttgttacaaggaacaaagatgtgttccagagtgaggtccggaatgtgaactttgaggatccagcctctgcctgtgattccatcaatgcatgggttaaaaacgaaactagagatatgattgacaatctgctgtccccagatcttattgatggtgtgctcaccagactggtcctcgtcaacgcagtgtatttcaagggtctgtggaaatcacggttccaacctgagaacacaaagaaacgtactttcatggcagccgacgggaaatcctatcaagtgccaatgctggcccagctctccgtgttccggtgtgggtcaacaagtgcccccagtgatttatggtacaacttcattgaactgccctaccacggggaaagcatcagcatgctgattgcactgccgaccgagagctccactccgctgtctgccatcatcccacacatcagcgccaagaccatagacagctggatgagcatcatggtgcccaagagggtgcaggtgatcctgcccaagttcacagctgtagcacagacagatttgaaggagccgctgaaagcccttggcattaccgacatgtttgattcatcaaaggcaaattttacgaaaataacaaggtcagaaaacctccatgtttctcatatcttgcaaaaagcaaaaattgaagtcagtgaagatggaaccaaagcttcagcagcaacaactgcaattctaattgcaagatcatcgcctccctggtttatagtagacagaccttttctgtttttcatccgacataatcctacaggtgctgtgttattcatggggcagataaacaaaccctgaagagtacacaaaagaaaccatgcaaagcaacgactactttgctacaaagaaagactcctttcctgcatctttcatagttctgttaaatatttttgtacatcgcttctttttcaaaactagttcttaggaacagactcgatgcaagcgtttctgtgctgggaggtattggagggaaaaaacaagcaggatggctggaacactgtactgaggaatgactagaaaggcttcgaaatgtctaaaagattctttaaactactgaactgttacctaggttaacaaccctcctgagtatttgctgtttgtccagttcaggaatttttgttttgttttgtctatatgtgcggcttctcagaagaaatttaatcagtgtgacagaaaaaaaaaaatatgttaatggtagcttttactttttatgaaaaaaatattatttgccttttaaattcttttcccccatccccctccaaagtcttgatagcaagcattattttgggggtagaaacggtgaaatctctagcctctttgtgttttagttgtagttgtagttttatataatgcatgtattcactaaaataaagtttaaaaaacccatgtcttgctagacaaggttgctgttgtgcagtgtgcctgtcactactggtctgtactccttggatttgcatttttgtattttgtacaaagtaaaaataaactgttatgagtagtaaaaaaaagctatctctgctatttgaaagggggccccgtatcccaatggcctattctgggtgtataccatcatggccgtcgtttacaacgtcgtnnnnnnnncaaannnnnnnnnnnnnnnnnnnnnnnnnnnnnnnnnnnnnnnnnnnnnnnnnnnnnnnnnnnnnnnnnnnnnnnnnnnnnnnnnnnnnnnnnnnnnnnnnnnnnnnnnnnnnnnnnnnnnnnnnnnnnnnnnnnnnnnnnaat

SEQ ID NO: 28292 - DNA, 2703 bp, Macaca Mulatta
  misc_feature (1)...(2703): n = A,T,C or G
gatgttcctgatgacatacagcctatcgccagcctgccaggagtggccaggtancaggtatggtgtgaaccggctggaagagatgctgaggcccttggtggaagagggcctacgctgtgtcttgatctttggcatccccagcagagttcccaaggnaggacgagcggggttccgcagctgactccgaggagtccccagctattgaggcaatccatctgttgaggaagaccttccccaacctcctggtggcctgtgacatctgcctatgtccctacacctcccatggtcactgcggggctcctgagtgaaaatggagcattccgggctgaggagagccgccagcggctagctgaggtagcactggcatatgccaaggcaggncaggatgtcaggtggtagccccgtcagacatgatggatggacgtgtggaagccatcaaggaggccctgatggcacatggacttggcaacagggtanggtatcagtgatgagctacagtgccaagtttgcttcctgtttctatggccctttccggngggacgcagctcagtcaagcccagcttttggggaccgccgctgctaccagctgccccctggagcacgaggcctggccctccgagctgtggnggaccgggatgtacgggaaggagctgacgtactcatggtgaagccgggaatgccctacctggacatcgtgcgggaggtaaaggacaagnnnnnnnnnnnnnnnnnnnnnnnnnnnnnnnnnnnnnnnnnnnnnnnnnnnnnnnnnnnnnnnnnnnnnnnnnnnnnnnnnnnnnnnnnnnnnnnnnnnnnnnnnnnnnnnnnnnnnnnnnnnnnnncaggtgctgacatcatcatcacaaaatacacaccccagctgctgcagtggctgaagaaggaatgacggagacagtgcaggcctgagaactagaactttaaaacgttcccggggcctcagagaagtgaaaaccaaagtaaatcctgcttttagaactgtgccctcgtgccctcttcctgctcacatgctggcgggtcccagcagccctgggtggtttnnnnnnnnnnnnnnnnnnnnnnnnnnnnnnnnnnnnnnnnnnnnnnnnnnnnnnnnnnnnnnnnnnnnnnnnnnnnnnnnnnnnnnnnnnnnnnnnnnnnnncagctctttcctctggtgtggcttcagcttgaaagcaacctggaatcgggggcacaggctttggggcatggctgggagagagtcttggagcattaggggaagaggagagcagagggatctcggggcctgagaagccttggaacgcttctggcagcagagctgggtgtgggaatgaggcctagctcgatatccctgggttagagttgaaatttgctgcaattccactggaaggcatttcccacacaggccagaggttgccaggctgcctgaggtctcctgttctactctgaaccataaacccagagaagaattactcattaagcagcagaaatactgcctgaggatcaaaactcagaggcaaagagggagttcctgactgctggagatgccaccaccacaaatactttttattcaacagatacttcttgagaatctctgctctgttcctaggttcagtgctgggtcctgggaatacagcaggacagacctcagcttgtctcttcatagaaattatacaaagagaataggggagacagctaagaagaaaacaaagaaataaagcagttacaaatttgtgataagtgctctgaaggaaataaggggtctgagacaaagaacaacagggcgggggcctctcttgaaacggtagttgggaaggaggcagacatgcaccggtgatgtggtgacaggtgctgtgaaggaagtcaccaggacttgacctgctttgaaggatcagaaaatacttccctgaagtactgacatttgagcctagacctgaagggtaagccatcaagctaagacataattggagaagaacgttacagggagagggaggagttgtgcaaaggccctggggctcctagctggaggaatgcaaggctagcctgtctggagcactgagaggatggcctgaactgagtggagacagaccaagaccaaaccatgcagagatcaagggccacattcaccttttcagagtgactcaatcaaattttgcagtttgtaaaagtattttaacagtcctgtggcaaagtggaaatgaaaagtcttgatggcatggactggagcggggacagtggggatggaaaaaggggaatggattgtggatgtgtttagaaggtagattagatgcgagggatgaatctggcttgatcttctgggtggctgatgggccatttactgagctggggcagcctggaagaggaacagaagcagggtcagggtggagggagaatactaaacttagcttgagacattttgcaacgaggaagctatatctagagagcgtatgggactcacctaaggccactcaacaagtgtgtggcagaactgggttagaaccacccagaaaacagccaagctgggatctgaacccatgtagtccaactccaaggcctctgcccctaaccactgtgccataccacctcccaataatcagcagcaaaagtatgggtcttacaatgttatagagatacccctccacttatgtgatgggtttgcatcctgataaacccatcataagttgaaaatatgatcataagtn

SEQ ID NO: 28293 - DNA, 1615 bp, Macaca Mulatta
  misc_feature (1)...(1615): n = A,T,C or G
ggtggcacttcgggtccggcccatcagcgtggcagagctggaggaaggaaggaccctcatcgcccataaagtggatgagcannnnnnnnnnnnnnnnnnnnnnnnnnnnnnnnnnnnnnnnnnnnnnnnnnnnnnnnnnnnnnnnnnnnnnnnnnnnnnnnnnnnnnnnnnnnnnnnnnnnnnnnnnnnaggagatggtgtatcaggccaccaccaagagcctcatcgaaggcgtcatctcaggctacaatgccactgtctttgcctatggccccacaggnnnnnnnnnnnnnnnnnnnnnnnnnnnnnnnnnnnnnnnnnnnnnnnnnnnnnnnnnnnnnnnnnnnnnnnnnnnnnnnnnnnnnnnnnnnnnnnnnnnnnnnnnnnnnnnnnnnnnnnnnnnnnnnnnnnnnnnnnnnnnnnnnnnnnnnnnnnnnnnnnnnnnnnnnnnnnnnnnnnnnnnnnnnnnnnnnnnnnnnnnnnnnnnnnnnnnnnnnnnnnnnnnnnnnnnnnnnnnnnnnnnnnnnnnnnnnnnnnnnnnnnnnnnnnnnatcatgcagctgctgatgaaggggaaccggcagaggacccaggagcccacggccgccaaccagacgtcctcccgctcccacgcggtgctgcaggtggccgtgcgccagcgcagccgggtcaagaacatcttgcaggaggtgcggcagggccgcctgttcatggtcgacctggctggctcggagcgcgcctnnnnnnnnnnnnnnnnnnnnnnnnnnnnnnnnnnnnnnnnnnnnnnnnnnnnnnnnnnnnnnnnnnnnnnnnnnnnnnnnnnnnnnnnnnnnnnnnnnnnnnnnnnnnnnnnnnnnnnnnnnnnnnnnnnnnnnnnnnnnnnnnnnnnnnnnnnnnnnnnnnnnnnnnnnnnnnnnnnnnnnnnnnnnnnnnnnnnnnnnnnnnnnnnnnnnnnnnnnnnnnnnnnnnnnnnnnnnnnnnnnnnnnnnnnnnnnnnnnnnnnnnnnnnnnnnnnnnnnnnnnnnnnnnnnnnnnnnnnnnnnnnnnnnnnnnnnnnnnnnnnnnnnnnnnnnnnnnnnnnnnnnnnnnnnnnnnnnnnnnnnnnnnnnnnnnnnnnnnnnnnnnnnnnnnnnnnnnnnnnnnnnnnnnnnnnnnnnnnnnnnnnnnnnnnnnnnnnnngctgaggtccagctgcacagcgggcagggtgagcaggctggcatgggacagcttcgggagcagctcgtcagcgccttccaggagcagatggatgtgcggaggcgcctgctggaactggagaaccgtgccatggaggtccagattgacacctcccgacacctgctcaccatcgccggngctggaagcatgagaagtcccgcagggccctcaaatggcgggaggaacagcggaaggagtgctacgctaaggacgacagtgagaaggactcagacacaggcgatgaccagccggacatcctggagccgcccgaggtggttgcagcccgggagagcatcgcagccctggtgggcgagcagaagcagctgtgcaagcagaaggtgtccagggtttggggggcagggagagcgggcttaggggacagggtgagcaggtttga

SEQ ID NO: 28294 - DNA, 720 bp, Macaca Mulatta
attcaagcccacatattagcagagaccataaggagaagcacaaggagcatccttcaagccgccaccacaccagcagccacaagcattcccactcgcatagtggcagcagcagtggtggcagtaaacacagtgccgacggaataccacccactgttctgaggagtcctgttggcctgagcagtgatggcatttcctctagctccagctcttcaaggaagaggctgcatgtcaatgatgcatctcacaaccaccactccaaaatgagcaaaagttccaaaagttcaggtagttcatctagttcttcctcctctgttaagcagtatatatcctctcacaactctgtttttaaccatcccttaccccctcctccccctgtcacataccaggtgggctacggacatctcagcaccctcgtgaaactggacaagaagccagtggagaccaacggtcctgatgccaatcacgagtacagtacaagcagccagcatatggactacaaagacacattcgacatgctggactcgctgttaagtgcccaaggaatgaacatgtaataatttgtttaggtcaatttttcctttacttttttaatttaaaaattgttagaatggaaaaattccttctgatctagcagtggtaacccctgctgttgctgccactgcttcaatatttgtaagtgctgctttattcttcattctgaaaagaagagattatagtaaa

SEQ ID NO: 28295 - DNA, 262 bp, Macaca Mulatta
tgtttctctggcagataattttactaagaagaaaaattgatattcaactccccttccctaaacaaatgcatgggcagaggctccagtggagccgagccccctggttttctcgtaggccctagacagtattgcgcttatcagtgatgtcaaacctgcccatttgtcagacatagctgtaaatgaaaacaatgtgtggcaaaatacaaagttagttaaatacacaccctctgtgtgattttttgctcccttttcttttttgctt

SEQ ID NO: 28296 - DNA, 633 bp, Macaca Mulatta
  misc_feature (1)...(633): n = A,T,C or G
ccagtttaaaacttttaataaagggaagaagacaaatatcattgattctatgcttcggatgttggagcaatattctagcaacttggaagatttgattcgggagcggactgaagagctggaaattgaaaaacagaaaacggaaaagcttctaacacagatgctacnnnnnnnnnnnnnnnnnnnnnnnnnnnnnnnnnnnnnnnnnnnnnnnnnnnnnnnnnnnnnnnnnnnnnnnnnnnnnnnnnnnnnnnnnnnnnnnnnnnnnnnnnnnnnnnnnnnnnnnnnnnnnnnnnnnnnnnnnnnnnnnnnnnnnnnnnnnnnnnnnnnnnnnnnnnnnnnnnnnnnnnnnnnnnnnnnnnnnnnnnnnnnnnnnnnnnnnnnnnnnnnnnnnnnnnnnnnnnnnnnnnnnnnnnnnnnnnnnnnnnnnnnnnnnnnnnnnnnnnnnnnnnnnnnnnnnnnnnnnnnnnnnnnnnnnnnnnnnnnnnnnnnnnnnnnnnnnnnnnnnnnnnnnnnnnnnnnnnnnnnnnnnnnnagggccggttgttgctggagtggtgggcctcaccatgcccagatactgcttgtttggagacactgtgaacacagcttctcggatggaatcaacaggcttac

SEQ ID NO: 28297 - DNA, 814 bp, Macaca Mulatta
  misc_feature (1)...(814): n = A,T,C or G
agaatcgttgaaaaatggctctgctacaggtggtggaaataaagtttattcttttcagaatagaaaacactctgaaaagatggctaaattannnnnnnnnnnnnnnnnnnnnnnnnnnnnnnnnnnnnnnnnnnnnnnnnnnnnnnnnnnnnnnnnnnnnnnnnnnnnnnnnnnnnnnnnnnnnnnnnnnnnnnnnnnnnnnnnnnnnnnnnnnnnnnnnnnnnnnnnnnnnnnnnnnnnnnnnnnnnnnnnnnnnnnnnnnnnnnnnnnnnnnnnnnnnnnnnnnnnnnnnnnnnnnnnnnnnnnnnnnnnnnnnnnnnnnnnnnnnnnnnnnnnnnnnnnnnnnnnnnnnnnnnnnnnnnnnnnnnnnnnnnnnnnnnnnnnnnnnnnnnnnnnnnnnnnnnnnnnnnnnnnnnnnnnnnnnnnnnnnnnnnnnnnnnnnnnnnnnnnnnnnnnnnnnnnnnnnnnnnnnnnnnnnnnnnnnnnnnnnnnnnnnnnnnnnnnnnnnnnnnnnnnnnnnnnnnnnnnnnnnnnnnnnnnnnnnnnnnnnnnnnnnnnnnnnnnnnnnnnnnnnnnnnnnnnnnnnnnnnnnnnnnnnnnnnnnnnnnnnnnnnnnnnnnnnnnnnnnnnnnnnnnnnnnnnnnnnnnnnnnnnnnnnnnnnnnnnnnnnnnnnnnnnnncttgggttcaacattgtgctttatggtttgggttctaagagagatttactagaaaggtttcgaaccactatgctgcaagattccattcacgttgtcatcaatggcttctttcccggaatcagtgtgaaatcagt

SEQ ID NO: 28298 - DNA, 946 bp, Macaca Mulatta
  misc_feature (1)...(946): n = A,T,C or G
aggtgaatgaagcaggtgaatttggtctggttctggtccaaaggaaagcactaacttccaaactggaatataaannnnnnnnnnnnnnnnnnnnnnnnnnnnnnnnnnnnnnnnnnnnnnnnnnnnnnnnnnnnnnnnnnnnnnnnnnnnnnnnnnnnnnnnnnnnnnnnnnnnnnnnnnnnnnnnnnnnnnnnnnnnnnnnnnnnnnnnnnnnnnnnnnnnnnnnnnnnnnnnnnnnnnnnnnnnnnnnnnnnnnnnnnnnnnnnnnnnnnnnnnnnnnnnnnnnnnnnnnnnnnnnnnnnnnnnnnnnnnnnnnnnnnnnnnnnnnnnnnnnnnnnnnnnnnnnnnnnnnnnnnnnnnnnnnnnnnnnnnnnnnnnnnnnnnnnnnnnnnnnnnnnnnnnnnnnnnnnnnnnnnnnnnnnnnnnnnnnnnnnnnnnnnnnnnnntttttgaagcagaacgtggcaagggcaaaaccggtgaaatcgcagtggatggcgtcttgcttgtttcaggcttatgtccagatagccttttatctgtggatgactgaatgttactatctttatatttgactttgtatgtcagttccctggtttttttaatattgaatcataggacctctggcattttagaattactagctgaaaaattataatgtaccaacagaaatattattataagatgcctttcttgtataagatatgccaatatttgctttaaatatagtatcactgtatctcctcattcatttctgaatctttccatattatattataaaatatggaaatgttagtttatctcccctccccagtatatctgatttgtatacgtaagttgatgagcttctctctacaacatttctagaaaacagaaataaaagcacagagaaatgtttaactctttgactcttatgatacttctgggaaactatgacatcaaagat

SEQ ID NO: 28299 - DNA, 1545 bp, Macaca Mulatta
  misc_feature (1)...(1545): n = A,T,C or G
agctacatggtgtcttgtgggtgattctggagccactcattggggaccttcccattgtgggggctgtgtcaatgttcttcatccgacgcccgnnnnnnnnnnnnnnnnnnnnnnnnnnnnnnnnnnnnnnnnnnnnnnnnnnnnnnagctcactctctgacaccatgatcatggactccatcgctgccttcctcgtgttgcccaatcgattactggtgccccttgtgcctgaccttcaagatgtggctcagttgcgttcccctctgcccaggnnnnnnnnnnnnnnnnnnnnnnnnnnnnnnnnnnnnnnnnnnnnnnnnnnnnnnnnnnnnnnnnnnnnnnnnnnnnnnnnnnnnnnnnnnnnnnnnnnnnnnnnnnnnnnnnnnnnnnnnnnnnnnnnnnnnnnnnnnnnnnnnnnnnnnnnnnnnnnnnnnnnnnnnnnnnnnnnnnnnnnnnnnnnnnnnnnnnnnnnnnnnnnnnnnnnnnnnnnnnnnnnnnnnnnnnnnnnnnnnnnnnnnnnnnnnnnnnnnnnnnnnnnnnnnnnnnnnnnnnnnnnnnnnnnnnnnnnnnnnnnnnnnnnnnnnnnnnnnnnnnnnnnnnnnnnnnnnnnnnnnnnnnnnnnnnnnnnnnnnnnnnnnnnnnnnnnnnnnnnnnnnnnnnnnnnnnnnnnnnnnnnnnnnnnnnnnnnnnnnnnnnnnnnnnnnnnnnnnnnnnnnnnnnnnnnnnnnnnnnnnnnnnnnnnnnnnnnnnnnnnnnnnnnnnnnnnnnnnnnnnnnnnnnnnnnnnnnnnnnnnnnnnnnnnnnnnnnnnnnnnnnnnnnnnnnnnnnnnnnnnnnnnnnnnnnnnnnnnnnnnnnnnnnnnnnnnnnnnnnnnnnnnnnnnnnnnnnnnnnnnnnnnnnnnnnnnnnnnnnnnnnnnnnnnnnnnnnnnnnnnnnnnnnnnnnnnnnnnnnnnnnnnnnnnnnnnnnnnnnnnnnnnnnnnnnnnnnnnnnnnnnnnnnnnnnnnnnnnnnnnnnnnnnnnnnnnnnnnnnnnnnnnnnnnnnnnnnnnnnnnnnnnnnnnnnnnnnnnnnnnnnnnnnnnnnnnnnnnnnnnnnnnnnnnnnnnnnnnnnnnnnnnnnnnnnnnnnnnnnnnnnnnnnnnnnnnnnnnnnnnnnnnnnnnnnnnnnnnnnnnnnnnnnnnnnnnnnnnnnnnnnnnnnnnnnnnnnnnnnnnnnnnnnnnngcatgtgcttcggatccatgtattagaggcccaggacctgattgccaaagaccgtttcttggggggactggtgaagggcaagtcagacccctatgtcaaactaaagctggcaggacgaagcttccggagccatgttgttcgggaagatctcaatccccgctggaatgaggtttttgaggtnaggtgattgtcacatcagttccaggccaagagctagaggttgaagtctttgacaaggacttggacaaggatgattttctgggcaggtgncaggtgtaaagtgagtctcaccacagtcttaaacagtggcttccttgatgag

SEQ ID NO: 28300 - DNA, 640 bp, Macaca Mulatta
ctcttctctatgtgggtaatagacaagctagtataattgagtacctgccaacccttcgaaacatctgtaagactgagaagctaaaagaacaaggaaaaagtaaaagaaggtaaaggctttattaaaaacaacattttagatagttttttcaagattaatacatattttcataagatgaaaatgttaatattaaattgtatttttctttgtaattttgacagattcctgcactattttgaaggaattcatcttgacattccaaaagagactgtgaatactttggcagctaccttcccttaatgtttcatactaaccatgctttgtatagattatcatgtggtccttaagatacatttttatattatgtggatcttcgtggaaaagtatatttctcaatgtacattttaaacaaacaatttgtatatttttttattggtgggcaaatatttaaaatatttgagttacaaattgtatatatgattgtaattttttttctgaattttttgtattatctgatttagctttgttggagtattttttctatgtgagtgaactgtttctggaaggtagagttcattaagatgaactccctatttcaagtgtttatattatatattagcttaatattcagatacattag

SEQ ID NO: 28301 - DNA, 824 bp, Macaca Mulatta
tgaattagaattaatcattttgatcttctcaggctgtaatttgctcttctccctctcaattgttctcatatcctacatgtttatactagtagccattctcagaatgaactcaagggaagggaggtacaaagccttctccacctgtagctctcatctgacagtggtgatcgtgttctatgggacattgttatttatttacttgcaacccaagtccagtcatactttggctattgataaaatggcctcggtgttttacaccctggtgattcctatgctgaatccattgatctacaacctaaggaacaaagaagtaaaagatactctaaagagaactttagccaatcgattcaaaattctcacttaatatcttaatattcaattgcatagctgggtacgataatctttgtttagttctttgtcaaaccaattataacataaaaaagtagaaatattctatctgcttaggttttcctgtttttctggacaaaacatgtactcttagagcaacccgtactctttgccacctcaatgggataaataaatactacactcaggtaatatatatcttaagcaatgtttgagatcatattggaaccgctactatttataaataaggcaaattaggtcaaacttagagttgcagagttaaagtgaaaagcttatatagttcaaacagagtaaaaataaccagaaaattagtaatagatatttcatagcaggcactaggtattaaatataagaaagattgaaccataaagaatgtgtgcgctagataggaagcaagaaagtaagtaaatatgtgattataacacaacatgaaaagc

SEQ ID NO: 28302 - DNA, 727 bp, Macaca Mulatta
ctttgagctggcatctgctgcaggtgtgggctgtgacattgacccagccttggtggctgccattgctaatctgaaagctgatacttcatcgtcgtgaggaggaatataaggtggcctgcctgctcttgatctttctggcagtttccctcccattccttgccactgacccttcttccttttatagcattgagaaggatggttacaacaacaatattcattgcttgaccaaagccatcatcgcaggtgtctgctgccctcttcacactgtacaacaagaacattgaaactcacctcaaggaatttctggtggtggcctctgtcagcctcttgcagctgggccaggagactgacaagcttaaaaccagaaatcgcgaatccatttctctgctcatgcgcttggtggtggaggagtcatccttcctgaccctggacatgctggagtcctgtttcccttatgtcctgcttcgaaatgcctatcgggaggtgtcccgggccttccacctaaaccgagtgcctgccaatacccactgaagagcccttcggaccttcctaaagccttgccatagtggaagctgtggtcactttctcaaggggtgggaatggggtggggtcactaagaagagggtcagaagccagagttgatgaacagatctgtggaagaacaatccatggctgagaaatcgtagagcagtgaggcaggctgtgggcatggaggacagttatggaa

SEQ ID NO: 28303 - DNA, 852 bp, Macaca Mulatta
  misc_feature (1)...(852): n = A,T,C or G
caatgagtatatatttatggatttggagcaaaagctcagcaagtacttctcaaaagactggaagaaagaaatatatgaagnnnnnnnnnnnnnnnnnnnnnnnnnnnnnnnnnnnnnnnnnnnnnnnnnnnnnnnnnnnnnnnnnnnnnnnnnnnnnnnnnnnnnnnnnnnnnnnnnnnnnnnnnnnnnnnnnnnnnnnnnnnnnnnnnnnnnnnnnnnnnnnnnnnnnnnnnnnnnnnnnnnnnnnnnnnnnnnnnnnnnnnnnnnnnnnnnnnnnnnnnnnnnnnnnnnnnnnnnnnnnnnnnnnnnnnnnnnnnnnnnnnnnnnnnnnnnnnnnnnnnnnnnnnnnnnnnnnnnnnnnnnnnnnnnnnnnnnnnnnnnnnnnnnnnnnnnnnnnnnnnnnnnnnnnnnnnnnnnnnnnnnnnnnnnnnnnnnnnnnnnnnnnnnnnnnnnnnnncaatctcggctcactgcaacctccacctcccgggttcaagtgattctcctgcgttagtctccagagtagctgggattacaggcgggcgccaccacactgggctcattttgtattttctgtagagacggggtttctccacgttggtcaagctggtttcaaactcccgacctcaggtgatccacccgcctcggcctcccaaagtgctgggattacgggtgtgagccaccgcgtccggcctaaagtagtgcttcctcaaacgccaggactcgtactcgctagggggggtacaccgtccagggctgggcgaggcttccagaggccgctgggcaaagggctcctgcgctttctgcacggcggttctcgctgttcgctgcccactctgcaggtgtctagtg

SEQ ID NO: 28304 - DNA, 289 bp, Macaca Mulatta
tcgagttctcctgctggtgaggctccggatctcaggggcagcccagagtcagtgcctcccaggctgcccctgccaggcctgcagcctcccctgccggggccgctctctgctgtccccattcagtgccctgggccctgcattcatgccccccacgcccactcagaccctatgcctggactttggggctggcagctgaagccctgagatcctgggccagctgctggcacacagctaggcaggctctcctgccaggtgcccacgcccaggcctcccaatcagaggcagacag

SEQ ID NO: 28305 - DNA, 1448 bp, Macaca Mulatta
  misc_feature (1)...(1448): n = A,T,C or G
cgctcccctcccgccgcccgcggtcctccgtcggttctctcgttagtccgcggtctggtcttcagctacccgtcttcgtctccgagcttgcgactcgcggaccggcgtccccggcgcgaagaggctggactcggattcgttgcctgagcaatggctgccatccggaagaaactagtgattgttggtgacggagcctgtggaaagacatgcttgctcatagtcttcagcaaggaccagttcccagaggtgtatgtgcccacagtgtttgagaactatgtggcagatatcgaggtggatggaaaacaggtagagttggctttgtgggacacagctgggcaggaagattatgatcgcctgaggcccctctcctacccagataccgatgttatactgatgtgtttttccatcgacagccctgatagtttagaaaacatcccagaaaagtggaccccggaagtcaagcatttctgtcccaacgtgcccatcatcctggttgggaataagaaggatcttcggaatgatgagcacacaaggcgggagctagccaagatgaagcaggagccggtgaaacctgaagaaggcagagatatggcaaacaggattggtgcttttgggtacatggagtgttcagcaaagaccaaagatgggagtgagagagggtttttgaaatggctacgaaagctgctctgcaagcttaaacgtgggaagaacaaaaatctggggtgcctatgttcttggtgaaaaccttgggttgcaaagtaacataccccttattgtgaatcaaaattttctaaaaaatgcgcatagataaaataagaccataagaaaggaaatgcaagtaacaagaaacccacctatatattcataattatattctgaggacaatatttaaacccattaaagcgaatctcactcagacaagtgtcaaagaagaaggggtgatggtctcttatggagctcttctagcctccccctctctatncattttatatctgaaggccgcccacatactccaataacgtgaaattattaataatctataaatagagcatgttgnttctacgctccacacacgtctcgctattcttgaggcggaatcgcaaagtccataaagatgtaatgtgccacctctttatatcaattgtaaggatgccggagtgctctatcacgttagcaacctatgtcgagcagatatgtgtccatacgttgcagagctctaattcgtccgcgaatgtgttgttatgtgtaataagacaaccatagagtgttatctgtgcaataaacacaataacagatggaacaaactacccaaatatcaaatagtaagaactgtattaccatatggaaaattatagagagtctacggggacaagcgatagtcacgtagcatgctcgttgggaccgaaacctctctataggtcgcactcaaaatataaattagactgaag

SEQ ID NO: 28306 - DNA, 203 bp, Macaca Mulatta
  misc_feature (1)...(203): n = A,T,C or G
gaaatggggccttgatcagaagttataagcaaacttntnnnnnnnnnnnnnnnnnnnnnnnnnnngcaagtaattgggggatgcttataccatgggaaaccccataattggagtcactggaacctgggaagaatccttggagactgtcattttcggatatcctgccaaatgccctcttatctagaaatttttatttcattttg

SEQ ID NO: 28307 - DNA, 434 bp, Macaca Mulatta
cacccccagcagagcctgtctccatagctgagtagaccttttgccctgattcgggctgcccagctccagatccttcccaggagacacctgtagccctccgtgacaagcttacttaccccatagcatgccgaaccaactcatcttctaccaccactctagagtttagcctttatctttaggaacctgttggagtgactctagctttcacgttgtctgtttgggttgatggtcgagtgggagtttccggtgacctgatggaagcagctgccgagcaaaggactagagggggccgccaccctgggcagcttagatgaaagcgctacagaccagcaacagcctcccaccaagggttctccccatttccagcagtagggactgcagcagcaatatagacatcccaaccagcgtacaaccactttcccgagaattcactg

SEQ ID NO: 28308 - DNA, 775 bp, Macaca Mulatta
ggatttggttgcagaccaggttctgaatcccatgctgggcaggatttctggttattacaagtcagttgcatcaagtaaattctgatttacttggctggtggctttgtgaacgacagttaccttcaggcgggctcaatggaaggccagagaagttaccagatgtatgctattcatggtgggtcctggcttccctaaagataattggaagacttcattggattgatagagagaaactacgtaatttcattttagcatgtcaagatgaagaaacggggggatttgcagacaggccaggagatatggtggatccttttcataccttatttggaattgctggattgtcacttttgggagaagaacagattaaacctgttaatcctgtcttttgcatgcctgaagaagtgcttcagagagtgaatgttcagcctgagctagtgagctagattcattaaagtgaaagctgcatagtatagttttgccattttaacatttctgtatttgaagtgcttattaaatctaaaaatgaatactgttaatattttgtacattgtgttaaattaattttaataaattatataattatacatattgtaaaataaagacctgtattttattttctgctctttattctgaagtcctgttattctgactacagttttttgtgtatactttttgtgtcccgttatttatgtttcaataaactgagctaatgtagaaagaactctagggtttctactttgattttttctccccatgtaatacccttttcatggta

SEQ ID NO: 28309 - DNA, 941 bp, Macaca Mulatta
aaaaacagagggcccacccaggcaggggggattaatgtgaaggcacccgcagttgccctgagaaaagatgaatcttctgttagcgtctgtgaagatcccgaaatgaggacccgctctaaacccccctgcaggcgtgtgctttcaccgggagattccacaggacaatgtatcctgacatgtgactcaagtattttcaagtataatcctttcttaaacgatagtcaaaaaacccatgaaaacaacgaccacgatgaagtcttggggcagaacattcagtgggttccgtgtgggagaaaaacagagctgaaatcaagcacatggactggcagtcagaacgccgtgcatcgtatacgtgatgaaattgatacgggagcaaacaggcaccaacagaatccatttggaaaagctttccatgaagacggatcccttagggcacacaacactcgtgttcgagaggaaatgtatgattttactcagggcgagaacacttccagaaataactcagttcatgccgtgcagatgcagtcgtataccgcagagacaaataagaaggattgtcagactggagcaacctctgccaacgccccaaattccggttcacacaagagtcactgcactggagagaaaagccacaaatgtcccgaatgtgggagagcctttttttatcagtcattccttatgagacatatgaaaattcacactggagagaaaccgtacgaatgtgggaaatgtggaaaagccttcagatattccttacaccttcataagcatttaagaaagcacgtcgtgcggaggaagccctacgaatgtgaagaatgtgggaaagtcatcagggagtcctcaaaatacacacatctaaggagccacactggagagaaaccctataaatgtaagacatgtggaaagagactttacaaagtcgtcaggacttaaaagacatc

SEQ ID NO: 28310 - DNA, 746 bp, Macaca Mulatta
  misc_feature (1)...(746): n = A,T,C or G
attcattgtcctctctctgtgctacctgagccgcgaaggcatttggatgcctctctgttggggcctggggctgcagaacgcacctgcgtttcacgggcttcattagcggccctagggagagggctttctgctttggatccctgttcnnnnnnnnnnnnnnnnnnnnnnnnnnnnnnnnnnnnnnnnnnnnatcaagtctcttcaggccctcagtcaagtttggctaaaggttggtgtaaaaatccagagaagcctggaagacatcatagatgccgtggattaactgtgaaactgaccaactccaggtctgataccaaaagcaatatttgtcatgtggtctgaccatgtggagatatttctggacttgctagagcctgcttagctgcatgttttgtagttacgatttttggaatcccactttgagtgttgaaagtgtaaggaagctttcttcttatatcttgggcctggatactgcccagagaagaaatttggnnnnnnnnncttaatggacaagaaacacttgctgttctcatgttccaactctgagagcaagagaccctcatcatctgtgcctggaagagttcattgtcactgagcagcacagcctgagcgctgtcctctgcgtgtcaacccgtattccactgccttatctgacaaggggtcacatgctgctcaccttactgccctgggattacatcagttacaggccagagtctccttggagggcctggaactcagtcctccta

SEQ ID NO: 28311 - DNA, 1305 bp, Macaca Mulatta
ctggaggtgagacccaaagaaggctggaaccatgctgactttgtatactgtgaggacacagagtttgctcctggaaagcccactgtcaacgcagatgaggaagttgggggtccccaaatctgccgtgtatgtggggacaaggccactggttatcacttcaatgtcatgacatgtgaaggatgcaagggctttttcaggagggccatgaaacgcaacgcccgccttaggtgccccttccggaagggcgcctgcgagatcacccggaagacccggcgacagtgccaggcctgccggctgcgcaagtgcctggagagcggcatgaagaaggagatgatcatgtccgacgcggccgtagaggagaggcgggccttgatcaagaggaagaaaagagaacggatcgggactcagccacccggagtgcaggggctgacggaggagcagcggatgatgatcagggagctgatggacgctcagatgaaaacctttgacactaccttctcccatttcaagaatttccggctgccaggggtgcttagcagtggctgtgagatgccagagtctctgcaggccccatcgagggaagaagctgccaagtggaaccaggtcaggaaagatctgtggtctgtgaaggtctccgtgcagctgcggggggaggatggcagtgtctggaactacaaacccccagccgacaatggcgggaaagagatcttctccttgctgccccacatggctgacatgtcaacctacatgttcaaaggcatcatcaactttgccaaagtcatctcctacttcagggacctgcccatcgaggaccagatctccctactgaagggggccacttttgagctgtgccagctgagattcaacacagtattcaacgcggagactggaacttgggagtgtggccggctgtcctactgcttggaagaccctgcaggtggtttccagcaacttctgctggagcccatgctgaaattccactacatgctgaagaagctgcagctacacgaggaggagtatgtgctgatgcaggccatctccctcttctccccagaccgcccaggtgtggtgcagcaccgcgtggtggaccagctgcaggagcaatacgctattactctgaagtcctacattgaatgcaatcggccccagcctgctcataggttcctgttcctgaagatcatggctatgctcaccgagctccgcagcatcaacgcccagcacacccagcggctgctgcgcatccaggacatacacccctttgctacgcccctcatgcaggagttgttcggcatcacgggtagctga

SEQ ID NO: 28312 - DNA, 3098 bp, Macaca Mulatta
  misc_feature (1)...(3098): n = A,T,C or G
cagagttgactcctgctttacccttgctttgtcccatccctttgcgtttccttccagtttgcacacctggaatttcatctttgtcatcaccttgaccaactaggcacagnnnnnnnnnnnnnnnnnnnnnnnnnnnnnnnnnnnnnnnnnnnnnnnnnnnnnnnnnnnnnnnnnnnngtttccttcagagaaccacacatgtatcttcgacagtggaataatggttctgtctgtcaggagatccagttctcagctcaagcagactgtaaacttctagagtgcagaaatgtcactaaacaaagtgtggtaaaacccttcagcatcttcgggcagatggcagtttccagcgatgtagtagaaaagctgcttgactgcaccgtgatagttgattctgtatttgtaaacgttggacagcatgtagtccattctctaaacactgcaatacaagcttggcaacannnnnnnnnnnnnnnnnnnnnnnnnnnnnnnnnnnnnnnnnnnnnnnnnnnnnnnnnnnnnnnnnnnnnnnnnnnnnnnnnnnnnnnnnnnnnnnnnnnnnnnnnnnnnnnnnnnnnnnnnnnnnnnnnnnnnnnnnnnnnnnnnnnnnnnnnnnnnnnnnnnnnnnnnnnnnnnnnnnnnnnnnnnnnnnnnnnnnnnnnnnnnnnnnnnnnnnnnnnnnnnnnnnnnnnnnnnnnnnnnnnnnnnnnnnnnnnnnnnnnnnnnnnnnnnnnnnnnnnnnnnnnnnnnnnnnnnnnnnnnnnnnnnnnnnnnnnnnnnnnnnnnnnnnnnnnnnnnnnnnnnnnnnnnnnnnnnnnnnnnnnnnnnnnnnnnnnnnnnnnnnnnnnnnnnnnnnnnnnnnnnnnnnnnnnnnnnnnnnnnnnnnnnnnnnnnnnnnnnnnnnnnnnnnnnnnnnnnnnnnnnnnnnnnnnnnnnnnnnnnnnnnnnnnnnnnnnnnnnnnnnnnnnnnnnnnnnnnnnnnnnnnnnnnnnnnnnnnnnnnnnnnnnnnnnnnnnnnnnnnnnnnnnnnnnnnnnnnnnnnnnnnnnnnnnnnnnnnnnnnnnnnnnnnnnnnnnnnnnnnnnnnnnnnnnnnnnnnnnnnnnnnnnnnnnnnnnnnnnnnnnnnnnnnnnnnnnnnnnnnnnnnnnnnnnnnnnnnnnnnnnnnnnnnnnnnnnnnnnnnnnnnnnnnnnnnnnnnnnnnnnnnnnnnnnnnnnnnnnnnnnnnnnnnnnnnnnnnnnnnnnnnnnnnnnnnnnnnnnnnnnnnnnnnnnnnnnnnnnnnnnnnnnnnnnnnnnnnnnnnnnnnnnnnnnnnnnnnnnnnnnnnnnnnnnnnnnnnnnnnnnnnnnnnnnnnnnnnnnnnnnnnnnnnnnnnnnnnnnnnnnnnnnnnnnnnnnnnnnnnnnnnnnnnnnnnnnnnnnnnnnnnnnnnnnnnnnnnnnnnnnnnnnnnnnnnnnnnnnnnnnnnnnnnnnnnnnnnnnnnnnnnnnnnnnnnnnnnnnnnnnnnnnnnnnnnnnnnnnnnnnnnnnnnnnnnnnnnnnnnnnnnnnnnnnnnnnnnnnnnnnnnnnnnnnnnnnnnnnnnnnnnnnnnnnnnnnnnnnnnnnnnnnnnnnnnnnnnnnnnnnnnnnnnnnnnnnnnnnnnnnnnnnnnnnnnnnnnnnnnnnnnnnnnnnnnnnnnnnnnnnnnnnnnnnnnnnnnnnnnnnnnnnnnnnnnnnnnnnnnnnnnnnnnnnnnnnnnnnnnnnnnnnnnnnnnnnnnnnnnnnnnnnnnnnnnnnnnnnnnnnnnnnnnnnnnnnnnnnnnnnnnnnnnnnnnnnnnnnnnnnnnnnnnnnnnnnnnnnnnnnnnnnnnnnnnnnnnnnnnnnnnnnnnnnnnnnnnnnnnnnnnnnnnnnnnnnnnnnnnnnnnnnnnnnnnnnnnnnnnnnnnnnnnnnnnnnnnnnnnnnnnnnnnnnnnnnnnnnnnnnnnnnnnnnnnnnnnnnnnnnnnnnnnnnnnnnnnnnnnnnnnnnnnagtattttcatgttccagacagtgctacttttagcatttgcccaggtggagagcagcctgctatgaaatccagctcccttccttgctgggacttgatgcctgccattagtcagtcagtgctggatgcatccctgcttcagaaacagatcatgctgggcttttctcctgccccaggtgctgacagctcacagtgctggagcctgccagctatagttagaccagagtttcccagacagagtgtggcagtaccccttgggaatttccgggaaaatggattctgtacnnnnnnnnnnattctgttctagggctatagtgctgacatatcaagaacaccttggagtgacttacttaaccctctcagaagaccctagtcctcgagtaattatccacaacagatgtccagtaacagtgcttataaaggaaaacattangatattccgaagtttgaggtttattgcaaaaaaattccctccgagtgctcaattcatcatgaactgtatcatcagatttccagttatccggactgcaagaccaaagacttacttccgagcctccttttgagagttgaactgctagatgaagtaacaactgagtggagtgatgccatcgacatcaacagtcagggaacacaggtnnnnaggttgtgttcctgactggctttggctatgtgtatgtggacactgtacatcagtgtggcacagtcttcatcactgtggccccagaaggaaaagcannnnnnnnnnnnnnnnnnnnnnnnnnnnnnnnnagaagattgttacattcaaaatgtttatcactcagttgagtctggcagtgtttgatgacctcacccaccacaaagcatcacctgagcttctgagactcacactggacaatgtttttctctgcatggccccgggagctggtcccctccctggggaagagcctgcggctgcgctgtttgaactttactgtgtggagatctgctgtggggacctgcagctagacaaccagctttataacaaatccaatttccactttgctgtcttagtctgccagggagaaaaagcagaacccattcagtgttctaaaatgcagagtctcctcatatc

SEQ ID NO: 28313 - DNA, 1813 bp, Macaca Mulatta
ggccctggccctgaccgagacccgggccggctcgcactccttgaggtatttcggcaccgccgtgtcccggcccggccacggggagccccgcttcatctacgtgggctacgtggacgacacgcagttcgcgcggttcgacagcgacgccgcgagtccgagggcggagccgcgggcgccgtgggtggagcaggaggggccggagtattgggaagagcagacagagctcgccaaggcccgcgcacagactgaccgagtggacctggggaccctgctccgctactacaaccagagcgagggggacgcctacgacggcaaggattacatcgccctgaacgaggacctgcgctcctggaccgccgcggacatggcggctcagaacacccagcgcaagtgggaggcggccggtgaggcagagcaccagagagcctacctggagggcgagtgcgtggagtggctccgcagacacctggagaatgggaaggagacgctgcagcgctcagaacccccaaagacacacgtggcccaccaccccgtctctgatcatgaggccaccctgaggtgctgggccctgggcttctatcctgcggagatcacagtgacctggcagcgggatggggaggaccagacccaggacacggagcttgtggagaccaggcctgcaggggatggaactttccagaagtgggcagctgtggtggtaccttctggagaggagcagagatacacgtgccatgtgcagcatgaggggctacccgagcccctcaccctgagatgggagccgtcttcccagtccaccatccccatcgtgggcatcattgctggcctggttctccttggagctgtggtcactggagctgtgattgttgctgtgatgtggaggaggaagagctcaggtagaaaaggagggagctactctcaggcttcgtgtagcgacagtacccagggatctgatgagtctctcacagcttgtaaagcctgagacagctgccttgtgtgcaactgagatgcaggatttcttcacgcctcccctttgtgtcttaagggactctggcttctctttttgcaagggcctctgaatctgtctttgtccctgttagcataatatgaggaggcagacaaacactccacctccatgtctaccatgacccccttcctcggccttccaaagtgctggaattacaggtatgagccactgcgcccggcctcggattttcaatctagaaacagttgtggagcgtctgggacttgtatgtagatcactgtttattagagggtttggtatttcacttgtacttcatttatttggattggattttacttacttttctaatcagcctgtgaactaaagtgaacaaacaggtttcagtgccctttattttcagacataaggaaacataaccagagaaattacagtcatgcgttgtttaacagagatatgaaaaatgcatcttaagtgattctatcattggcattactctagtggagggtctctgtgggctgggcatgctagctcagttctcttttcctcttcttataaagccaccagtccccattcctgtgataacccatttatccattaacccatgaatgaaaggtagaagccttatcatccaattgactctccaaaggctccaccctttcagttattgccaacattaggggattaagtcttcaacatgagttgttgggaaaggaaatttccaaaccaaaagccattttgaaaaacaatatttcaacttcccaaggtataagggtccaaaatttacaggggggtaaaggaataaggctaaattttgcccaaaaattgtgctgt

SEQ ID NO: 28314 - DNA, 145 bp, Macaca Mulatta
ggttgtggccaccggactgtgtggtacagagatgaaaatattggggagtaaacacttggacctcttgtatcccaccatcttgggtcatgaaggggctggaatcgttgagagtattggagaaggagtaagcacagtgaaaccaggt

SEQ ID NO: 28315 - DNA, 2142 bp, Macaca Mulatta
  misc_feature (1)...(2142): n = A,T,C or G
ggttttggaaaggaactctttgagtctgatctagatcgaatcatggaacacattgaagctgccatggaaatggttcctgtcttgaaaaaggctgacatcatcaatgtcgtcaatggtcctatcacgtattctcctgacattctgcctatggtggggccccatcagggagtcagaaactactgggtggctataggctttggnnnnnnnnnnnnnnnnnnnnnnnnnnnnnnnnnnnnnnnnnnnnnnnnnnnnnnnnnnnnnnnnnnnnnnnnnnnnnnnnnnnnnnnnnnnnnnnnnnnnnnnnnnnnnnnnnnnnnnnnnnnnnnnnnnnnnnnnnnnnnnnnnnnnnnnnnnnnnnnnnnnnnnnnnnnnnnnnnnnnnnnnnnnnnnnnnnnnnnnnnnnnnnnnnnnnnnnnnnnnnnnnnnnnnnnnnnnnnnnnnnnnnnnnnnnnnnnnnnnnnnnnnnnnnnnnnnnnnnnnnnnnnnnnnnnnnnnnnnnnnnnnnnnnnnnnnnnnnnnnnnnnnnnnnnnnnnnnnnnnnnnnnnnnnnnnnnnnnnnnnnnnnnnnnnnnnnnnnnnnnnnnnnnnnnnnnnnnnnnnnnnnnnnnnnnnnnnnnnnnnnnnnnnnnnnnnnnnnnnnnnnnnnnnnnnnnnnnnnnnnnnnnnnnnnnnnnnnnnnnnnnnnnnnnnnnnnnnnnnnnnnnnnnnnnnnnnnnnnnnnnnnnnnnnnnnnnnnnnnnnnnnnnnnnnnnnnnnnnnnnnnnnnnnnnnnnnnnnnnnnnnnnnnnnnnnnnnnnnnnnnnnnnnnnnnnnnnnnnngatggattgaagaagaagcagtcaaaggcggatatgatgttgaaattaaaaacataaccgatgagcttggagtccttggagttgctgggccacaggcaagaaaggtccttcagaaactgacctctgaagatctcagtgatgacgttttcaagtttcttcaaaccaagtccttaaaggtttccaacattcctgtcactgctattaggatatcttatactggtnnnnnnnnnnnnnnnnnnnnnnnnnnnnnnnnnnnnnnnnnnnnnnnnnnnnnnnnnnnnnnnnnnnnnnnnnnnnnnnnnnnnnnnnnnnnnnnnnnnnnnnnnnnnnnnnnnnnnnnnnnnnnnnnnnnnnnnnnnnnnnnnnnnnnnnnnnnnnnnnnnnnnnnnnnnnnnnnnnnnnnnnnnnnnnnnnnnnnnnnnnnnnnnnnnnnnnnnnnnnnnnnnnnnnnnnnnnnnnnnnnnnnnnnnnnnnnnnnnnnnnnnnnnnnnnnnnnnnnnnnnnnnnnnnnnnnnnnnnnnnnnnnnnnnnnnnnnnnnnnnnnnnnnnnnnnnnnnnnnnnnnnnnnnnnnnnnnnnnnnnnnnnnnnnnnnnnnnnnnnnnnnnnnnnnnnnnnnnnnnnnnnnnnnnnnnnnnnnnnnnnnnnnnnnnnnnnnnnnnnnnnnnnnnnnnnnnnnnnnnnnnnnnnnnnnnnnnnnnnnnnnnnnnnnnnnnnnnnnnnnnnnnnnnnnnnnnnnnnnnnnnnnnnnnnnnnnnnnnnnnnnnnnnnnnnnnnnnnnnnnnnnnnnnnnnnnnnnnnnnnnnnnnnnnnnnnnnnnnnnnnnnnnnnnnnnnnnnnnnnnnnnnnnnnnnnnnnnnnnnnnnnnnnnnnnnnnnnnnnnnnnnnnnnnnnnnnnnnnnnnnnnnnnnnnnnnnnnnnnnnnnnnnnnnnnnnnnnnnnnnnnnnnnnnnnggaagccttgaccaaagctgcggtaaaagtaattgaatctgtacttttaaaatcttaactaaaaacccttcacctgaaacaactcatatcattgttctcaatggtatttttggtatgtttcaaaggaagtaacttttggggggaaaatcagtggccctttttttagctggaaatggaagaaatgcattaatcaagagcaaaaggaaaatcagctgcctttggatggagtcataggtattcctggaattttccttgtggaaatactgaatttttgtctatttctgaagaacttccatgaagattcacagagactcaagtattaagcgtaaagtgttgaagcaggtcagaagaacttgttttctataatatgt

SEQ ID NO: 28316 - DNA, 156 bp, Macaca Mulatta
  misc_feature (1)...(156): n = A,T,C or G
aaggataatgcagactgcactaaatttactctgttttacaaactgcttggcagccccaggtgaagcatcaaggattgtttggtattaaaagtggtgttcacgggcattgcaccaaagtgtgtaccccgntaagcatgaaacccagtgattttttcc

SEQ ID NO: 28317 - DNA, 892 bp, Macaca Mulatta
  misc_feature (1)...(892): n = A,T,C or G
tgggggggcacatatagcgannnnnnnnnnnnnnnnnnggcccccgtcttttctctccccggggggaagaattattatttttcccccggcgggcccaacaaggtggtgttgtccctcccgggcgttatttattgttttttttacccccgcctgtgtggggaggggtctcacctcggggcggggagggtgtttatttttaattaaaaccacccacaccttcttttaagagggcggnnnnnnnnnnnnnnnnnnntaatatataaagaagggcggctcggggaaaacccctgtgtgtgaataaccccccataaaagagctcccacgaaaaacacctcctcgggggtnnnnnnnnnnnnnnnnnnnnngtttgttcccccgnnnnnnnnnnnnnnnnnnnnnnnnnnagaaaaaccacnnnnnnnnnnnnnnnnnngggttttctttttggggaaaaaaaattaggannnnnnnnnnnnnnnnnnnnnngggggcgcggccccaacnnnnnnnnnnnnnnnnnnnnnnnnnnnnnnnnnnnnnnnnnnnnnnnaaaannnnnnnnnnnnnnnnnnnnnnnnnnnnnnnnnnnnnnnnnnnnnnnnnnnnnnnnnnnnnnnnnnnnnnnnnnnnnnnnnnnnnnnnnnnnnnnnnnnnnnnnnnnnnnnnnnnnnnnnnnnnnnnnnnnnnggtttttaatattgtttattaacacagtaacaaatgcagacttaagtagtccacaacatataaccaatccactgagcaactcctattccacgccttacagttaacagcttaaggtatttcactacaggttttcacaagtcctgatttaaaccttttttaaacaaagtagattggcatataaaataaaacacattactcatctccc

SEQ ID NO: 28318 - DNA, 842 bp, Macaca Mulatta
  misc_feature (1)...(842): n = A,T,C or G
aaacgggagcagttgaagaagagcaaagaccgtgagaagctgatggaggaagaacttgaagctctgcggcaggaatttaaaaagaaagacaagacgngttgaaagagaattccagaaagttggaggaagaaaatgagaatctccgagaagagttacagtgttgttctacacaactggaatcctctgtcaacaaatacaacaccagccaacaggtcatccaagacttgaataaagagnnnnnnnnnnnnnnnnnnnnnnnnnnnnnnnnnnnnnnnnnnnnnnnnnnnnnnnnnnnnnnnnnnnnnnnnnnnnnnnnnnnnnnnnnnnnnnnnnnnnnnnnnnnnnnnnnnnnnnnnnnnnnnnnnnnnnnnnnnnnnnnnnnnnnnnnnnnnnnnnnnnnnnnnnnnnnnnnnnnnnnnnnnnnnnnnnnnnnnnnnnnnnnnnnnnnnnnnnnnnnnnnnnnnnnnnnnnnnnnnnnnnnnnnnnnnnnnnnnnnnnnnnnnnnnnnnnnnnnnnnnnnnnnnnnnnnnnnnnnnnnnnnnnnnnnnnnnnnnnnnnnnnnnnnnnnnnnnnnnnnnnnnnnnnnnnnnnnnnnnnnnnnnnnnnnnnnnnnnnnnnnnnnnnnnnnnnnnnnnnnnnnnnnnnnnnnnnnnnnnnnnnnnnnnnnnnnnnnnnnnnnnnnnnnnnnnnnnnnnnnnnnnnnnnnnnnnnnnnnnnnnnnnnnnnnnnnnnnnnagccctgctgcctgccccagcggtctgtacccaaagacacctgtagcctctaccgagagaacgatcagattatgaccagcttggagcaatgggcgaaacagcagaag

SEQ ID NO: 28319 - DNA, 453 bp, Macaca Mulatta
aggtttaatgcttgttcataacaagttggtggaccccttgtacagtatcaaagagaaagaaactgagaaaagccaatcttctaagaaaccatacagcgattagcctgtgctgggacctagtgtcaagtacccatagggaaaggcaggtctttctggaaattgtctttagaagaaagaattgtatttctttaatctagtatgggtactccagataagtgggtaaacttattgttcttggccatgaggctgggagcctagtcatggagtttagctatagggagaattatttgtttgtaacttaatcagaaaaaaaatctctgcaaaatgtactccatcattttgatgtctgccaaacccaggttgggagttttaaactttttgttctgcttcagccacggttcacatgtacaacacactcccatcaggaatttctctccttacatgcactgattt

SEQ ID NO: 28320 - DNA, 767 bp, Macaca Mulatta
ggtgactatgaatggctgctcagttgaagacctaggactggatttcactctgccagggtttcccaatatcgaactgaagaaaggagggaaggatataccagtcactatccacaatttagaggagtatctaagactggttatattctgggcactaaatgaaggcgtttctaggcaatttgattcgttcagagatggatttgaatcagtcttcccactcagtcatcttcagtacttctacccggaggaactggatcagctcctttgtggcagtaaagcagacacttgggatgcaaagacactgatggaatgctgcaggcctgatcacggttacactcatgacagtcgggctgtgaagtttttgtttgagattctcagtagttttgataatgagcagcagaggttatttctccagtttgtgactggtagcccaagattgcctgttggaggattccggagtttgaatccacctttgacaattgtccgaaagacatttgaatcaacagaaaacccagatgacttcttgccctctgtaatgacttgtgtgaactatcttaagttgccggactattcaagcattgagataatgcgtgaaaaactgttgatagcagcaagagaagggcagcagtcgttccatctttcctgatcacaacaagaaatgcagtgtctgcctgttacagcaaaagaaacaaatcatgatttcttttctaatgtatcacctgagtcaaggaaacatgttacgcctttcttgtttgtaagaaaaaacggct

SEQ ID NO: 28321 - DNA, 1288 bp, Macaca Mulatta
  misc_feature (1)...(1288): n = A,T,C or G
gtgctgcataagagaaacgagttggcacacgcacagtgtttgttggcaatcattcagtttcgggaacagaagcttacgttgcacaaagattttgtgataatagaatagtctcatctaagnnnnnnnnnnnnnnnnnnnnnnnnnnnnnnnnnnnnnnnnnnnnnnnnnnnnnnnnnnnnnnnnnnnnnnnnnnnnnnnnnnnnnnnnnnnnnnnnnnnnnnnnnnnnnnnnnnnnnnnnnnnnnnnnnnnnnnnnnnnnnnnnnnnnnnnnnnnnnnnnnnnnnnnnnnnnnnnnnnnnnnnnnnnnnnnnnnnnnnnnnnnnnnnnnnnnnnnnnnnnnnnnnnnnnnnnnnnnnnnnnnnnnnnnnnnnnnnnnnnnnnnnnnnnnnnnnnnnnnnnnnnnnnnnnnnnnnnnnnnnnnnnnnnnnnnnnnnnnnnnnnnnnnnnnnnnnnnnnnnnnnnnnnnnnnnnnnnnnnnnnnnnnnnnnnnnnnnnnnnnnnnnnnnnnnnnnnnnnnnnnnnnnnnnnnnacattatgcagtacgtgataccattgcactgtgtacagcagaatccattgataccctccgagcagcaattgaatgtgaacagcctcaacctgacctctataagnnnnnnnnnnnnnnnnnnnnnnnnnnnnnnnnnnnnnnnnnnnnnnnnnnnnnnnnnnnnnnnnnnnnnnnnnnnnnnnnnnnnnnnnnnnnnnnnnnnnnnnnnnnnnnnnnnnnnnnnnnnnnnnnnnnnnnnnnnnnnnnnnnnnnnnnnnnnnnnnnnnnnnnnnnnnnnnnnnnnnnnnnnnnnnnnnnnnnnnnnnnnnnnnnnnnnnnnnnnnnnnnnnnnnnnnnnnnnnnnnnnnnnnnnnnnnnnnnnnnnnnnnnnnnnnnnnnnnnnnnnnnnnnnnnnnnnnnnnnnnnnnnnnnnnnnnnnnnnnnnnnnnnnnnnnnnnnnnnnnnnnnnnnnnnnnnnnnnnnnnnnnnnnnnnnnnnnnnnnnnnnnnnnnnnnnnnnnnnnnnnnnnnnnnnnnnnnnnnnnnnnnnnnnnnnnnnnnnnnnnnnnnnnnnnnnnnnnnnnnnnnnnnnnnnnnnnnnnnnnnnnnnnnnnnnnggtggattatgtatttacagataagactggaacactcactgaaaacagcatggaattcattgaatgctgcatagatgggcataaatataaaggtgtaactcaagaggttgatggattatctcaaactgatggacctttaacatattttgacaaagcagataag

SEQ ID NO: 28322 - DNA, 678 bp, Macaca Mulatta
  misc_feature (1)...(678): n = A,T,C or G
cagtagggcgctgtgccatttgggaacaaaggaatagtctgcctggaatccctgcannnnnnnnnnnnnnnnnnnnnnnnnnnnnnnnnnnnnnnnnnnnnnnnnnnnnnnnnnnnnnnnnnnnngctgcctcagagccggccagcagtagctgcagactccgcccgcgacgtgttcgcgcttctctgggccagagcgagcctgttctgtgctccggttaagagatttgtcccggctataccatgggccgcactcgggaagctggctgcgtggccgctggtgtggttatcggggctggtgcctgctactgtgtatacagactggcctggggaagagacgagaacgagaaaatctgggatgaagacgaggagtctacggacacctcagagactggggttgagactgtgaaaggagctaaaactaacgttggggcagggtctggggccaaacttcagggtgattcaaaggtcaagcctgaggtgagtttgggactcgaggattgtccaggtgtaaaagagaaggcccattcaggatcccacagtggaggtggcctagaggccaaggccaaggcccttttcaacacgctgaaggaacaggcaagtgcaaaggcaggcaaaggggctagggtgggtaccatcctctgggaacaggacgcttgcaccgagtttaccctgccca

SEQ ID NO: 28323 - DNA, 4482 bp, Macaca Mulatta
  misc_feature (1)...(4482): n = A,T,C or G
ccagggacctggaagatctcagcccgattctcagatggcctggaatccaatagcagcacccagtttgaggtgaagaaatatgngtccttcccaactttgaggtgaagatcacccctggaaagccctacatcctgacggtgccaggccatcttgatgaaatccagttagacatccaggccaggtancaggtacatctatgggaagccagtgcagggggtggcatatgtgcgctttgggctcctagatgaggatagtaagaagactttccttcgggggctggagagtcagaccaagnagctggtgaatggacagagccacatttccctctcaaaggcagagttccaggatgccctggggaagctgaatatgggcatgactgacctcctggggctgcgcctctacgttgctgcagccatcattgagtctccaggtgggnnnnnnnnnnnnnnnnnnnnnnnnnnnnnnnnnnnnnnnnnnnnnnnnnnnnnnnnnnnnnnnnnnnnnnnnnnnnnnnnnnnnnnnnnnnnnnnnnnnnnnnnnnnnnnnnnnnnnnnnnnnnnnnnnnnnnnnnnnnnnnnnnnnnnnnnnnnnnnnnnnnnnnnnnnnnnnnnnnnnnnnnnnnnnnnnnnnnnnnnnnnnnnnnnnnnnnnnnnnnnnnnnnnnnnnnnnnnnnnnnnnnnnnnnnnnnnnnnnnnnnnnnnnnnnnnnnnnnnnnnnnnnnnnnnngtatctgcaggctccccctatccagccatagccaggctcactgtggcagccccaccttcaggaggccccgggtttctgtctattgagcggccggattctcgacctcctcgtgttggggacactctgaacctgaacttgcgagccgtgggcagaggggccaccttttctcattactactacatgatcctatcccgagggcagatcgtgttcatgaatcgagagcccaagaggaccgtgacctcggtctccgtgtttgtggaccatcacctggcaccctccttctactttgtggccttctactaccatggagaccgcccagtggccaactccctgcgagtggatgtccaggctggggcctgcgagggcaannnnnnnnnnnnnnnnnnnnnnnnnnnnnnnnnnnnnnnnnnnnnnnnnnnnnnnnnnnnnnnnnnnnnnnnnnnnnnnnnnnnnnnnnnnnnnnnnnnnnnnnnnnnnnnnnnnnnnnnnnnnnnnnnnnnnnnnnnnnnnnnnnnnnnnnnnnnnnnnnnnnnnnnnnnnnnnnnnnnnnnnnnnnnnnnnnnnnnnnnnnnnnnnnnnnnnnnnnnnnnnnnnnnnnnnnnnnnnnnnnnnnnnnnnnnnnnnnnnnnnnnnnnnnnnnnnnnnnnnnnnnnnnnnnnnnnnnnnnnnnnnnnnnnnnnnnnnnnnnnnnnnnnnnnnnnnnnnnnnnnnnnnnnnnnnnnnnnnnnnnnnnnnnnnnnnnnnnnnnnnnnnnnagcgctgctgccaggatggggtgacacgtctgcccatgagacgttcctgcgagcagcgggcagcccgagtgcagcagccggactgccgggagcccttcctgtcctgctgccaatttgctgagagtctgcgcaagaagaacaggaccaggggccaggtgggcctccaacgagnagccctggagatcctgcaggaggatgacctgattgatgaggatgacattcccgtgcgcagcttcttcccagagaactggctctggagagtggaaacagtggaccgctttcaaatnattgacactgtggctccccgactctctgaccacatgggagatccacggcctgagcctgtccaaaaccaaaggnnnnnnnnnnnnnnnnnnnnnnnnnnnnnnnnnnnnnnnnnnnnnnnnnnnnnnnnnnnnnnnnnnnnnnnnnnnnnnnnnnnnnnnnnnnnnnnnnnnnnnnnnnnnnnnnnnnnnnnnnnnnnnnnnnnnnnnnnnnnnnnnnnnnnnnnnnnnnnnnnnnnnnnnnnnnnnnnnnnnnnnnnnnnnnnnnnnnnnnnnnnnnnnnnnnnnnnnnnnnnnnnnnnnnnnnnnnnnnnnnnnnnnnnnnnnnnnnnnnnnnnnnnnnnnnnnnnnnnnnnnnnnnnnnnnnnnnnnnnnnnnnnnnnnnnnnnnnnnnnnnnnnnnnnnnnnnnnnnnnnnnnnnngaaggaaggggccatccatacagaggagctggtctatgaactcaaccccnnnnnnnnnnnnnnnnnnnnnnnnnnnnnnnnnnnnnnnnnnnnnnnnnnnnnnnnnnnnnnnnnnnnnnnnnnnnnnnnnnnnnnnnnnnnnagcctcagatccattggacactttgggctctgagggggccttgtccccaggaggcgtggcctccctcttgaggcttcctcaaggctgtggggagcaaaccatgatctacttggctccgacactggctgcttcccgctacctggacaagacagagcagtggagcgcactgccccccgagaccaaggaccacactgtggatctgatccagaaagnnnnnnnnnnnnnnnnnnnnnnnnnnnnnnnnnnnnnnnnnnnnnnnnnnnnnnnnnnnnnnnnnnnnnnnnnnnnnnnnnnnnnnnnnnnnnnnnnnnnnnnnnnnnnnnnnnnnnnnnnnnnnnnnnnnnnnnnnnnnnnnnnnnnnnnnnnnnnnnnnnnnnnnnnnnnnnnnnnnnnnnnnnnnnnnnnnnnnnnnnnnnnnnnnnnnnnnnnnnnnnnnnnnnnnnnnnnnnnnnnnnnnnnnnnnnnnnnnnnnnnnnnnnnnnnnnnnnnnnnnnnnnnnnnnnnnnnnnnnnnnnnnnnnnnnnnnnnnnnnnnnnnnnnnnnnnnnnnnnnnnnnnnnnnnnnnnnnnnnnnnnnnnnnnnnnnnnnnnnnnnnnnnnnnnnnnnnnnnnnnnnnnnnnnnnnnnnnnnnnnnnnnnnnnnnnggcctatgccctgacactgaccctttcttccggggacctgcggggtgttgcccacaacaacctcttggcaatggcccaggagactggagnagataacctgtactggggctcagtcactagttctcagagcaatgccgtgtcgcccacgccagcccctcgcaacccagccgaccccatgccccaggctccagccctgtggattgaaaccacagcctacgccctgctgcacctcctgcttcacgagggcaaagcggagatggcagaccagactgcagcctggctcacccgtcagggcagcttccaagggggattccgcagtacccaagngacacggtgattgccctggatgccctgtctgcctactggattgcctcccacaccaccgaggagaggagactcaatgtgactctcagctccacaggccgcagtgggttcaggtcccatgcgctacagctgaacaaccgccagattcgcggcctggaggaggagctgcannnnnnnnnnnnnnnnnnnnnnnnnnnnnnnnnnnnnnnnnnnnnnnnnnnnnnnnnnnaggtccttcgtatctacaatgtcctggacatgaagaacaggacctgccaggacctgcagatagaagtgacnnnnnnnnnnnnnnnnnnnnnnnnnnnnnnnnnnnnnnnnnnnnnnnnnnnnnnnnnnnnnnnnnnnnnnnnnnnnnnnnnnnnnnnnnnnnnnnnnnnnnnnnnnnnnnnnnnnnnnnnnnnnnnnnnnnnnnnnnnnnnnnnnnnnnnnnnnnnnnnnnnnnnnnnnnnnnnnnnnnnnnnnnnnnnnnnnnnnnnnnnnnnnnnnnnnnnnnnnnnnnnnnnnnnnnnnnnnnnnnnnnnnnnnnnnnnnnnnnnnnnnnnnnnnnnnnnnnnnnnnnnnnnnnnnnnnnnnnnnnnnnnnnnnnnnnnnnnnnnnnnnnnnnnnnnnnnnnnnnnnnnnnnnnnnnnnnnnnnnnnnnnnnnnnnnnnnnnnnnnnnnnnnnnnnnnnnnnnnnnnnnnnnnnnnnnnnnnnnnnnnnnnnnnnnnnnnnnnnnnnnnnnnnnnnnnnnnnnnnnnnnnnnnnnnnnnnnnnnnnnnnnnnnnnnnnnnnnnnnnnnnnnnnnnnnnnnnnnnnnnnnnnnnnnnnnnnnnnnnnnnnnnnnnnnnnnnnnnnnnnnnnnnnnnnnnnnnnnnnnnnnnnnnnnnnnnnnnnnnnnnnnnnnnnnnnnnnnnnnnnnnnnnnnnnnnnnnnnnnnnnnnnnnnnnnnnnnnnnnnnnnnnnnnnnnnnnnnnnnnnnnnnnnnnnnnnnnnnnnnnnnnnnnnnnnnnnnnnnnnnnnnnnnnnnnnnnnnnnnnnnnnnnnnnnnnnnncaaggatgtcaaggccactgttaatcagacgcgcaacttcctggttcgagcgtcttgccgccttcgcttggaacctgggagagaatatttgatcatgggtctggatggggccacctatgacctcgagggaca

SEQ ID NO: 28324 - DNA, 621 bp, Macaca Mulatta
  misc_feature (1)...(621): n = A,T,C or G
gggcacccccgacataaaggacgtagttggccacaggccacaccacctgcctgattgctaagggtgcccagcacgtggccccagaccaatctgagtgacttagtgttggcaaggtccggggacctatgcagacaccttcttctgggcttgcccggcacgctctctgaaagcccagggcagctttcaaatcgtgttcctccccaggggcagggaacctgtgcggcagttgccccgggtattttgggcaaactagttgattggtttagggatctctgggaatgtcaatttcctgaagaccaagcactttgtgaattctggtttattttgtaaacagcattattataatgtaagtaatggtcaatgaaccgtggggttccctcacgtatattatgaaaacgaacgagccacttcccccctaaaaatggttcaaaacccctaaggccccttacctgtctgaggaaaaaacccctttaaaatgttaaaaacgttttaccccatccccgggaattttgaccccccttttacccaaaagtttttttaaaccacccccccccttttatgcgtnnnnnnnnnnnnnnnnnnncnnnnnnnnnnnnnggcatttttaaacccccccttaaa

SEQ ID NO: 28325 - DNA, 539 bp, Macaca Mulatta
caggataatcaaataaaaatactagtacgtgatcagcattgaatggttgttaggcagtcatgtgctcaacactgatttcacctctttctgtaagtataccgagtataaacttattaagtaagtttaaatagatgtacatggaagtggattaaaagactttacaaaagaaaaggtttgaaaaacctcagtgccctttaatacatgtacatttctttcctttcttcatttaatgtaacatatgtctgttgtaactatgtttcttaaatattattttaaggttatgtgttctttaattatggtcaaatacaatttggtcaccaaaaatgaaatacatagtataacaacaagtagctgtaactaagtgtgctaaaaatactcattttgtaattaattttagttttcttagtatattataaaattgtgccctggtcaggtacaaatggaacacatcaaaatgcccatatcgtatctatcctgtagtcatttaatgtgaatgatatgtgaacatctgttgcataattttactaaccagaattctg

SEQ ID NO: 28326 - DNA, 964 bp, Macaca Mulatta
  misc_feature (1)...(964): n = A,T,C or G
agggactcttccgagtagccccctctgcctccaagctgaagaagctgaaagcggccctggactgctgcgtggtggacgtgcaggagtactcggcagaccctcacgcaattgcagnnnnnnnnnnnnnnnnnnnnnnnnnnnnnnnnnnnnnnnnnnnnnnnnnnnnnnnnnnnnnnnnnnnnnnnnnnnnnnnnnnnnnnnnnnnnnnnnnnnnnnnnnnnnnnnnnnnnnnnnnnnnnnnnnnnnnnnnnnnnnnnnnnnnnnnnnnnnnnnnnnnnnnnnnnnnnnnnnnnnnnnnnnnnnnnnnnnnnnnnnnnnnnnnnnnnnnnnnnnnnnnnnnnnnnnnnnnnnnnnnnnnnnnnnnnnnnnnnnnnnnnnnnnnnnnnnnnnnnnnnnnnnnnnnnnnnnnnnnnnnnnnnnnnnnnnnnnnnnnnnnnnnnnnnnnnnnnnnnnnnnnnnnnnnnnnnnnnnnnnnnnnnnnnnatagagttcaacattactggcaattatgggagtccagtccacgtgaaccataatgccaactacagctcaatgccctccccagacatggaccctgctgaccggcgccagcccgagcaggcccgccggcccctcagcgtcgccacagataatatgatgctggagttttacaaaaaggatggnnnnnnnnnnnnnnnnnnnnnnnnnnnnnnnnnnnnnnnnnnnnnnnnnnnnnnnnnnnnnnnnnnnnnnnnnnnnnnnnnnnnnnnnnnnnnnnnnnnnnnnnnnnnnnnnnnnnnnnnnnnnnnnnnnnnnnnnnnnnnnnnnnnnnnnnnnnnnnnnnnnnnnnnnnnnnnnnnnnnnnnnnnnnnnnnnnnnnnnnnnnnnnnnnnnnnnnnnnnnnnnnnnnnnnnnnnnnnnnnnnnagcacaacaaaaagcaaggaactttctccagggtctgcacagaaaggaagtccaggctc

SEQ ID NO: 28327 - DNA, 502 bp, Macaca Mulatta
ctctggcccagctctggtcctgggggctcggggtaccccccgggaccgtggctggcgtctccccaacaacaagctgggttccggggatgacatctctgtcttcgtcatccccctgggagggccaggcagttactcctgaggggctgaacatcatccctcccaccaccatcccagcctctccatacttactcttctcacagcccaaattctgaagttgtctccctgacccttctttagtggcagcttaactgaagaagggatgcctgctatatccaaaattatagctattggcaaataaaccagatggataaaggtgtgtgtctttatttgctttgactagaaactgaaagataagaagaaagctctgtggggtggtggaaagagcaccagaacagttctagaaatgtggtattccccaggttctttattccgcccgccactctttccactccacgcatttgctgtgagtgtcactggccacttctgtggcttcacccatctg

SEQ ID NO: 28328 - DNA, 72 bp, Macaca Mulatta
agctgtaggtaaaacttgcctactgatcagttacacaaccaatgcatttcctggagaatatatccctactgt

SEQ ID NO: 28329 - DNA, 260 bp, Macaca Mulatta
gcactggtgaggtggattgatgacgaatcttctggcacacctggagcaactccagaacacagtcgtgagggtaatgggaatttaccgaaacccgtggaagcctttaaggaatggaaagagtggataataaaatgcctggctgttctccaaaaataaggaccttcaattaggagtgattgaaataaatgactacttgcatgttatgctttcatttgggtggaatacttcatcagaataaactactgatcttgtgctgtgtc

SEQ ID NO: 28330 - DNA, 496 bp, Macaca Mulatta
tccttataggaactcatggagccagaagctgggaccaacaggaccgctgttgctgagttcattctgctgggcctggtgcaaacagaaaagatgcagtctgtggtctttgtgctcttcctctttgcctatctggtcacagttgggggcaacctcagcatcctggcttttgtcttggtggagcccaaactccacacccccatgtacttcttcctggggaacctatcagggttggatgtcggatgtatcactgtcactgtgcctgcaatgttgggtcgtctcttgtcccacaagtgcacaatttcctatgatgcctgcctctcccagctcttcttcttccaccttctggctgggatggactgcttcctgctgaccgccatggcctatgaccgattcctggccatctgccggcccctcacctacagcacccgcatgagtcagacagtccagaggatgttggtggctgcgtcctgggcttgtgctttcaccaacgcactga

SEQ ID NO: 28331 - DNA, 209 bp, Macaca Mulatta
  misc_feature (1)...(209): n = A,T,C or G
tggcncaggtgaagtgctgcggctgggccagcttctacaactggacggacaacactgagctcatgagtcgctctgaggtcacctacccctgttcctgcgaaaaaggggaagaggacaacagcctttccatgaggaagggcttctgcgagactgcgggcaacaggacccggagtggcaacaaacctgaggactggcctgtgtaccaggag

SEQ ID NO: 28332 - DNA, 765 bp, Macaca Mulatta
gactcgagtttttactgtgtgagcatccccgtgccggcacagcgaaggactctcactgggttctacatgtgctgcacagatccctggcacagcgttaactgaacctcaactgcaggagcttcattcccgaggatgctgttaccaagagtaacttgcctcttgaagaatgagtttgcaaagctggcagttagattgctgatgtccaaagtaagtatgtgtagcatcgctaaagagaaaattcaggattcctggaaaacagttacgggctctctgcagtgttatttttgtaataaaaaacatgtagcatatgtgaaatacctactgagtgatgcaggacacatagaaggctctaaattaatgtgaattattctcgtttttctgactgtcattaaaagtccccatttgtagtatgtatgagtggtatatcaatatctaaactacagttcaccgtaggtcccaaccaacattagtttattgacaaatgtttaagagcaaccagaaattcatagaatacctatgattcttaaatcatgaacactcccataactggtatatgtttaggacatgaaaatttccaggctgacaaattatttcactgtcgttgttcaacactccaggatgatattctgagctgtgtgtcaatttcaataccacctagaacaataaaaggcagacatgctaccatcctctattctcattgccccactggattctggtacatctaaaaattatacttaaatgatatccaagaaatgctgtataaaa

SEQ ID NO: 28333 - DNA, 889 bp, Macaca Mulatta
tttctgtccgctgagatctcagagcctgcccaacagcagggaagccaagcacccattcatcgccctgcccccatctgactgtggagctgagaggggagcagtgccgtgtaccacacagatgttcctgtctccttgcatgggcataggaacccatcactgatgactgatgaaaccatgtaataaagcatctctggggagggcttaggactcttcctcagtcttcttcctggggcttgaaccccgcctctgatggttctccctgatacacacttctgcttttccttccaaattaggctgctccctccagttagcaagtcacagagcctgtgaacaggtaggtgaagggaggggtacttagaaaaggctcaaggggcaggtggaaaatggagtctgaatcacacaagcttgcagagcaagggccaggatcctcctttacaaatatgttcctgcttgaaatcattgaggtaggactggcttagagccagaacagttttaaaagcctcttagcacttctgatccctacaaaggactctgtggaaagggagaggctgtatttaatccagaagagcccctagcttctatccctagcacaggttggggacttattaacagcagtttctctcgttacagccacccctacatggggagaccaactgcataccatcttgctgctgtacctccgaagggcggagatagccagcagggcagaggagaggaggaaaatcttgaagtccctttgtggagctcccactgttgccctaatagccagttcctttcgcaggggaggctgatgttcaggctgtttatttaactgctgcctttcatctgcaatctacaaaccctctactttaataacagcttctgttcgtttagtgcctctctcctagga

SEQ ID NO: 28334 - DNA, 346 bp, Macaca Mulatta
agttacccagtggacaaccaaagaggatctggtttggctggacccaaaagatccagtgtggtcagcccaagccatccaccaccagctcctcctctaggctctccagcaggtcctaaacctgggtttgctccaccacctgcccctccgccacctccgcctccaatgataggcatcccatctccaccaccacctgtaggatttgggtctccagggacgcctccaccaccctcacccccatctttcccacctcaccctgattttgctgcccctccacctcctcctccaccaccggcaactgactacccaactctgccaccacctccctgtctcagccaacaggaggagc

SEQ ID NO: 28335 - DNA, 209 bp, Macaca Mulatta
  misc_feature (1)...(209): n = A,T,C or G
tggcaccctgaacacttcttctgtgcccagtgtggagccttcttcggtcctgaaggnagggttccacgagaaggacggcaaggcctactgccgcaaggactacttcgacatgttcgcaccaaagtgtggcggctgcgcccgggccatcctggagaactatatctcggccctcaacacgctgtggcatcctgagtgctttgtgtgccggg

SEQ ID NO: 28336 - DNA, 661 bp, Macaca Mulatta
  misc_feature (1)...(661): n = A,T,C or G
tataagaatatcagtttacctttggtctagtgattttatctaaattttccctggaattattaagtaatattgatttgtctgattctagagtagtagagtctttaccattataaactgtaaatctctctttgcttggcaattttcatctaatttaaaaggaaaaaaatataaaagataaattccacagagaattattcagtattatattaaaattgtattaaaatgttaatgactttttattttaaattgtactaaaattaaaagtctgcctgaaagtcagatattatgacaaaatttgacattaattgttttttaaagtatagatttcatttgaaattatacaatgctaatgtggttagaggacaccaaagttactgggtcatcagccattaagtatatttatttcaaaataaaaatacnnnnnnnnnnnnnnnnnnnnnnnnnnnnnnnnnnnnnnnnnnnnnnnnnnnnnnnnnnnnnnnnnnnnnnnnnnnnnnnnnnnnnnnnnnnnnnnnnnnnnnnnnnnnnnnnnnnnnnnnnnnnnnnnnnnnnnnnnnnnnnnnnnnnnnnnnnnnnnnnnnnnnnnnnnnnnnnnnnnnnnnnnnnnnnnnnnnnnnnnnnnnnnnnnnnnnnnnnnnnnnnnnnnnnnnnnnnnnnnnnn

SEQ ID NO: 28337 - DNA, 616 bp, Macaca Mulatta
  misc_feature (1)...(616): n = A,T,C or G
cacactgagctgtcccctgaggcggctacgacgtgctgagcatcgccgacatgtacctactgccaggcctgaagaggctgtgtggccgtaggctggcccaggtgctagacgaggacagtgtggtgggtgtgtggcgcgtggccaagctcttccgcttggcgcggcttgaggaccagtgcactgagtacatggccaaggtcattgaaaagctggtggagcgggaagacttcgtggaggcggtgaaagaggaggcagcggctgtggcggctcggcaggagacggactccatcccactggtggacgacatccgcttccacgtggccagcacggtgcagacctacagcgccatagaggaggcgcagcagcggctgcgggcactcgaggacctgctcgtgtccattggcctggactgttgagtccctggctgggcagccccaggggccaggagctcccttggagacaagcannnnnnnnnnnnnnnnnncagctcttcttcctgctccctgcacattgagggcttcatggtgggtgcagggggctcagtggggcttctcttccctccatgagcctggagaccccaggggaagatgcatttgggatgagcccctctccccaa

SEQ ID NO: 28338 - DNA, 647 bp, Macaca Mulatta
  misc_feature (1)...(647): n = A,T,C or G
ggggaagactgaattaagtggaaattgtactttattttatatatataatgttatgtaaaactttgcttagatggtctggnnnnnnnnnnnnnnnnnnnnnntcatgaaaacaaatgactgctcctttttatttaatttgggaggcagggggaatcagaaggcccgttacaatgaactatattgcaggagtcaatgaactgatttaggtgaatttttagttataggctacattgcataaaagctttgtcagctcccaacatcaggggagtcatttaatatagccttttccttatttgctagtatggttaaatgagagaatagtaaaatagatacaaagtcatctatgtaatgtgagaatgtggatgactttggcaaaatttataatttaaaaagctccaataactggtttttttcaagagatttattctcatgctcttggctatactgtgaattactgaaatgttgaacaaacctgtgaaagacatacattcgctctttaagatggccaggagctaaacttgagtctccttaactgattgagtttgcacaacgttctcagtgcaggttacttgtagattctagtcttcacaggctccctggggctcttaactgtagtcacgctgggagtcatgaatgtctttcaatan

SEQ ID NO: 28339 - DNA, 798 bp, Macaca Mulatta
ctaaagatatcctctctatgaaagaagacatccagtccttaaagaagaaggtgacagaactggaaaagcagaacttctactccaggatacattgtctagagattccggagggagaaaggggtgaagaaatcacagaactgctttacaaactcatacaaccagcaactctgaagaacacattggcctctacagacagggaaatgtcttcagcagaaccagagaaagtgcccagttatccaaagtccactgaccatcttgagaaaataacaatttctccccaaattaaaactctgaagaaacgtaaccatcaaaatgcatcaaggaactttaaaacagcaaagccaaatatttacatttacccagacttcagtacatggatcaagctaacttttgttcatggaggaaaatggacatttttcctcagtgctaccaagttagaagaattcatccagtggcttctttctaggccaaccattctccctgaagaaccccaggtcataacccagagatattgtccattcactgggcttattttgagcttgaccacaatctgtctctccatgttcaacaatatttatggctttattcgttccttaaaagaagaggtaactcgactatagagttatgttctgttttgcttggtacaaaataaatgtaacctggaggctccaagcatttacacattggtgtggtggctttgaattcttcggtagtttgctcactctgggcccactatctgcagaatttctctgtctacagtaagttaaggcacatgatctaattgaactgttgtaattt

SEQ ID NO: 28340 - DNA, 786 bp, Macaca Mulatta
ggatttcagaaaaggcatatggaaggagcatttttctttgctgttctcctacatttcaagcacatctacctctatgtagcaccagcttatggtgtatatctgctgcgatcctactgtttcactgcaaataaaccagatgggtctattcgatggaacagcttcagctttgttcgtgttatttccctgggactggttgttttcctagtttctgctctttcattgggtcctttcctagccttgaatcagctgcctcaagtcttttcccggctctttcctttcaagaggggcctctgtcatgcatactgggctccaaacttctgggctttgtacaatgctttggacaaagtgctgtctgtcatcggtttgaaattgaaatttcttgatcccaacaatattcccaaggcctcaatgacaagtggtttggttcagcagtttcaacacacagtccttccctcagtgactcccttgacaaccctcatctgcacactgattgccatattgccctctattttctgtctttggtttaaaccccaagggcccagaggctttctccgatgtctaactctttgtgccttgagctccctttatgttttggttggcatgttcatgaaaaaaccatacttctaccaattctcccaatgagcccttttgtctgtgcaaaaaccaggaaatgctttcaatttttctgaatctgaccccaacaggacattattccctcctttcctctgcttttcccggccccagaactttcccatttaaaatcctaactcatggttactaattcac

SEQ ID NO: 28341 - DNA, 105 bp, Macaca Mulatta
gtactgtgcagccctggaatccctgatcaacgtgtcaggctgcagtgccatcgagaagacccagaggatgctgaacggattctgcccgcacaaggtctcagctgg

SEQ ID NO: 28342 - DNA, 372 bp, Macaca Mulatta
  misc_feature (1)...(372): n = A,T,C or G
ggccgcagcagtcagcgatggttctgaagtgagcatcctggaagcctgcgtacttcccaggctggatgtgaagctacattactgtgtgagttgtgccactcgcagcacggtagtcaggaatcgagcttatgaagcccacaaggaccgaacacctccatgccagtgtagacctgcaggtgctgccccgtgcccccaccaaagcccatataaggagcggagttgttaaggactgaagaaaaactattctctggnnnnnnnnnnnnnngcnnnnnnnnnnnnnnnnnnnnnnnnnnnnnnnnnnnnnnnnnnnnnnnnnnnnnnnnnnnnnnnnnnnnnnnnnnnnnnnnnnnnnnnnnnnnnnnnnnnnntgtc

SEQ ID NO: 28343 - DNA, 1619 bp, Macaca Mulatta
  misc_feature (1)...(1619): n = A,T,C or G
gcggcgctgcgggacgaaggtgaggaggaggcggaggtggagctggcggagagcgggaggcggctgcggctgccgcgggaccagattcagcgcatgaacccgcccaagttcagcagggccgaggacatggccgagctgacctgccctcacgaggcctctgtcctgnnnnnnnnnnnnnnnnnnnnnnnnnnnnnnnnnnnnnnnnnnnnnnnnnnnnnnnnnnnnnnnnnnnnnnnnnnnnnnnnnnnnnnnnnnnnnnnnnnnnnnnnnnnnnnnnnnnnnnnnnnnnnnnnnnnnnnnnnnnnnnnnnnnnnnnnnnnnnnnnnnnnnnnnnnnnnnnnnnnnnnnnnnnnnnnnnnnnnnnnnnnnnnnnnnnnnnnnnnnnnnnnnnnnnnnnnnnnnnnnnnnnnnnnnnnnnnnnnnnnnnnnnnnnnnnnnnnnnnnnnnnnnnnnnnnnnnnnnnnnnnnnnnnnnnnnnnnnnnnnnnnnnnnnnnnnnnnnnnnnnnnnnnnnnnnnnnnnnnnnnnnnnnnnnnnnnnnnnnnnnnnnnnnnnnnnnnnnnnnnnnnnnnnnnnnnnnnnnnnnnnnnnnnnnnnnnnnnnnnnnnnnnnnnnnnnnnnnnnnnnnnnnnnnnnnnnnnnnnnnnnnnacctgctggagaagtcgcgggccatccgccaggccaaggacgagtgcagcttccacattttctaccagctgctggggggcgctggagagcagctcaaagnnnnnnnnnnnnnnnnnnnnnnnnnnnnnnnnnnnnnnnnnnnnnnnnnnnnnnnnnnnnnnnnnnnnnnnnnnnnnnnnnnnnnnnnnnnnnnnnnnnnnnnnnnnnnnnnnnnnnnnnnnnnnnnnnnnnnnnnnnnnnnnnnnnnnnnnnnnnnnnnnnnnnnnnnnnnnnnnnnnnnnnnnnnnnnnnnnnnnnnnnnnnnnnnnnnnnnnnnnnnnnnnnnnnnnnnnncagctgcacagaagctctgccgcctcttgggactgggggtgacggatttctcccgagccttgctcacgcctcgcatcaaagttggccgagactacgtgcagaaagcccagacgaaggaacaggnacaggctgacttcgcgctggaggccctggccaaggccacctatgagcgcctcttccgctggctggttctgcgcctcaaccgggccttggaccgcagcccccgccaaggcgcctccttcctgggcatcctggacatcgcgggctttgagtcttccagncagctgaactccttcgagcagctctgcatcaactacaccaacgagaagctgcagcagctcttcaaccacaccatgttcgtgctggagcaggaggagtaccagcgtgaggggatcccctggaccttcctcgactttggcctcgacctgcagccctgcatcgacctcatcgagcggccggnggccaacccccctgggctcctggccctgctggacgaggagtgctggttcccgaaggccacagacaagtcgtttgtggagaaggtagcccaggagcagggcggccaccccaagttccagcggccgaggcaactgcgggatcaggccgacttcagtgttctgcactacgcgggcaaggt

SEQ ID NO: 28344 - DNA, 1735 bp, Macaca Mulatta
  misc_feature (1)...(1735): n = A,T,C or G
tggccgctactacggcggcggcagtgagggcggccgggcccctaagcggctcaagactgacaacgccggcgaccagcacggnnnnnnnnnnnnnnnnnnnnnnnnnnnnnnnnnnnnnnnnnnnnnnnnnnnnnggagaactacgatgacccgcacaaaacccctgcctccccagnnnnnnnnnnnnnnnnnnnnnnnnnnnnnnnnnnnnnnnnnnnnnnnnnnnnnnnnnnnnnnnnnnnnnnnnnnnncagctatgtggtggtaatgcctaaaaagagacaagcactggtggagtttgaagatgtgttgggggcttgcaacgcagtgaactacgcagccgacaaccaaatatacaatgccggtcacccagcttttgtcaactactctaccagccagaagatctcccgccccggggactcggatgactcccggagcgtgaacagtgtgcttctctttaccatcctgaaccccatttattcgatcaccacgnnnnnnnnnnnnnnnnnnnnnnnnnnnnnnnnnnnnnnnnnnnnnnnnnnnnnnnnnnnnnnnnnnnnnnnnnnnnnnnnnnnnnnnnnnnnnnnnnnnnnnnnnnnnnnnnnnnnnnnnnnnnnnnnnnnnnnnnnnnnnnnnnnnnnnnnnnnnnnnnnnnnnnnnnnnnnnnnnnnnnnnnnnnnnnnnnnnnnnatgtgttcaagaatgatcaggatacttgggactacacaaaccccaatctcagtggacaaggnnnnnnnnnnnnnnnnnnnnnnnnnnnnnnnnnnnnnnnnnnnnnnnnnnnnnnnnnnnnnnnnnnnnnnnnnnnnnnnnnnnnnnnnnnnnnnnnnnnnnnnnnnnnnnnnnnnnnnnnnnnnnnnnnnnnnnnnnnnnnnnnnnnnnnnnnnnnnnnnnnnnnnnnnnnnnnnnnnnnnnnnnnnnnnnnnnnnnnnnnnnnnnnnnnnnnnnnnnnnnnnnnnnnnnnnnnnnnnnnnnnnnnnnnnnnnnnnnnnnnnnnnnnnnnnnnnnnnnnnnnnnnnnnnnnnnnnnnnnnnnnnnnnnnnnnnnnnnnnnnnnnnnnnnnnnnnnnnnnnnnnnnnnnnnnnnnnnnnnnnnnnnnnnnnnnnnnnnnnnnnnnnnnnnnnnnnnnnnnnnnnnnnnnnnnnnnnnnnnnnnnnnnnnnnnnnnnnnnnnnnnnnnnnnnnnnnnnnnnnnnnnnnnnnnnnnnnnnnnnnnnnnnnnnnnnnnnnnnnnnnnnnnnnnnnnnnnnnnnnnnnnnnnnnnnnnnnnnnnnnnnnnnnnnnnnnnnnnnnnnnnnnnnnnnnnnnnnnnnnnnnnnnnnnnnnnnnnnnnnnnnnnnnnnnnnnnnnnnnnnnnnnnnnnnnnnnnnnnnnnnnnnnnnnnnnnnnnnnnnnnnnnnnnnnnnnnnnnnnnnnnnnnnnnnnnnnnnnnnnnnnnnnnnnnnnnnnnnnnnnnnnnnnnnnnnnnnnnnnnnnnnnnnnnnnnnnnnnnnnnnnnnnnnnnnnnnnnnnnnnnnnnnnnnnnnnnnnnnnnnnnnnnnnnnnnnnnnnnnnnnnnnnnnntggtccatacccttacactctgaagttgtgtttctccactgctcagcacgcctcctaattaggtgcctaggaagagtcccatctgagcaggaagacatttctctttcctttatgccattttttgtttttgttatttgcaaaagatcttgtattcc

SEQ ID NO: 28345 - DNA, 4562 bp, Macaca Mulatta
  misc_feature (1)...(4562): n = A,T,C or G
natggctcggcgcggctggcggcgggcacccctccgccgtggcgtcggcggcggtccccgagcccgcaggctcatgcggcccctttggttgctcctcgcagtgggcgtctttgactgggcaggggcttcggacggcggcggcggagaggcgagagccatggacgaggagatcgtgtccgagaagcaagccgaggagagccaccggcaggacagcgccaacctgctcatcttcatcctgctgctcaccctcactattctcacgatctggctcttcaagcaccgccgggcccgcttcctgcacgaaaccggcctggctatgatttatggcaagtgcctgaacccttgtnnnnnnnnnnnnnnnnnnnnnnnnnnnnnnnnnnnnnnnnnnnnnnnnnnnnnnnnnnnnnnnnnnnnnnnnnnnnnnnnnnnnnnnnnnnnnnnnnnnnnnnnnnnnnnnnnnnnnnnnnnnnnnnnnnnnnnnnnnnnnnnnnnnnnnnnnnnnnnnnnnnnnnnnnnnnnnnnnnnnnnnnnnnnnnnnnnnnnnnnnnnnnnnnnnnnnnnnnnnnnnnnnnnnnnnnnnnnnnnnnnnnnnnnnnnnnnnnnnnnnnnnnnnnnnnnnnnnnnnnnnnnnnnnnnnnnnnnnnnnnnnnnnnnnnnnnnnnnnnnnnnnnnnnnnnnnnnnnnnnnnnnnnnnnnnnnnnnnnnnnnnnnnnagtgactgttcttgctatattccacgagcttcaagttgatgttgaactctatgcacttctttttggtgaaagtgtcctcaatgatgctgttgccatagtgctgtcctnnnnnnnnnnnnnnnnnnnnnnnnnnnnnnnnnnnnnnnnnnnnnnnnnnnnnnnnnnnnnnnnnnnnnnnnnnnnnnnnnnnnnnnnnnnnnnnnnnnnnnnnnnnnnnnnnnnnnnnnnnnnnnnnnnnnnnnnnnnnnnnnnnnnnnnnnnnnnnnnnnnnnnnnnnnnnnnnnnnnnnnnnnnnnnnnnnnnnnnnnnnnnnnnnnnnnnnnnnnnnnnnnnnnnnnnnnnnnnnnnnnnnnnnnnnnnnnnnnnnnnnnnnnnnnnnnnnnnnnnnnnnnnnnnnnnnnnnnnnnnnnnnnnnnnnnnnnnnnnnnnnnnnnnnnnnnnnnnnnnnnnnnnnnnnnnnnnnnnnnnnnnnnnnnnnnnnnnnnnnnnnnnnnnnnnnnnnnnnnnnnnnnnnnnnnnnnnnnnnnnnnnnnnnnnnnnnnnnnnnnnnnnnnnnnnnnnnnnnnnnnnnnnnnnnnnnnnnnnnnnnnnnnnnnnnnnnnnnnnnnnnnnnnnnnnnnnnnnnnnnnnnnnnnnnnnnnnnnnnnnnnnnnnnnnnnnnnnnnnnnnnnnnnnnnnnnnnnnnnnnnnnnnnnnnnnnnnnnnnnnnnnnnnnnnnnnnnnnnnnnnnnnnnnnnnnnnnnnnnnnnnnnnnnnnnnnnnnnnnnnnnnnnnnnnnnnnnnnnnnnnnnnnnnnnnnnnnnnnnnnnnnnnnnngggttggtgttgattcagaccaagaacacttggnggtattcctgaaaatgaaaggagaactaccaaagcagagagtgcttggcttttccggatgtggtacaactttgatcataagtatcnnnnnnnnnnnnnnnnnnnnnnnnnnnnnnnnnnnnnnnnnnnnnnnnnnnnnnnnnnnnnnnnnnnnnnnnnnnnnnnnnnnnnnnnnnnnnnnnnnnnnnnnnnnnnnnnnnnnnnnnnnnnnnnnnnnnnnnnnnnnnnnnnnnnnnnnnnnnnnnnnnnnnnnnnnnnnnnnnnnnnnnnnnnnnnnnnnnnnnnnnnnnnnnnnnnnnnnnnnnnnnnnnnnnnnnnnnnnnnnnnnnnnnnnnnnnnnnnnnnnnnnnnnnnnnnnnnnnnnnnnnnnnnnnnnnnnnnnnnnnnnnnnnnnnnnnnnnnnnnnnnnnnnnnnnnnnnnnnnnnnnnnnnnnnnnnnnnnnnnnnnnnnnnnnnnnnnnnnnnnnnnnnnnnnnnnnnnnnnnnnnnnnnnnnnnnnnnnnnnnnnnnnnnnnnnnnnnnnnnnnnnnnnnnnnnnnnnnnnnnnnnnnnnnnnnnnnnnnnnnnnnnnnnnnnnnnnnnnnnnnnnnnnnnnnnnnnnnnnnnnnnnnnnnnnnnnnnnnnnnnnnnnnnnnnnnnnnnnnnnnnnnnnnnnnnnnnnnnnnnnnnnnnnnnnnnnnnnnnnnnnnnnnnnnnnnnnnnnnnnnnnnnnnnnnnnnnnnnnnnnnnnnnnnnnnnnnnnnnnnnnnnnnnnnnnnnnnnnnnnnnnnnnnnnnnnnnnnnnnnnnnnnnnnnnnnnnnnnnnnnnnnnnnnnnnnnnnnnnnnnnnnnnnnnnnnnnnnnnnnnnnnnnnnnnnnnnnnnnnnnnnnnnnnnnnnnnnnnnnnnnnnnnnnnnnnnnnnnnnnnnnnnnnnnnnnnnnnnnnnnnnnnnnnnnnnnnnnnnnnnnnnnnnnnnnnnnnnnnnnnnnnnnnnnnnnnnnnnnnnnnnnnnnnnnnnnnnnnnnnnnnnnnnnnnnnnnnnnnnnnnnnnnnnnnnnnnnnnnnnnnnnnnnnnnnnnnnnnnnnnnnnnnnnnnnnnnnnnnnnnnnnnnnnnnnnnnnnnnnnnnnnnnnnnnnnnnnnnnnnnnnnnnnnnnnnnnnnnnnnnnnnnnnnnnnnnnnnnnnnnnnnnnnnnnnnnnnnnnnnnnnnnnnnnnnnnnnnnnnnnnnnnnnnnnnnnnnnnnnnnnnnnnnnnnnnnnnnnnnnnnnnnnnnnnnnnnnnnnnnnnnnnnnnnnnnnnnnnnnnnnnnnnnnnnnnnnnnnnnnnnnnnnnnnnnnnnnnnnnnnnnnnnnnnnnnnnnnnnnnnnnnnnnnnnnnnnnnnnnnnnnnnnnnnnnnnnnnnnnnnnnnnnnnnnnnnnnnnnnnnnnnnnnnnnnnnnnnnnnnnnnnnnnnnnnnnnnnnnnnnnnnnnnnnnnnnnnnnnnnnnnnnnnnnnnnnnnnnnnnnnnnnnnnnnnnnnnnnnnnnnnnnnnnnnnnnnnnnnnnnnnnnnnnnnnnnnnnnnnnnnnnnnnnnnnnnnnnnnnnnnnnnnnnnnnnnnnnnnnnnnnnnnnnnnnnnnnnnnnnnnnnnnnnnnnnnnnnnnnnnnnnnnnnnnnnnnnnnnnnnnnnnnnnnnnnnnnnnnnnnnnnnnnnnnnnnnnnnnnnnnnnnnnnnnnnnnnnnnnnnnnnnnnnnnnnnnnnnnnnnnnnnnnnnnnnnnnnnnnnnnnnnnnnnnnnnnnnnnnnnnnnnnnnnnnnnnnnnnnnnnnnnnnnnnnnnnnnnnnnnnnnnnnnnnnnnnnnnnnnnnnnnnnnnnnnnnnnnnnnnnnnnnnnnnnnnnnnnnnnnnnnnnnnnnnnnnnnnnnnnnnnnnnnnnnnnnnnnnnnnnnnnnnnnnnnnnnnnnnnnnnnnnnnnnnnnnnnnnnnnnnnnnnnnnnnnnnnnnnnnnnnnnnnnnnnnnnnnnnnnnnnnnnnnnnnnnnnnnnnnnnnnnnnnnnnnnnnnnnnnnnnnnnnnnnnnnnnnnnnnnnnnnnnnnnnnnnnnnnnnnnnnnnnnnnnnnnnnnnnnnnnnnnnnnnnnnnnnnnnnnnnnnnnnnnnnnnnnnnnnnnnnnnnnnnnnnnnnnnnnnnnnnnnnnnnnnnnnnnnnnnnnnnnnnnnnnnnnnnnnnnnnnnnnnnnnnnnnnnnnnnnnnnnnnnnnnnnnnnnnnnnnnnnnnnnnnnnnnnnnnnnnnnnnnnnnnnnnnnnnnnnnnnnnnnnnnnnnnnnnnnnnnnnnnnnnnnnnnnnnnnnnnnnnnnnnnnnnnnnnnnnnnnnnnnnnnnnnnnnnnnnnnnnnnnnnnnnnnnnnnnnnnnnnnnnnnnnnnnnnnnnnnnnnnnnnnnnnnnnnnnnnnnnnnnnnnnnnnnnnnnnnnnnnnnnnnnnnnnnnnnnnnnnnnnnnnaacatcagcatctggaagattttcctctcctctaatctgtgtacacatctccaagaaaggaagaaaaaacaaactctgctcagacgcctatgaaacacctgaatgaactttgatgaagtccagtctgagttaccatcatgcacaagtagaactgctcttggacttgttttcctgttgtttgtggaacctacacgtttgaatgacttgaacgttgcatcttttaaagttattttttaagatttcttggcatttatcctagttgtccgtgtttggcaatgtgctgttaaagtaatagacttttaatctttatgtattttttgttttctctggagtacttggacagatgttatagtggtttcttttaggaaaatctgtcattaaaaaagttatagccttgcaaataaccactcacagtatttgagtcacagtttattctagtgagacgtaaagagtgctgacttcatttatttttctacctatatacctactggaaaaggggaagactaatgttttcaaataaacaaacagaaacctaacaga

SEQ ID NO: 28346 - DNA, 799 bp, Macaca Mulatta
aggcattcacttcacacgcagacttcagcctcccgttcgtgctggctcaggccttgagccagtttgtgtttctctggagggacagagcagaggggccggggactgagtgagtggcgaagcaggggtgggtgatgtgaagatgatctcgggtttgccaggggtgggctgaacgggagaagatggacaaaggatccggctctcaagaggccctggccgggactgcatgccggatacagagagcacccttggactttagggtcctgagctggcagcatggcagagagagctccatccacgtcacaggagcccagagagctcagcccctgggtaaaaagtgctcactgcagctcagatcagtcctcaggtcacactttggggagccagcgtcccttcttcccctccccagcccactcctccctctgcggacacacactccgggccctcagccagctggctgcacggggagcaacttggtgttgtgggagagaccggctctgggagaacgggtttcatcccagcctacgtcacatttgcccagtgccttacgttttctggttttttccctccagttctgtttctaaaaaccagctggagtttggctgaactgtcctttctcaacagaagcgcttttgcaattgatcccgggcaacaagtcaaaataagctttaagtggagatttattttcttcaaatgtaatgctttggaaattcgatctttagccagagggtttaccaagtgtcattaagcacatactatgctcagaggcaaccttgcagcctttacgaacctgttccgacct

SEQ ID NO: 28347 - DNA, 232 bp, Macaca Mulatta
  misc_feature (1)...(232): n = A,T,C or G
natggggccacgggcatccctgagccggctccgggagctctgcggccactggctacggccggctctgcacaccaagaagcagatcctggagctgctggtgctggagcagttcctgagtgtgctgcctccgcacctcctgggccgcctgcaggggcagccactcagggatggggaggaggtggtgctgctgctggagggcatccaccgggagcccagccacacggggccgctg

SEQ ID NO: 28348 - DNA, 607 bp, Macaca Mulatta
ttcaatacattaatgagatgcattcccgttagaccccacactgcattcctaacttgcctctggttagcctcattcttcaacattggtaatctaagtacccttggaagatcatcttaaagaaatgcatcccttccagaggggcaaatcgggatccactgcctgtatttagtgtccgctacatcattctatagttcctatacagatccagcttctcttctgcttttagaaagtttcccctcttccagttctctgatttcccccttccacaccatctcccaccactatgaagttaacaccattttcatttctctctcaggcccacctgctctttcgcagctctgccgcctgtgtgtccggaagtgtctcggtcgagcatgtcatcaagccatccacaagctacgtctgccggagccacttgaacgattcctcctataccaatagtcctaagtgtccctgggaagatacttggaatgacacagattgttgtctgctgtacctagagtacctagtgtggaagctcaacagctagactcttagtatcttcaaatgagctcagttgaagtaaatcccccatgagctagaacacttgaggagtggaaactcctgg

SEQ ID NO: 28349 - DNA, 2392 bp, Macaca Mulatta
  misc_feature (1)...(2392): n = A,T,C or G
taagaaactgaaagaattgaaccaacgcattggaagacagannnnnnnnnnnnnnnnnnnnnnnnnnnnnnnnnnnnnnnnnnnnnnnnnnnnnnnnnnnnnnnnnnnnnnnnnnnnnnnnnnnnnnnnnnnnnnnnnnnnnnnnnnnnnnnnnnnnnnnnnnnnnnnnnnnnnnnnnnnnnnnnnnnnnnnnnnnnnnnnnnnnnnnnnnnnnnnnnnnnnnnnnnnnnnnnnnnnnnnnnnnnnnnnnnnnnnnnnnnnnnnnnnnnnnnnnnnnnnnnnnnnnnnnnnnnnnnnnnnnnnnnnnnnnnnnnnnnnnnnnnnnnnnnnnnnnnnnnnnnnnnnnnnnnnnnnnnnnnnnnnnnnnnnnnnnnnnnnnnnnnnnnnnnnnnnnnnnnnnnnnnnnnnnnnnnnnnnnnnnnnnnnnnnnnnnnnnnnnnnnnnnnnnnnnnnnnnnnnnnnnnnnnnnnnnnnnnnnnnnnnnnnnnnnnnnnnnnnnnnnnnnnnnnnnnnnnnnnnnnnnnnnnnnnnnnnnnnnnnnnnnnnnnnnnnnnnnnnnnnnnnnnnnnnnnnnnnnnnnnnnnnnnnnnnnnnnnnnnnnnnnnnnnnnnnnnnnnnggttcctgagtcctttgagcacctgccacctctcccagaaccaccagcaccactacctgaattagtagacaaaacccgagacacacttcctccccagaagcctgagctcaaagtgaaacgggttttcagaccaaatggcattgccctgacttggaatataaccaaaatcaatcccaagtgcgctcctgtagaaagctaccacctcttcctgtgtcatgagaactctaataataaattgatttggaagaagattggagaaattaaagctttaccactccccatggcctgtactttatctcagtttttagcttccaacagatactattttactgtccagtcaaaagatatttttggacgatatggaccattctgtgacataaaatctgtccctgggttttctgaaaatcttacnnnnnnnnnnnnnnnnnnnnnnnnnnnnnnnnnnnnnnnnnnnnnnnnnnnnnnnnnnnnnnnnnnnnnnnnnnnnnnnnnnnnnnnnnnnnnnnnnnnnnnnnnnnnnnnnnnnnnnnnnnnnnnnnnnnnnnnnnnnnnnnnnnnnnnnnnnnnnnnnnnnnnnnnnnnnnnnnnnnnnnnnnnnnnnnnnnnnnnnnnnnnnnnnnnnnnnnnnnnnnnnnnnnnnnnnnnnnnnnnnnnnnnnnnnnnnnnnnnnnnnnnnnnnnnnnnnnnnnnnnnnnnnnnnnnnnnnnnnnnnnnnnnnnnnnnnnnnnnnnnnnnnnnnnnnnnnnnnnnnnnnnnnnnnnnnnnnnnnnnnnnnnnnnnnnnnnnnnnnnnnnnnnnnnnnnnnnnnnnnnnnnnnnnnnnnnnnnnnnnnnnnnnnnnnnnnnnnnnnnnnnnnnnnnnnnnnnnnnnnnnnnnnnnnnnnnnnnnnnnnnnnnnnnnnnnnnnnnnnnnnnnnnnnnnnnnnnnnnnnnnnnnnnnnnnnnnnnnnnnnnnnnnnnnnnnnnnnnnnnnnnnnnnnnnnnnnnnnnnnnnnnnnnnnnnnnnnnnnnnnnnnnnnnnnnnnnnnnnnnnnccaccacgcccagctaatttatttttagtggagatgaggtttcaccttgttggtcaggctggtctcaaactcctgacctcaggggatccacccacctcagcctcccgaagtgctgggattacaggcatgagccaccacacctggccaaaaactaaaagattttatgaaaagaaatggcttcccattctattcagcttctaagtgagctattcatttgtgnnnnnnnnnnnnnnnnnnnnnnnncactatgtcaatcatttggggaaaaagcctggaggtctttcctgaatctgttcgtagactaataaaatgtgtgctgtgtacacaaaaacataatagtatctctcatgaaagcattacccaacctgctgtttgagttgagaatggatttgtccatcttagatgtgaggctttagtttgctgatttcctaaatgctaccctttgatcatttcctggctgccatcccaatactaaggggctcagatgtgtcttgtgcccacctcttcctgagaagaagtggagctgtgactagtacaagcagcccaagaaactctgaacaggacccaatggaggcaaacttgagaaaataactgggatgataaaaaatcccaactgtttgaaagttcgaaagaggggcattctttcctggtacatggtgaaagttcaggctccagaggctcaaaacagggaacggttttccttggcattttgtaaataatctcacatctgcagtaataaag

SEQ ID NO: 28350 - DNA, 165 bp, Macaca Mulatta
  misc_feature (1)...(165): n = A,T,C or G
aggcagataaccatcgaggagggggagcagcgcgccaaagaactgagcgtcatgttcattgagaccagcgcgaagactggctacaatgtgaagcagncagctttttcgacgtgtggcgtcggctctacctggaatggagaatgtccaggagaaaagcaaagaagg

SEQ ID NO: 28351 - DNA, 697 bp, Macaca Mulatta
  misc_feature (1)...(697): n = A,T,C or G
gaagacgggcagaggtaagactatgcctgagctcagtcgtttatttcnttggtgtatgtgcttttgaatgtttgtgttcataaagtcaccattttctgtttcctgttcgggaatgtttttactaacatgagtggctgttcagagtattgcaataagatgagcggcttttaaatttgctttgaagtcgggtgttcaaggttttctttgggcagctcccgaggtagaaatggaagactctggacactatgtgaagaagatcaggaaagtctcctcttctttggtcttaggggatgttttgtttttagtgtttccatcctggcgaatgtctccatagccttcacttcttgtgtttgttgtacagagactcacgtttttctagatgtagagtttttatccacacggcaacagttcttaacaccgcacagtaaccactcactaaacatttcttgcataagttcatgtgatcagagactagaggtaagtcagtccgtgttgctacatgggattgtttgggtcaccaagtgtacaagcagtggtggtctgtggtcgcctgcacttaggccgggaggacagtgtgtgtcatgactgaagctctcctttgtctgtgtgtgtggcaggtctggcagacccgtctgcattaacacaagcggttgctgcctaccaaggctgtcacttcataggcatgcccgaatgtgag

SEQ ID NO: 28352 - DNA, 1572 bp, Macaca Mulatta
  misc_feature (1)...(1572): n = A,T,C or G
gatttccacttctcaaacctgctgtgatctcacaactggagggaggaggtgagctggggggcccatctccactggctgcaggaacaggcctctggggcctccggactgnnnnnnnnnnnnnnnnnnnnnnnnnnnnnnnnnnnnnnnnnnnnnnnnnnnnnnnnnnnnnnnnnnnnnnnnnnnnnnnnnnnnnnnnnnnnnnnnnnnnnnnnnnnnnnnnnnnnnnnnnnnnnnnnnnnnnnnnnnnnnnnnnnnnnnnnnnnnnnnnnnnnnnnnnnnnnnnnnnnnnnnnnnnnnnnnnnnnnnnnnnnnnnnnnnnnnnnnnnnnnnnnnnnnnnnnnnnnnnnnnnnnnnnnnnnnnnnnnnnnnnnnnnnnnnnnnnnnnnnnnnnnnnnnnnnnnnnnnnnnnnnnnnnnnnnnnnnnnnnnnnnnnnnnnnnnnnnnnnnnnnnnnnnnnnnnnnnnnnnnnnnnnnnnnnnnnnnnnnnnnnnnnnnnnnnnnnnnnnnnnnnnnnnnnnnnnnnnnnnnnnnnnnnnnnnnnnnnnnnnnnnnnnnnnnnnnnnnnnnnnnnnnnnnnnnnnnnnnnnnnnnnnnnnnnnnnnnnnnnnnnnnnnnnnnnnnnnnnnnnnnnnnnnnnnnnnnnnnnnnnnnnnnnnnnnnnnnnnnnnnnnnnnnnnnnnnnnnnnnnnnnnnnnnnnnnnnnnnnnnnnnnnnnnnnnnnnnnnnnnnnnnnnnnnnnnnnnnnnnnnnnnnnnnnnnnnnnnnnnnnnnnnnnnnnnnnnnnnnnnnnnnnnnnnnnnnnnnnnnnnnnnnnnnnnnnnnnnnnnnnntatcagtgcaatgactgtggaaatggcttcagctgtagttctgcatatattacacatcagagagtccacactggggagaaaccttacgagtgtaatgactgtgggaaagctttcaatgttaatgcaaaattaattcagcatcagagaatccacactggagagaagccttatgaatgtaatgaatgtggaaaaggcttcaggtgcagctcccagcttaggcagcatcagagcatccacacaggagaaaagccctatcagtgtaaagagtgtggaaaaggcttcaataataatacaaaactcattcagcatcagagaatccacacaggtgagaaaccctatgaatgcactgaatgtggaaaagccttcagtgtcaaagggaagttaatccaacaccagagaattcacacaggcgagaaaccctatgagtgtaatgaatgtgggaaagccttcaggtgtaactcccaatttcggcagcatctgagaattcacactggggagaagccctatgagtgtaatgagtgtggaaaggccttcagcgttaatgggaaactaatgcggcatcagagaattcacactggggagaaaccttttgaatgtaatgaatgtgggagatgctttacttctaaaaganacctacttgatcatcaccgaatccatactggagaaaagccctatcaatgtaaggaatgtgggaaagccttcagtatcaatgccaaactaactaggcatcagaggatacata

SEQ ID NO: 28353 - DNA, 1305 bp, Macaca Mulatta
  misc_feature (1)...(1305): n = A,T,C or G
acactaacagatactttgattcctgaagaatttcatattgtgtcaagtacaggagtttcaggtttggagtgttatgatgancaaatacactactctcctcacagatagtgaaaacaggctattgctcttcccatccatgngaaacctaataaaagagtagaagtggcccagctgaatgatgtgatggatactatgctagagagggctggtgtggaaaatcaggaatatacaggaccaacnnnnnnnnnnnnnnnnnnnnnnnnnnnnnnnnnnnnnnnnnnnnnnnnnnnnnnnnnnnnnnnnnnnnnnnnnnnnnnnnnnnnnnnnnnnnnnnnnnnnnnnnnnnnnnnnnnnnnnnnnnncagagagaggtatgtgcaaatgcttgaccagattgcccggcagatgattgatttctacaaagacttggtaactcagcgagtgatggaccagcgcattttagaagaattgtataatttcaagcatgttattgaagaattgaccaggncagggaactgtgtctagttcgggcgcatgatgtgaaattaacaaaggaaacagaaaaggctcacaaggatttggcgcaagctcttttagatgtggaaaagaatgccaannnnnnnnnnnnnnnnnnnnnnnnnnnnnnnnnnnnnnnnnnnnnnnnnnnnnnnnnnnnnnnnnnnnnnnnnnnnnnnnnnnnnnnnnnnnnnnnnnnnnnnnnnnnnnnnnnnnnnnnnnnnnnnnnnnnnnnnnnnnnnnnnnnnnnnnnnnnnnnnnnnnnnnnnnnnnnnnnnnnnnnnnnnnnnnnnnnnnnnnnnnnnnnnnnnnnnnnnnnnnaggacactgaagaccttgcattgttgcagaaattgacacagaaatggagaaacttagtgaatcaatttaaacaagaggtagaagaaatggaagagtctacaagggagacattgaaaatagttgagaaaggacttaccaaatggcaggagnnnnnnnnnnnnnnnnnnnnnnnnnnnnnnnnnnnnnnnnnnnnnnnnnnnnnnnnnnnnnnnnnnnnnnnnnnnnnnnnnnagatgctgaatgagaaaaaagaagagtttactggggatgttctactgtcaaaatatgatactctcaagattattaaacatttacaggaaaactggacagatattgggcttgggatatttaatcgccataaaagtttggagggggagttgccatcagagcgacagtacatggaggaaattatcaaaaacatacaaaaactctacaaagaatatgaaataagaataaatggggacaatg

SEQ ID NO: 28354 - DNA, 2218 bp, Macaca Mulatta
  misc_feature (1)...(2218): n = A,T,C or G
ctgctgcatctggagctgactgagtgccagcttgcagacacccagctgttggccacactacccatcctgactcggtgcaccagtctccggtaccttggcctctatggcaacccactgtccatggcgggcctcaaggagctgttgcgggactcagtggcgcaggctgagctgcgtactgtggtgcaccccttccctgtggactgctatgagggcttgccctggccgccgcctgcctctgtcctgctggaggcctccatcaatgaggagaagtttgcccgcgtagaagcagagttgcatcagctgcttttagcctcaggccgtgcccatgtgctctggaccacggacatctatgggcgactggctgcagactacttcagcctatgatgaagtagctctgggtgagacacaggctgtcctgcagtctctttaggtaggcagggcctttgctgggaccctggtggaggcctgtcacaaaagcactggtttctggtttcctgctgggtcctccttgcttctgggcacacctcgagcctcccctgctttctgcagtgccccacgcggttttccctgcacttgctccatgattggcgaccatctgtgggccccagggctggatgtcagnnnnnnnnnnnnnnnnnnnnnnnnnnnnnnnnnnnnnnnnnnnnnnnnnnnnnnnnnnnnnnnnnnnnnnnnnnnnnnnnnnnnnnnnnnnnnnnnnnnnnnnnnnnnnnnnnnnnnnnnnnnnnnnnnnnnnnnnnnnnnnnnnnnnnnnnnnnnnnnnnnnnnnnnnnnnnnnnnnnnnnnnnnnnnnnnnnnnnnnnnnnnnnnnnnnnnnnnnnnnnnnnnnnnnnnnnnnnnnnnnnnnnnnnnnnnnnnnnnnnnnnnnnnnnnnnnnnnnnnnnnnnnnnnnnnnnnnnnnnnnnnnnnnnnnnnnnnnnnnnnnnnnnnnnnnnnnnnnnnnnnnnnnnnnnnnnnnnnnnnnnnnnnnnnnnnnnnnnnnnnnnnnnnnnnnnnnnnnnnnnnnnnnnnnnnnnnnnnnnnnnnnnnnnnnnnnnnnnnnnnnnnnnnnnnnnnnnnnnnnnnnnnnnnnnnnnnnnnnnnnnnnnnnnnnnnnnnnnnnnnnnnnnnnnnnnnnnnnnnnnnnnnnnnnnnnnnnnnnnnnnnnnnnnnnnnnnnnnnnnnnnnnnnnnnnnnnnnnnnnnnnnnnnnnnnnnnnnnnnnnnnnnnnnnnnnnnnnnnnnnnnnnnnnnnnnnnnnnnnnnnnnnnnnnnnnnnnnnnnnnnnnnnnnnnnnnnnnnnnnnnnnnnnnnnnnnnnnnnnnnnnnnnnnnnnnnnnnnnnnnnnnnnnnnnnnnnnnnnnnnnnnnnnnnnnnnnnnnnnnnnnnnnnnnnnnnnnnnnnnnnnnnnnnnnnnnnnnnnnnnnnnnnnnnnnnnnnnnnnnnnnnnnnnnnnnnnnnnnnnnnnnnnnnnnnnnnnnnnnnnnnnnnnnnnnnnnnnnnnnnnnnnnnnnnnnnnnnnnnnnnnnnnnnnnnnnnnnnnnnnnnnnnnnnnnnnnnnnnnnnnnnnnnnnnnnagtagtcgttgacgaacagcgcgccctcccccggtggcccccgcgccttttttcgcntgcggcgccggcgacagatcatggcgaccaggagcagcgccgtgagcgccagcagcgcgatggccgccgcaatggccgtctgcgtggccaggcccagggcgcggaaggccatgcttcccgcctcgggccggggctcgcgaccagcggggcgggcggccggaggtggcggttgcgcgggctgctgcagcggctgccgggacgcgttgaccaggagccggaagggcacgcgggcagcgccaccagcattggaggcctcgcactcgtacttgccggcatgggccagcgtgatgttgctgaggaagagcatgccgctgcccgtgtcggatgccgagtgtccgcccaggcccggcgccccgccttctagctgggcctgggcttgcggccggccctcgcgaggctggggcacctttctccaggtcaccaatggctgcgggtagccagaggcttggcaggcaacccgcaggtcctcacccaggttggctgtgagctccagcggctgcacgtggacagagggcggaatgcagatgaggctgctgtgggatacgtccaggagactctggagcgccaggcgcggggactctgcacaca

SEQ ID NO: 28355 - DNA, 184 bp, Macaca Mulatta
tttatccagagatgtaaacgcaattactctaggaccaaaggtcaaacagaaacacttaatggggaaatcaccattctaaccctgacacagacacctcaatcccatagctctggctgatgaacatccttctctcctacaagactgaaattgtgtttttcatgttcttcttcattttaatatagtt

SEQ ID NO: 28356 - DNA, 1724 bp, Macaca Mulatta
  misc_feature (1)...(1724): n = A,T,C or G
acgatgagaagttcctctttttgcacaaaaacttcatcaacagcccggtggcccaggctgactgggccgccaagagactcgtctgggtcccctcggagaagcagggcttcgaggcagccagcatcaaggaggagaagggggatgaggtggttgtggagctggtggagaacggcaagaaggtcacggttgggaaagatgacatccagaagatgaacccacccaagttctccaaggtggaggacatggcggagctgacatgcctcaacgaagcctccgtgctacacaacctgagggagcggtacttctcagggctaatatatnnnnnnnnnnnnnnnnnnnnnnnnnnnnnnnnnnnnnnnnnnnnnnnnnnnnnnnnnnnnnnnnnnnnnnnnnnnnnnnnnnnnnnnnnnnnnnnnnnnnnnnnnnnnnnnnnnnnnnnnnnnnnnnnnnnnnnnnnnnnnnnnnnnnnnnnnnnnnnnnnnnnnnnnnnnnnnnnnnnnnnnnnnnnnnnnnnnnnnnnnnnnnnnnnnnnnnnnnnnnnnnnnnnnnnnnnnnnnnnnnnnnnnnnnnnnnnnnnnnnnnnnnnnnnnnnnnnnnnnnnnnnnnnggagagctggaaaagcagcttctacaagcaaacccgattctggaggctttcggcaacgccaaaacagtcaagaacgacaactcctcacgattcgnnnnnnnnnnnnnnnnnnnnnnnnnnnnnnnnnnnnnnnnnnnnnnnnnnnnnnnnnnnnnnnnnnnnnnnnnnnnnnnnnnnnnnnnnnnnnnnnnnnnnnnnnnnnnnnnnnnnnnnnnnnnnnnnnnnnnnnnnnnnnnnnnnnnnnnnnnnnnnnnnnnnnnnnnnnnnnnnnnnnnnnnnnnnnnnnnnnnnnnnnnnnnnnnnnnnnnnnnnnnnnnnnnnnnnnnnnnnnnnnnnnnnnnnnnnnnnnnnnnnnnnnnnnnnnnnnnnnnnnnnnnnnnnnnnnnnnnnnnnnnnnnnnnnnnnnnnnnnnnnnnnnnnnnnnnnnnnnnnnnnnnnnnnnnnnnnnnnnnnnnnnnnnnnnnnnnnnnnnnnnnnnnnnnnnnnnnnnnnnnnnnnnnnnnnnnnnnnnnnnnnnnnnnnnnnnnnnnnnnnnnnnnnnnnnnnnnnnnnnnnnnnnnnnnnnnnnnnnnnnnnnnnnnnnnnnnnnnnnnnnnnnnnnnnnnnnnnnnnnnnnnnnnnnnnnnnnnnnnnnnnnnnnnnnnnnnnnnnnnnnnnnnnnnnnnnnnnnnnnnnnnnnnnnnnnnnnnnnnnnnnnnnnnnnnnnnnnnnnnnnnnnnnnnnnnnnnnnnnnnnnnnnnnnnnnnnnnnnnnnnnnnnnnnnnnnnnnnnnnnnnnnnnnnnnnnnnnnnnnnnnnnnnnnnnnnnnnnnnnnnnnnnnnnnnnnnnnnnnnnnnnnnnnnnnnnnnnnnnnnnnnnnnnnnnnnnnnnnnnnnnnnnnnnnnnnnnnnnnnnnnnnnnnnnnnnnnnnnnnnnnnnnnnnnnnnnnnnnnnnnnnnnnngaacaatcctccaggtgtgctggccctgctggacgaggagtgctggttccccaaaaccacggacaagtctttcgtggagaaaatgtgcacggagcagggcagccaccccaagttccagaagcccaagcagctcaaagacaagactgagttctccatcatccattatgctgggaagg

SEQ ID NO: 28357 - DNA, 107 bp, Macaca Mulatta
ttgtccagtttgtgtagttaaatatttgatcttattaaaaatatttgtttgcagaaactctctctacatataataacaacaatcaaaaaagctttttatgccaaaac

SEQ ID NO: 28358 - DNA, 797 bp, Macaca Mulatta
  misc_feature (1)...(797): n = A,T,C or G
ggtctaaactgtgttatggatacttgtaagacttttaaaatcagagtaagtatgttcttacataaggcctttcttaggaattatgtgtatatacatctttgaaatatctttatatacctgggttttaagttccaactgtgttagacatgagtttgctagatccatgatctctagatggtttacttaaaaataaatagtccaggcgcannnnnnnnnnnnnnnnnnnnnnnnnnnnggggaggccgaggtgggcgnnnnnnnnnnnnnnnnnnnnnnnnnnnnnnnnnntnnnnnnnnnnnnnnnnnnnnnnnnnnnnnnnnnnnnnncattagccgggcatggtggcgggtnnnnnnnnnnnnnnnnnnnnnnnnnnnnnnnnnnnnnnnnnnnnnnnnnnnnnnnnnnnnnnnnnnnnnnnnnnnnnnnnnnnnnnnnnnnnnnnnnnnnnnnnnnnnnnatgcnnnnnnnnnnnnnnnnnnnnnnnnnnnnctnnnnnnnnnnnnnnnnngcctgtggtctgtttttgagggaaaaagtacataaactctgataactaggttatgataataactatgatagttaaaagtatgtcatttttaaagatttccccaaccactaaaattgttttatgaattggatttaattgaaattatataatggagtcaactgtatgtgggaagtttggtcctggtttcttggccagaaaaccttaccagttttataatgaaaatttttcagtggaatttaaaaaacttgaaaagcggtccgttttcaaaaaaggaaattttgaatc

SEQ ID NO: 28359 - DNA, 151 bp, Macaca Mulatta
ctggctctctacagatgaaccttgacctgctgcaggagcactcggacgaggctatctgggcagccctggagactgtgcagctcagagccttggtggccagcctgcccggccagctgcagtacaagtgtgccgaccgaggcgaagacctgag

SEQ ID NO: 28360 - DNA, 2083 bp, Macaca Mulatta
  misc_feature (1)...(2083): n = A,T,C or G
atggggcgaggtagcggcaccttcgagcgtcttctagnnnnnnnnnnnnnnnnnnnnnnnnnnnnnnnnnnnnnnnnnnnnnnnnnnnnnnnnnnnnnnnnnnnnnnnnnnnnnnnnnnnnnnnnnnnnnnnnnnnnnnnnnnnnnnnnnnnnnnnnnnnnnnnnnnnnnnnnnnnnnnnnnnnnnnnnnnnnnnnnnnnnnnnnnnnnnnnnnnnnnnnnnnnnnnnnnnnnnnnnnnnnnnnnnnnnnnnnnnnnnnnnnnnnnnnnnnnnnnnnnnnnnnnnnnnnnnnnnnnnnnnnnnnnnnnnnnnnnnnnnnnnnnnnnnnnnnnnnnnnnnnnnnnnnnnnnnnnnnnnnnnnnnnnnnnnnnnnnnnnnnnnnnnnnnnnnnnnnnnnnnnnnnnnnnnnnnnnnnnnnnnnnnnnnnnnnnnnnnnnnnnnnnnnnnnnnnnnnnnnnnnnnnnnnnnnnnnnnnnnnnnnnnnnnnnnnnnnnnnnnnnnnnnnnnnnnnnnnnnnnnnnnnnnnnnnnnnnnnnnnnnnnnnnnnnnnnnnnnnnnnnnnnnnnnnnnnnnnnnnnnnnnnnnnnnnnnnnnnnnnnnnnnnnnnnnnnnnnnnnnnnnnnnnnnnnnnnnnnnnnnnnnnnnnnnnnnnnnnnnnnnnnnnnnnnnnnnnnnnnnnnnnnnnnnnnnnnnnnnnnnnnnnnnnnnnnnnnnnnnnnnnnnnnnnnnnnnnnnnnnnnnnnnnnnnnnnnnnnnnnnnnnnnnnnnnnnnnnnnnnnnnnnnnnnnnnnnnnnnnnnnnnnnnnnnnnnnnnnnnnnnnnnnnnnnnnnnnnnnnnnnnnnnnnnnnnnnnnnnnnnnnnnnnnnnnnnnnnnnnnnnnnnnnnnnnnnnnnnnnnnnnnnnnnnnnnnnnnnnnnnnnnnnnnnnnnnnnnnnnnnnnnnnnnnnnnnnnnnnnnnnnnnnnnnnnnnnnnnnnnnnnnnnnnnnnnnnnnnnnnnnnnnnnnnnnnnnnnnnnnnnnnnnnnnnnnnnnnnnnnnnnnnnnnnnnnnnnnnnnnnnnnnnnnnnnnnnnnnnnnnnnnnnnnnnnnnnnnnnnnnnnnnnnnnnnnnnnnnnnnnnnnnnnnnnnnnnnnnnnnnnnnnnnnnnnnnnnnnnnnnnnnnnnnnnnnnnnnnnnnnnnnnnnnnnnnnnnnnnnnnnnnnnnnnnnnnnnnnnnnnnnnnnnnnnnnnnnnnnnnnnnnnnnnnnnnnnnnnnnnnnnnnnnnnnnnnnnnnnnnnnnnnnnnnnnnnnnnnnnnnnnnnnnnnnnnnnnnnnnnnnnnnnnnnnnnnnnnnnnnnnnnnnnnnnnnnnnnnnnnnnnnnnnnnnnnnnnnnnnnnnnnnnnnnnnnnnnnnnnnnnnnnnnnnnnnnnnnnnnnnnnnnnnnnnnnnnnnnnnnnnnnnnnnnnnnnnnnnnnnnnnnnnnnnnnnnnnnnnnnnnnnnnnnnnnnnnnnnnnnnnnnnnnnnnnnnnnnnnnnnnnnnnnnnnnnnnnnnnnnnnnnnnnnnnnnnnnnnnnnnnnnnnnnnnnnnnnnnnnnnnnnnnnnnnnnnnnnnnnnnnnnnnnnnnnnnnnnnnnnnnnnnnnnnnnnnnnnnnnnnnnnnnnnnnnnnnnnnnnnnnnnnnnnnnnnnnnnnnnnnnnnnnnnnnnnnnnnnnnnnnnnnnnnnnnnnnnnnnnnnnnnnnnnnnnnnnnnnnnnnnnnnnnnnnnnnnnncagaacgtggcctcccaggccccgcagagcctcccgaccatctctcagcctccgcagtccagcaccatgggctacatggggagccagtcggtctccatgggctaccagccttacaacatgcagncagaatctcatgaccaccctcccgagccaggacgcgtctctgccaccccagcagccctacatcgcggggcagcagcccatgtaccagcagncagatggcatcctctggcggtcccccccagcagcagccccctgtggcccagcagccgcaggcgcaggggccgccggcacagggcagcgaggcccagctcatctcattcgactga

SEQ ID NO: 28361 - DNA, 551 bp, Macaca Mulatta
aactatgaatattgtacagttaatttcctcactgaggattgtgaactttcttatattatttcatgtatattgaagaacattgttgtgcaatgctttgtgtaaagttattgtgaagattttattgtctttatttttaccaaagatttcccatagttttagcattcaaagcaataaaatataaaaatgaatctcagcactctatgatatttaagatacttatatctcaaagaggttgaaactctacaggcagttcaaatatttattgaatgcctttttagagaaaacgctatgcacttaactacttctgcagggaagtaaaagtttgctgccttctccagaaacaaaataaatctgtgaaaatatatgatttttagtgagcagaaagagccagattagtgcttgaagtgaggcattagggaggagagatgggagctgacccttggagtatgggcagggcggagatgggggagcggaaggaggagggcagctacttcaggggctcggttgtatcatcgagccttttagaccacaagggcattaggggagatcca

SEQ ID NO: 28362 - DNA, 137 bp, Macaca Mulatta
cctgaacaaacatttcaaaggacaaacaatccataccagagaagtcgaatatttaagaactacccagcataacaagaacacattttaaaactaacatttaaagttttgcagaaaactaatcttaaaaagttctcatt

SEQ ID NO: 28363 - DNA, 868 bp, Macaca Mulatta
agggaaccagacggtctgcagcgtgtctcattgccaaggatggtctacccccagccaaaggtgctgacaccctgtaggaaggacgtccttgtcgtgaccccttggctggctcccattgtctgggagggcacgttcaacatcgacatcctcaacgagcagttcaggctccagaacaccaccatcgggttaactgtgtttgccatcaaaaaatacgtggccttcctgaagctgttcctcgagacggcggagaagcatttcatggtgggccaccgggtccactactacgtcttcaccgaccagccggccgcggtgccgcgcgtggcgctggggaccggtcggcagctgtcggtgcttggggtgcgcgcctataagcgctggcaggacgtgtccatgcgccgcatggagatgatcagcgacttctgcgagcggcgcttcctcagcgaggtggattacctggtgtgcgcggacgtggacatggagttccgcgaccacgtgggcgtggagatcctgactccgctcttcggcaccctgcaccccgccttctacggaagcagccgggaggccttcacctacgagcgccggccccagtcccaggcctacatccccaaggacgagggtgatttctactacatgggggcgttcttcggggggtcggtgcaggaggtgcagcggctcaccagggcctgccaccaggccatgatggtcgaccaggccaacagcatcgaggccgtgtggcacgacgagagccatctgaacaagtacctgctgcgccacaaacccaccaaggtgctctcccccgagtacctgtgggaccagcagctgctgggctggcccgcggtcctgaggaagctgaggttcgtggcggtgc

SEQ ID NO: 28364 - DNA, 196 bp, Macaca Mulatta
aggctttactttattactggatgtgttttgtgctctacatggaccaagagaaaaatgtgttgaaattctgaggagtggccacttgttagctatctcaccaggtggagttcgagaagccctaattagtgatgaaacttacaacattgtatggggtcatcgcaaaggctttgctcaggttgcaattgatgcaaaagtg

SEQ ID NO: 28365 - DNA, 522 bp, Macaca Mulatta
tgaagagggaccagggacgacgtcagggccaaggtctcgggggtcggaaggggtgatcatcgtcccccaagggacccgcagactctaaaaaaaatccacccaccgccctgtggaagtggccttgcctggttccccttcgcaggggcgcggttggcaaactaacatggcagagcagtcacaggacccaagtggtgcctcattttttccgggctggggtcgcgggggaaggccaggaggggctggggagccttagcttttctcaccgtcggcccctcccggagacccagggacagacgcttgtcgacggcgtctgctgcgccagcggcgcttggagagaggcgcagaatccaagttggggacgcaccctaccgaccccgacccagtcccgcacggtcgcgttagcgaagggtcaggcgctcctgcgtttgtttttctttatttctttatttcacatacacattagccattcaatggagaagccggagagagtcaggcaaagatggtataacagaagcgcagtga

SEQ ID NO: 28366 - DNA, 1105 bp, Macaca Mulatta
  misc_feature (1)...(1105): n = A,T,C or G
tggatccaaactccatcttgctttctcctcagccccagatctgctcccacctggcagaagcctgcatggaaggtgagagaagctcatctcctccagagctgggtagagactcccagtttccctggagccaggtccccagctccagccctgcagaccccgaatggtttggtggtgagcacatccaggcgaagagggccagagtggaaaccatcgtccgaggcatgtgtctctccccgaatcctctggtaccaggcagtgcacaagctggggacagcccacgctgcccagagaaggcccgagagaggaagaggaagcagagccttcccacacagcaaggcctcctgatgccactccctgcctgggaccagggcaacaggaaggggggccctcgtgtgagagaacaacttcacctgctgaagcaacagctaagacatctgcaagagcacatcctacaggctgccaagcccagggacacagctcnnnnnnnnnnnnnnnnnnnnnnnnnnnnnnnnnnnnnnnnnnnnnnnnnnnnnnnnnnnnnnnnnnnnnnnnnnnnnnnnnnnnnnnnnnnnnnnnnnnnnnnnnnnnnnnnnnnnnnnnnnnnnnnnnnnnnnnnnnnnnnnnnnnnnnnnnnnnnnnnnnnnnnnnnnnnnnnnnnnnnnnnnnnnnnnnnnnnnnnnnnnnnnnnnnnnnnnnnnnnnnnnnnnnnnnnnnnnnnnnnnnnnnnnnnnnnnnnnnnnnnnnnnnnnnnnnnnnnnnnnnnnnnnnnnnnnnnnnnnnnnnnnnnnnnnnnnnnnnnnnnnnnnnnnnnnnnnnnnnnnnnnnnnnnnnnnnnnnnnnnnnnnnnnnnnnnnnnnnnnnnnnnnnnnnnnnnnnnnnnnnnnnnnnnnnnnnnnnnnnnnnnnnnnnnnnnnnnnnnnnnnnnnnnnnnnnnnnnnnnnnnnnnnnnnnnnnnnnnnnnnnnnnnnnnnnnnnnnnnnnnnnnnnnnnnnnnnnnnnnnnnnnnnnnaagagtttatcagctggataatgcaaatagtctccagttgaccaatgcaattggtgccccaacctcatatatgcagaagctgaacttcagactgtg

SEQ ID NO: 28367 - DNA, 87 bp, Macaca Mulatta
agaataactgtgtgatgcctgaagatgtgaagaacttttacctgatgaccaatggcttccacatgacatggagtgtgaagttggatg

SEQ ID NO: 28368 - DNA, 1350 bp, Macaca Mulatta
  misc_feature (1)...(1350): n = A,T,C or G
ggctttcattgtctaacggcgacaggctatatttctgctctgcagtctgtccttaggatgaatctctaactgaactgaagtaaggagaaacagccttgaatctttggagnnnnnnnnnnnnnnnnnnnnnnnnnnnnnnnnnnnnnnnnnnnnnnnnnnnnnnnnnnnnnnnnnnnnaggccctgcctaagcctcagcagaacttgtaagcctaaactgaagagcctcacccggaggagcaggcatcccttaaccttaagcaagccacttccacgccctggatcagtgaataaccccagctgcaccatgagccgcgttcgggatgctggctgtgtagcggcggggatagtgataggggctggtgcctggtactgtgtctacaaatacaccaggggaagagaccagaccaagaagagaatggccaagcccaaaaaccgggctgtggctgggactggagccagggctagagctgggctaagagccggattcacaatcgaccttgggtcaggattcagtcccccaaccccagtccgcgctgaagcagaggacagggctcaggatgaagcctctgttctggacacagctggagctgaggcagtggccccagctgcatccagcgctgaggctcagagtggggcaggcggtcaggcccaagaggcagatggagccagggttgggcctaaggccgaatcaatagttggggctgcaatggcttcnnnnnnnnnnnnnnnnnnnnnnnnnnnnnnnnnnnnnnnnnnnnnnnnnnnnnnnnnnnnnnnnnnnnnnnnnnnnnnnnnnnnnnnnnnnnnnnnnnnnnnnnnnnnnnnnnnnnnnnnnnnnnnnnnnnnnnnnnnnnnnnnnnnnnnnnnnnnnnnnnnnnnnnnnnnnnnnnnnnnnnnnnnnnnnnnnnnnnnnnnnnnnnnnnnnnnnnnnnnnnnnnnnnnnnnnnnnnnnnnnnnnnnnnnnnnnnnnnnnnnnnnnnnnnnnnnnnnnnnnnnnnnnnnnnnnnnnnnnnnnnnnnnnnnnnnnnnnnnncccctagaacagcggtggttcctgggacatcagccgccaagaaagcaacccctggggctcacactggggctatccctaaagccacatcagcaactggagcggtacccaaaggtggagccaagggtgtaaccaggtcccggaatgggggcaagggcaagggcaagaaaagcaaggttgaagtagacgaactggggatgggcttccgtcagagagatggggctgcaccagctgctgcagcctctgccaatggcggacaggctttcctggcagaggtcccttttagggaggacggggagtccgggtggnctgncacag

SEQ ID NO: 28369 - DNA, 1766 bp, Macaca Mulatta
  misc_feature (1)...(1766): n = A,T,C or G
aggagtctgaatgaatgtatttcaccaatagcgaatgagacgaaccatcttcctgcacacagccacggtttgcaaagnnnnnnnnnnnnnnnnnnnnnnnnnnnnnnnnnnnnnnnnnnnnnnnnnnnnnnnnnnnnnnnnnnnnnnnnnnnnnnnnnnnnnnnnnnnnnnnnnnnnnnnnnnnnnnnnnnnnnnnnnnnnnnnnnnnnnnnnnnnnnnnnnnnnnnnnnnnnnnnnnnnnnnnnnnnnnnnnnnnnnnnnnnnnnnnnnnnnnnnnnnnnnnnnnnnnnnnnnnnnnnnnnnnnnnnnnnnnnnnnnnnnnnnnnnnnnnnnnnnnnnnnnnnnnnnnnnnnnnnnnnnnnnnnnnnnnnnnnnnnnnnnnnnnnnnnnnnnnnnnnnnnnnnnnnnnnnnnnnnnnnnnnnnnnnnnnnnnnnnnnnnnnnnnnnnnnnnnnnnnnnnnnnnnnnnnnnnnnnnnnnnnnnnnnnnnnnnnnnnnnnnnnnnnnnnnnnnnnnnnnnnnnnnnnnnnnnnnnnnnnnnnnnnnnnnnnnnnnnnnnnnnnnnnnnnnnnnnnnnnnnnnnnnnnnnnnnnnnnnnnnnnnnnnnnnnnnnnnnnnnnnnnnnnnnnnnnnnnnnnnnnnnnnnnnnnnnnnnnnnnnnnnnnnnnnnnnnnnnnnnnnnnnnnnnnnnnnnnnnnnnnnnnnnnnnnnnnnnnnnnnnnnnnnnnnnnnnnnnnnnnnnnnnnnnnnnnnnnnnnnnnnnnnnnnnnnnnnnnnnnnnnnnnnnnnnnnnnnnnnnnnnnnnnnnnnnnnnnnnnnnnnnnnnnnnnnnnnnnnnnnnnnnnnnnnnnnnnnnnnnnnnnnnnnnnnnnnnnnnnnnnnnnnnnnnnnnnnnnnnnnnnnnnnnnnnnnnnnnnnnnnnnnnnnnnnnnnnnnnnnnnnnnnnnnnnnnnnnnnnnnnnnnnnnnnnnnnnnnnnnnnnnnnnnnnnnnnnnnnnnnnnnnnnnnnnnnnnnnnnnnnnnnnnnnnnnnnnnnnnnnnnnnnnnnnnnnnnnnnnnnnnnnnnnnnnnnnnnnnnnnnnnnnnnnnnnnnnnnnnnnnnnnnnnnnnnnnnnnnnnnnnnnnnnnnnnnnnnnnnnnnnnnnnnnnnnnnnnnnnnnnnnnnnnnnnnnnnnnnnnnnnnnnnnnnnnnnnnnnnnnnnnnnnnnnnnnnnnnnnnnnnnnnnnnnnnnnnnnnnnnnnnnnnnnnnnnnnnnnnnnnnnnnnnnnnnnnnnnnnnnnnnnnnnnnnnnnnnnnnnnnnnnnnnnnnnnnnngtttcagcagcagtgacttttcagagctgagtaatggagaagagcttcaggaaacctgcagctcatccctaagacgtgggtcagnnnnnnnnnnnnnnnnnnnnnnnnnnnnnnnnnnnnnnnnnnnnnnnnnnnnnnnnnnnnnnnnnnnnnnnnnnnnnnnnnnnnnnnnnnnnnnnnnnnnnnnnnnnnnnnnnnnnnnnnnnnnnnnnnnnnnnnnnnnnnnnnnnnnnnnnnnnnnnnnnnnnnnnnnnnnnnnnnnnnnnnnnnnnnnnnnnnnnnnnnnnnnnnnnnnnnnnnnnnnnnnnnnnnnnnnnnnnnnnnnnnnnnnnnnnnnnnnnnnnnnnnnnnnnnnnnnnnnnnnnnnnnnnnnnnnnnnnnnnnnnnnnnnnnnnnnnnnnnnnnnnnnnnnnnnnnggtccaagaattcccagagataaaaatattaattt

SEQ ID NO: 28370 - DNA, 241 bp, Macaca Mulatta
  misc_feature (1)...(241): n = A,T,C or G
gttgatgtatgccctatggatgaattttagcagtttgggtctttcagcaattggtttacttctaactgcatgtgaaattacactctttttactgcaagatgaaattattcagtggccacangtacccagtaacagagagagcaaagcaaatcttatcctcaaagaactgcagctgcttgttagatctgcctggtggttccatagagaaactgctcagagaacctgcctttacctcgcctaa

SEQ ID NO: 28371 - DNA, 1154 bp, Macaca Mulatta
  misc_feature (1)...(1154): n = A,T,C or G
agtttagctgctgtggagggatttcctacaaggactggtcccagaacatgtatttcaactgctcggaagacaaccccagtcgagagcgctgctctgtgccttactcctgttgcttgcctacccctgaccagnnnnnnnnnnnnnnnnnnnnnnnnnnnnnnnnnnnnnnnnnnnnnnnnnnnnnnnnnnnnnnnnnnnnnnnnnnnnnnnnnnnnnnnnnnnnnnnnnnnnnnnnnnnnnnnnnnnnnnnnnnnnnnnnnnnnnnnnnnnnnnnnnnnnnnnnnnnnnnnnnnnnnnnnnnnnnnnnnnnnnnnagatcctagtgaatcagatcaaagatcagatcaagctacagctctacaaccagcagcaccgggctgacccatggtactgagaatccttcctgcacctcctcaccatggcaactggcaagcctcatcaaccaacagcagcgggtactgagaacagcaccaaatggagatttggattccagccccccagtgacagcccagtgggaagaagcaaactccagatgggcagaaggcagggtgcacaggtggctccggtctcaggaggatgcgccccctctcccccatcccagccctcagcattgtgcgagagtgatacccttaagtgtttgggtttatgtttttagttttgtttgggaaacagcagttgcacagagttacggtgtagtgctgctgccgtttcaccgaggcactgccaccaccagctctatcagggatgctcccgagcttggcggacatacttagatcctaacgtgccagtgagacctggctgtggagagtagcactggcagccctgcctggagtccggttggcatgataccagctccagaagggaagagagtggagcagacagtgaggagcgagcctgggggtcggctggggacagccgtatgtgctagctgggagtggagggggatatgtttaccaaatgcctgccctgccatcctcccaggtagtcagagtgagctacatcctgccccgccttcatttccatggaaacatggcagctagggcacggggtacagcagcagccaaattcttccccacctcctctgctttgaaaaaaagtttggaaccctggtccctatactctgcagtcagaagtgggactgagccatacatgcc

SEQ ID NO: 28372 - DNA, 189 bp, Macaca Mulatta
agaagaggcctcttctcagacaactctgccaaatcagcctgtcgagaaagccatcgtcatgcaactgggaactctgcttacatttttccatgagctggtgcagacagctctgccatcaggcagctgtgtggacaccttgttaaaggacttgtgcaaaatgtacaccacacttacagcacttgtcagata

SEQ ID NO: 28373 - DNA, 606 bp, Macaca Mulatta
  misc_feature (1)...(606): n = A,T,C or G
caggttacttcacggcaggatgcctgttcctgtgtacagtggctctgggttcatagtgtctgaggatgggctcattattaccaatgcccacgtgtcaggaaccagcagtggnnnnnnnnnnnnnnnnnnnnnnnnnnnnnnnnnnnnnnnnnnnnnnnnnnnnnnnnnnnnnnnnnnnnnnnnnnnnnnnnnnnnnnnnnnnnnnnnnnnnnnnnnnnnnnnnnnnnnnnnnnnnnnnnnnnnnnnnnnnnnnnnnnnnnnnnnnnnnnnnnnnnnnnnnnnnnnnnnnnnnnnnnnnnnnnnnnnnnnnnnnnnnnnnnnnnnnnnnnnnnnnnnnnnnnnnnnnnnnnnnnnnnnnnnnnnnnnnnnnnnnnnnnnnnnnnnnnnnnnnnnnnnnnnnnnnnnnnnnnnnnnnnnnnnnnnnnnnnnnnnnnnnnnnnnnnnnnnnnnnnnnnnnnnnnnnnnnnnnnnnnnnnnnnnnnnnnnnnnnnnnnnnnnnnnnnnnnnnnnnnnnnnnnnnnnnnnnnnnnnnnnnnnnnnnnnnnnnggaatggtgttttcaaataagatatatctgggtctgcaaatgctgcccctcactatgcc

SEQ ID NO: 28374 - DNA, 130 bp, Macaca Mulatta
gaggcagctgagcgtccactgctgctcacaggtgcaagagctgcagcagctgctggtggagagacaggaggagaaggagagcctgggacgggaggtggagagtttgcagagccggctgtccctgctggag

SEQ ID NO: 28375 - DNA, 654 bp, Macaca Mulatta
gaaggacaaattacaatgcattttgaaagactggtctacagtcaaataccagttatcacagacttcactggccttaatgaggaggctgagatggatttaattactgggacacgcaacgcttacaccaaactcttcgattctcaacttggaaaagcaaatgtggatacagatgagtgtggacatagcttcagtaggaaatgtcaagtttgttcatcactctgaagtttcttcagctgccacagaaactgcaccctccctcccgactggttggtgatcttgctttgctcccaagaaggtattttctgctgacctgatagatcaggtaagagagtagcaatgtgtcttttgtcctctgcctccagttccctggctgcctgcattgctgcatttgttatctgtggattgaaagtgacaccactctcgaggagggtgaacgcagaggtgtatgcacagctagtaccagtaacacccctagaatgagccaagagaagatgagggaaggaggaaagggagccttaggtatgggcctaggaaaaaggtcgggggttacttatgtaggaggtatggatggtgaagctggatctcttcttacctgtggtgagcacaccataccggacaacccagggcctacattgtagagggtgcactctgcat

SEQ ID NO: 28376 - DNA, 1853 bp, Macaca Mulatta
  misc_feature (1)...(1853): n = A,T,C or G
ataccagatgacccctagtgaaggctgggcacctgggggtgcagagccattttctgatggtatcaacatgccacattctctgcccccgaggggcatggctccccaccctaacatgccagggagccagatgcgcctccctggatttgcaggcatgataaactctgaaatggaagggccaaatgtccccaaccctgcatctagaccaggtctttctggagtcagttggccagatgatgtgccaaaaatcccagatggtcgaaattttcctcctggccagggcgtcttcagcggtcccggccgaggggaacgcttcccaaacccccaaggattgtctgaagagatgtttcagcagcagctggcagagaaacagctgggtctccccccagggatggccatggaaggcatcaggcccagcatggagatgaacaggatgattccaggctcccagcgccacatggagcctgggaataaccccattttccctcgaataccagttgagggccctctgagtccttctaggggtgactttccaaaaggaatgcccccacagatggaacgtggtcgggnnnnnnnnnnnnnnnnnnnnnnnnnnnnnnnnnnnnnnnnnnnnnnnnnnnnnnnnnnnnnnnnnnnnnnnnnnnnnnnnnnnnnnnnnnnnnnnnnnnnnnnnnnnnnnnnnnnnnnnnnnnnnnnnnnnnnnnnnnnnnnnnnnnnnnnnnnnnnnnnnnnnnnnnnnnnnnnnnnnnnnnnnnnnnnnnnnnnnnnnnnnnnnnnnnnnnnnnnnnnnnnnnnnnnnnnnnnnnnnnnnnnnnnnnnnnnnnnnnnnnnnnnnnnnnnnnnnnnnnnnnnnnnnnnnnnnnnnnnnnnnnnnnnnnnnnnnnnnnnnnnnnnnnnnnnnnnnnnnnnnnnnnnnnnnnnnnnnnnnnnnnnnnnnnnnnnnnnnnnnnnnnnnnnnnnnnnnnnnnnnnnnnnnnnnnnnnnnnnnnnnnnnnnnnnnnnnnnnnnnnnnnnnnnnnnnnnnnnnnnnnnnnnnnnnnnnnnnnnnnnnnnnnnnnnnnnnnnnnnnnnnnnnnnnnnnnnnnnnnnnnnnnnnnnnnnnnnnnnnnnnnnnnnnnnnnnnnnnnnnnnnnnnnnnnnnnnnnnnnnnnnnnnnnnnnnnnnnnnnnnnnnnnnnnnnnnnnnnnnnnnnnnnnnnnnnnnnnnnnnnnnnnnnnnnnnnnnnnnnnnnnnnnnnnnnnnnnnnnnnnnnnnnnnnnnnnnnnnnnnnnnnnnnnnnnnnnnnnnnnnnnnnnnnnnnnnnnnnnnnnnnnnnnnnnnnnnnnnnnnnnnnnnnnnnnnnnnnnnnnnnnnnnnnnnnnnnnnnnnnnnnnnnnnnnnnnnnnnnnnnnnnnnnnnnnnnnnnnnnnnnnnnnnnnnnnnnnnnnnnnnnnnnnnnnnnnnnnnnnnnnnnnnnnnnnnnnnnnnnnnnnnnnnnnnnnnnnnnnnnnnnnnnnnnnnnnnnnnnnnnnnnnnnnnnnnnnnnnnnnnnnnnnnnnnnnnnnnnnnnnnnnnnnnnnnnnnnnnnnnnnnnnnnnnnnnnnnnnnnnnnnnnnnnnnnnnnnnnnnnnnnnnnnnnnnnnnnnnnnnnnnnnnnnnnnnnnnnnnnnnnnnnnnnnnnnnnnnnnnncgatgccaaccctcagcccaatgggaatgacccagccactttctcactccaatcagatgccctctccaaatgccatgggacccaacatacctcctcatggggtcccaatggggcctggagagatgtcacacaatcctatcatggggcatgggtcccaggagccaccgatggtacctcaaggacggat

SEQ ID NO: 28377 - DNA, 2044 bp, Macaca Mulatta
  misc_feature (1)...(2044): n = A,T,C or G
natgctgcgaggcggacggcgcgggcagctcggctggcacagctgggctgcggggccgggcagcctgctggcttggctgatgttggcatctgcgggcgcctcaccctgccccgatgcctgctgcccccacggctcctcgggactgcgatgcacacgggatggggccctggatagcctccaccacctgcccggcgcagagaacctgactgagcnnnnnnnnnnnnnnnnnnnnnnnnnnnnnnnnnnnnnnnnnnnnnnnnnnnnnnnnnnnnnnnnnnnnnnnnnnnaccatcgtgaagagtggtctccgtttcgtggcgccagatgccttccatttcactcctcagctcagtcgcctgnnnnnnnnnnnnnnnnnnnnnnnnnnnnnnnnnnnnnnnnnnnnnnnnnnnnnnnnnnnnnnnnnnnnnnnnnnnnnnnnnnnnnnnnnnnnnnnnnnnnnnnnnnnnnnnnnnnnnnnnnnnnnnnnnnnnnnnnnnnnnnnnnnnnnnnnnnnnnnnnnnnnnnnnnnnnnnnnnnnnnnnnnnnnnnnnnnnnnnnnnnnnnnnnnnnnnnnnnnnnnnnnnnnnnnnnnnnnnnnnnnnnnnnnnnnnnnnnnnnnnnnnnnnnnnnnnnnnnnnnnnnnnnnnnnnnnnnnnnnnnnnnnnnnnnnnnnnnnnnnnnnnnnnnnnnnnnnnnnnnnnnnnnnnnnnnnnnnnnnnnnnnnnnnnnnnnnnnnnnnnnnnnnnnnnnnnnnnnnnnnnnnnnnnnnnnnnnnnnnnnnnnnnnnnnnnnnnnnnnnnnnnnnnnnnnnnnnnnnnnnnnnnnnnnnnnnnnnnnnnnnnnnnnnnnnnnnnnnnnnnnnnnnnnnnnnnnnnnnnnnnnnnnnnnnnnnnnnnnnnnnnnnnnnnnnnnnnnnnnnnnnnnnnnnnnnnnnnnnnnnnnnnnnnnnnnnnnnnnnnnnnnnnnnnnnnnnnnnnnnnnnnnnnnnnnnnnnnnnnnnnnnnnnnnnnnnnnnnnnnnnnnnnnnnnnnnnnnnnnnnnnnnnnnnnnnnnnnnnnnnnnnnnnnnnnnnnnnnnnnnnnnnnnnnnnnnnnnnnnnnnnnnnnnnnnnnnnnnnnnnnnnnnnnnnnnnnnnnnnnnnnnnnnnnnnnnnnnnnnnnnnnnnnnnnnnnnnnnnnnnnnnnnnnnnnnnnnnnnnnnnnnnnnnnnnnnnnnnnnnnnnnnnnnnnnnnnnnnnnnnnnnnnnnnnnnnnnnnnnnnnnnnnnnnnnnnnnnnnnnnnnnnnnnnnnnnnnnnnnnnnnnnnnnnnnnnnnnnnnnnnnnnnnnnnnnnnnnnnnnnnnnnnnnnnnnnnnnnnnnnnnnnnnnnnnnnnnnnnnnnnnnnnnnnnnnnnnnnnnnnnnnnnnnnnnnnnnnnnnnnnnnnnnnnnnnnnnnnnnnnnnnnnnnnnnnnnnnnnnnnnnnnnnnnnnnnnnnnnnnnnnnnnnnnnnnnnnnnnnnngtgttcaccacatcaagcgccgggacatcgtgctcaagtgggagctgggggagggcgcctttggaagtcttccttgctgannnnnnnnnnnnnnnnnnnnnnnnnnnnnnnnnnnnnnnnnnnnnnnnnnnnnnnnnnnnnnnnnnnnnnnnnnnnnnnnnnnnnnnnnnnnnnnnnnnnnnnnnnnnnnnnnnnnnnnnnnnnnnnnnnnnnnnnnnnnnnnnnnnnnnnnnnnnnnnnnnnnnnnnnnnnnnnnnnnnnnnnnnnnnnnnnnnnnnnnnnnnnnnnnnnnnnnnnnnngatcccatgggcctgatgccaagctgctggctggtggggaggatgtggctccaggccccctgggtctggggcagctgctggccgtggctagccaggtcgctgcggggatggtgtacctggcaggtcttcattttgtgcaccgggacctggccacacgaaactgtctggtgggccaaggactggtggtcaagattggtgatttcggcatgagcagggatatctacagcaccgactattaccgtgt

SEQ ID NO: 28378 - DNA, 420 bp, Macaca Mulatta
aagaaggtagtaaacttggagactgctctgggttacatgaccaaagagtttgagagtgaagttttaaaactgcagcaacacgcaatgatagagaaccaagcgggtcaggtagaaattgacaagctgcagcaccttcttcagatgaaggacagggaaatgaatcgtgtgaagaagctggccaagaacatactggatgagagaacagaagtggaaagattctttttagatgctctacaccaagtgaagcaacagatcctaattagcaggaagcattataagcagatagcacaagctgctttcaatttaaaaatgagagcagcatgtgcaggaagaacagaatatcccaaaatcagaacatttgatggcagagagcacagcaccaatagtgtgaatcaggatcttctggaggccgaaaaatgg

SEQ ID NO: 28379 - DNA, 689 bp, Macaca Mulatta
  misc_feature (1)...(689): n = A,T,C or G
gggtcgtgggcgggttcggagctgcctccggggaggtgccctggcaggtcagcctgaaggaagggtcccggcacttctgtggagcgactgtggtgggggaccgctggctgctgtctgccgcccactgcttcaaccannnnnnnnnnnnnnnnnnnnnnnnnnnnnnnnnnnnnnnnnnnnnnnnnnnnnnnnnnnnnnnnnnnnnnnnnnnnnnnnnnnnnnnnnnnnnnnnnnnnnnnnnnnnnnnnnnnnnnnnnnnnnnnnnnnnnnnnnnnnnnnnnnnnnnnnnnnnnnnnnnnnnnnnnnnnnnnnnnnnnnnnnnnnnnnnnnnnnnnnnnnnnnnnnnnnnnnnnnnnnnnnnnnnnnnnnnnnnnnnnnnnnnnnnnnnnnnnnnnnnnnnnnnnnnnccaccaagcccgagctcctgcagaaggcgtccgtgggcatcatagaccagaagacctgtagcgtgctctacaacttctccctcacagaccgcatgatctgcgctggcttcctggaaggcaaagttgactcctgccaggnnagggtgactctgggggccccctggcctgcgaggaggcccccggcgtgttttatctggcagggattgtgagctggggtattggctgcgctcaggttaagaagccgggcgtctacacgcgcatcaccaggctaaagggctggat

SEQ ID NO: 28380 - DNA, 4685 bp, Macaca Mulatta
  misc_feature (1)...(4685): n = A,T,C or G
gctggtatttgggcggctggtggcggctgggacgcttggggggtgggaggaggcgaaggaggagggagaaccccgtgcaacgttgggacttggcaacccttttagagatgcccaaggatatttaatttgcctcgggaatcgctacttccagagggnnnnnnnnnnnnnnnnnnnnnnnnnnnnnnnnnnnnnnnnnnnnnnnnnnnnnnnnnnnnnnnnnnnnnnnnnnnnnnnnnnnnnnnnnnnnnnnnnnnnnnnnnnnnnnnnnnnnnnnnnnnnnnnnnnnnnnnnnnnnnnnnnnnnnnnnnnnnnnnnnnnnnnnnnnnnnnnnnnnnnnnnnnnnnnnnnnnnnnnnnnnnnnnnnnnnnnnnnnnnnnnnnnnnnnnnnnnnnnnnnnnnnnnnnnnnnnnnnnnnnnnnnnnnnnnnnnnnnnnnnnnnnnnnnnnnnnnnnnnnnnnnnnnnnnnnnnnnnnnnnnnnnnnnnnnnnnnnnnnnnnnnnnnnnnnnnnnnnnnnnnnnnnnnnnnnnnnnnnnnnnnnnnnnnnnnnnnnnnnnnnnnnnnnnnnnnnnnnnnnnnnnnnnnnnnnnnnnnnnnnnnnnnnnnnnnnnnnnnnnnnnnnnnnnnnnnnnnnnnnnnnnnnnnnnnnnnnnnnnnnnnnnnnnnnnnnnnnnnnnnnnnnnnnnnnnnnnnnnnnnnnnnnnnnnnnnnnnnnnnnnnnnnnnnnnnnnnnnnnnnnnnnnnnnnnnnnnnnnnnnnnnnnnnnnnnnnnnnnnnnnnnnnnnnnnnnnnnnnnnnnnnnnnnnnnnnnnnnnnnnnnnnnnnnnnnnnnnnnnnnnnnnnnnnnnnnnnnnnnnnnnnnnnnnnnnnnnnnnnnnnnnnnnnnnnnnnnnnnnnnnnnnnnnnnnnnnnnnnnnnnnnnnnnnnnnnnnnnnnnnnnnnnnnnnnnnnnnnnnnnnnnnnnnnnnnnnnnnnnnnnnnnnnnnnnnnnnnnnnnnnnnnnnnnnnnnnnnnnnnnnnnnnnnnnnnnnnnnnnnnnnnnnnnnnnnnnnnnnnnnnnnnnnnnnnnnnnnnnnnnnnnnnnnnnnnnnnnnnnnnnnnnnnnnnnnnnnnnnnnnnnnnnnnnnnnnnnnnnnnnnnnnnnnnnnnnnnnnnnnnnnnnnnnnnnnnnnnnnnnnnnnnnnnnnnnnnnnnnnnnnnnnnnnnnnnnnnnnnnnnnnnnnnnnnnnnnnnnnnnnnnnnnnnnnnnnnnnnnnnnnnnnnnnnnnnnnnnnnnnnnnnnnnnnnnnnnnnnnnnnnnnnnnnnnnnnnnnnnnnnnnnnnnnnnnnnnnnnnnnnnnnnnnnnnnnnnnnnnnnnnnnnnnnnnnnnnnnnnnnnnnnnnnnnnnnnnnnnnnnnnnnnnnnnnnnnnnnnnnnnnnnnnnnnnnnnnnnnnnnnnnnnnnnnnnnnnnnnnnnnnnnnnnnnnnnnnnnnnnnnnnnnnnnnnnnnnnnnnnnnnnnnnnnnnnnnnnnnnnnnnnnnnnnnnnnnnnnnnnnnnnnnnnnnnnnnnnnnnnnnnnnnnnnnnnnnnnnnnnnnnnnnnnnnnnnnnnnnnnnnnnnnnnnnnnnnnnnnnnnnnnnnnnnnnnnnnnnnnnnnnnnnnnnnnnnnnnnnnnnnnnnnnnnnnnnnnnnnnnnnnnnnnnnnnnnnnnnnnnnnnnnnnnnnnnnnnnnnnnnnnnnnnnnnnnnnnnnnnnnnnnnnnnnnnnnnnnnnnnnnnnnnnnnnnnnnnnnnnnnnnnnnnnnnnnnnnnnnnnnnnnnnnnnnnnnnnnnnnnnnnnnnnnnnnnnnnnnnnnnnnnnnnnnnnnnnnnnnnnnnnnnnnnnnnnnnnnnnnnnnnnnnnnnnnnnnnnnnnnnnnnnnnnnnnnnnnnnnnnnnnnnnnnnnnnnnnnnnnnnnnnnnnnnnnnnnnnnnnnnnnnnnnnnnnnnnnnnnnnnnnnnnnnnnnnnnnnnnnnnnnnnnnnnnnnnnnnnnnnnnnnnnnnnnnnnnnnnnnnnnnnnnnnnnnnnnnnnnnnnnnnnnnnnnnnnnnnnnnnnnnnnnnnnnnnnnnnnnnnnnnnnnnnnnnnnnnnnnnnnnnnnnnnnnnnnnnnnnnnnnnnnnnnnnnnnnnnnnnnnnnnnnnnnnnnnnnnnnnnnnnnnnnnnnnnnnnnnnnnnnnnnnnnnnnnnnnnnnnnnnnnnnnnnnnnnnnnnnnnnnnnnnnnnnnnnnnnnnnnnnnnnnnnnnnnnnnnnnnnnnnnnnnnnnnnnnnnnnnnnnnnnnnnnnnnnnnnnnnnnnnnnnnnnnnnnnnnnnnnnnnnnnnnnnnnnnnnnnnnnnnnnnnnnnnnnnnnnnnnnnnnnnnnnnnnnnnnnnnnnnnnnnnnnnnnnnnnnnnnnnnnnnnnnnnnnnnnnnnnnnnnnnnnnnnnnnnnnnnnnnnnnnnnnnnnnnnnnnnnnnnnnnnnnnnnnnnnnnnnnnnnnnnnnnnnnnnnnnnnnnnnnnnnnnnnnnnnnnnnnnnnnnnnnnnnnnnnnnnnnnnnnnnnnnnnnnnnnnnnnnnnnnnnnnnnnnnnnnnnnnnnnnnnnnnnnnnnnnnnnnnnnnnnnnnnnnnnnnnnnnnnnnnnnnnnnnnnnnnnnnnnnnnnnnnnnnnnnnnnnnnnnnnnnnnnnnnnnnnnnnnnnnnnnnnnnnnnnnnnnnnnnnnnnnnnnnnnnnnnnnnnnnnnnnnnnnnnnnnnnnnnnnnnnnnnnnnnnnnnnnnnnnnnnnnnnnnnnnnnnnnnnnnnnnnnnnnnnnnnnnnnnnnnnnnnnnnnnnnnnnnnnnnnnnnnnnnnnnnnnnnnnnnnnnnnnnnnnnnnnnnnnnnnnnnnnnnnnnnnnnnnnnnnnnnnnnnnnnnnnnnnnnnnnnnnnnnnnnnnnnnnnnnnnnnnnnnnnnnnnnnnnnnnnnnnnnnnnnnnnnnnnnnnnnnnnnnnnnnnnnnnnnnnnnnnnnnnnnnnnnnnnnnnnnnnnnnnnnnnnnnnnnnnnnnnnnnnnnnnnnnnnnnnnnnnnnnnnnnnnnnnnnnnnnnnnnnnnnnnnnnnnnnnnnnnnnnnnnnnnnnnnnnnnnnnnnnnnnnnnnnnnnnnnnnnnnnnnnnnnnnnnnnnnnnnnnnnnnnnnnnnnnnnnnnnnnnnnnnnnnnnnnnnnnnnnnnnnnnnnnnnnnnnnnnnnnnnnnnnnnnnnnnnnnnnnnnnnnnnnnnnnnnnnnnnnnnnnnnnnnnnnnnnnnnnnnnnnnnnnnnnnnnnnnnnnnnnnnnnnnnnnnnnnnnnnnnnnnnnnnnnnnnnnnnnnnnnnnnnnnnnnnnnnnnnnnnnnnnnnnnnnnnnnnnnnnnnnnnnnnnnnnnnnnnnnnnnnnnnnnnnnnnnnnnnnnnnnnnnnnnnnnnnnnnnnnnnnnnnnnnnnnnnnnnnnnnnnnnnnnnnnnnnnnnnnnnnnnnnnnnnnnnnnnnnnnnnnnnnnnnnnnnnnnnnnnnnnnnnnnnnnnnnnnnnnnnnnnnnnnnnnnnnnnnnnnnnnnnnnnnnnnnnnnnnnnnnnnnnnnnnnnnnnnnnnnnnnnnnnnnnnnnnnnnnnnnnnnnnnnnnnnnnnnnnnnnnnnnnnnnnnnnnnnnnnnnnnnnnnnnnnnnnnnnnnnnnnnnnnnnnnnnnnnnnnnnnnnnnnnnnnnnnnnnnnnnnnnnnnnnnnnnnnnnnnnnnnnnnnnnnnnnnnnnnnnnnnnnnnnnnnnnnnnnnnnnnnnnnnnnnnnnnnnnnnnnnnnnnnnnnnnnnnnnnnnnnnnnnnnnnnnnnnnnnnnnnnnnnnnnnnnnnnnnnnnnnnnnnnnnnnnnnnnnnnnnnnnnnnnnnnnnnnnnnnnnnnnnnnnnnnnnnnnnnnnnnnnnnnnnnnnnnnnnnnnnnnnnnnnnnnnnnnnnnnnnnnnnnnnnnnnnnnnnnnnnnnnnnnnnnnnnnnnnnnnnnnnnnnnnnnnnnnnnnnnnnnnnnnnnnnnnnnnnnnnnnnnnnnnnnnnnnnnnnnnnnnnnnnnnnnnnnnnnnnnnnnnnnnnnnnnnnnnnnnnnnnnnnnnnnnnnnnnnnnnnnnnnnnnnnnnnnnnnnnnnnnnnnnnnnnnnnnnnnnnnnnnnnnnnnnnnnnnnnnnnnnnnnnnnnnnnnnnnnnnnnnnnnnnnnnnnnnnnnnnnnnnnnnnnnnnnnnnnnnnnnnnnnnnnnnnnnnnnnnnnnnnnnnnnnnnnnnnnnnnnnnnnnnnnnnnnnnnnnnnnnnnnnnnnnnnnnnnnnnnnnnnnnnnnnnnnnnnnnnnnnnnnnnnnnnnnnnnnnnnnnnnnnnnnnnnnnnnnnnnnnagactctaaatatatcatgattcacaactaggacctcatatcttcctcatcagtagatggtacgatgcatccatttcagtttgtttactttatccaatcatcaggattttatngantgaantgcacgttntatnnnnnnnnnnnnnnnnnnnnnnnngcactgtgacaccagaacaaggagtctgcataaacttcatcttcaaccttaaggacttagctggctacagtgaagggatgtgcccaccaccgtgtcatgagagaatgggtttaaaggcaatgcatttacaagatccat

SEQ ID NO: 28381 - DNA, 763 bp, Macaca Mulatta
gagaattcccctgaccatccatctatcctcccatccattggcctgaattcaggtctctgttcccctccaactttcttccatttctggaaactccttgaaggaaggatggatgggcttggacaagtgggagggccttcggagttggcaaggcaggtagcttctgtgtcccgggctcagggagaaggctggtcccctggagcattgtcccctgctgggccaggatcccccaggatttggacccctgtgtgcttgggatgaagagccgtggcagagagggaagggcataaggagataccaaagctgcccctgggatgccagttttccaaggtggccctgtaggaaggggggttgggatgtagggtgaggtaaggctcccttgaatgctgtaccctgtccattagagcagccatggccagttccaggcgaggcctcctcctgctcctgatgctgctgactgctcaccctggaccctcagaggttcagcactggtcccatggctggtaccctggaggaaagcgagccctcagctcagcccaggatcctcagaatgcccttaggcccccagcaggcagcccagcccaggctacctatggcctcccaagtgatgccctggctcacctggaagacagcatgccctgggagggcaggaccatggcgtggtggtcccttcgcaggaagcgatatctggcacagacactactgacggcagcccgagagccccgccccgtcccgccgtcctccaataaagtgtgaggttctccga

SEQ ID NO: 28382 - DNA, 646 bp, Macaca Mulatta
  misc_feature (1)...(646): n = A,T,C or G
tttcctttacctagtcatcctgctgcacctcctgaacatcttaaagaacctttggtatacatgaggaaagcacaggnnnnnnnnnnnnnnnnnnnnnnnnnnnnnnnnnnnnnnnnnnnnnnnnnnnnnnnnnnnnnnnnnnnnnnnnnnnnnnnnnnnnnnnnnnnnnnnnnnnnnnnnnnnnnnnnnnnnnnnnnnnnnnnnnnnnnnnnnnnnnnnnnnnnnnnnnnnnnnnnnnnnnnnnnnnnnnnnnnnnnnnnnnnnnnnnnnnnnnnnnnnnnnnnnnnnnnnnnnnnnnnnnnnnnnnnnnnnnnnnnnnnnnnnnnnnnnnnnnnnnnnnnnnnnnnnnnnnnnnnnnnnnnnnnnnnnnnnnnnnnnnnnnnnnnnnnnnnnnnnnnnnnnnnnnnnnnnnnnnnnnnnnnnnnnnnnnnnnnnnnnnnnnnnnnnnnnnnngaaaatgagcatgtacgtattgggcaaaaannnnnnnnnnnnnnnnnnnnnnnnnnnnnnnnnnnnnnnnnnnnnnnnnnnnnnnnnnnnnnnnnnnnnnnnnnnnnnnnnnnnnnnnnnnnnnnnnnnnnnnnnnnnnnnaggatgtcttgtattatgagcagcttaagaccaatgtgatacaacatgacct

SEQ ID NO: 28383 - DNA, 755 bp, Macaca Mulatta
  misc_feature (1)...(755): n = A,T,C or G
aggccgctgcccagcagcaggagtcggccaccacacagaaggcagagaaggaggtcactcgcatggtcatcatcatggtcatcgctttcctgatctgctgggtgccctatgccagcgtggcattctacatcttcacccaccagggctccaacttcggtcccatcttcatgaccatcccagcgatatttgccaagagcgcctccatctacaaccctgtcatctatatcatgatgaacaagcannnnnnnnnnnnnnnnnnnnnnnnnnnnnnnnnnnnnnnnnnnnnnnnnnnnnnnnnnnnnnnnnnnnnnnnnnnnnnnnnnnnnnnnnnnnnnnnnnnnnnnnnnnnnnnnnnnnnnnnnnnnnnnnnnnnnnnnnnnnnnnnnnnnnnnnnnnnnnacaccctcccccagccacagccatcccaccaggagcagcgcctgtgcagaatgaacgaagtcacataggctcctnnnnnnnnnnnnnnnnnnnnnnnnnnnnnaatgaggctcctcactcacccgggacagcctgagaagggacatccaccaaccacctactgatctggagtcccaggttccccaaggccagtgggatctgtgcccctcctcctcccagctcatctttcaggaacatgaggattcttgctttctggaaaagtgtcccagcttagggataagtgtctagcacagaatggggcacacagtaggtgcttaataaatgctggatggatgcaggaaggaatggaggaatga

SEQ ID NO: 28384 - DNA, 1267 bp, Macaca Mulatta
  misc_feature (1)...(1267): n = A,T,C or G
ctcacgcccgcctaggagaagttagtagtcccagaggtggggcaggaggcggcagtttcaggcgggtcagggcggagctgaagcgacggcggaggcggaagcaacggtcggcggggcggagaagggggctggccccaggaggaggaggaaacccttcaaagaaaacagcaacaagctgagctgctgtgacagaggggaacaagatggcggcgccgaaggcgatcctctgggtcaggacccaactggggctgccgccgctgctgctgctgaccatggccttggccggaggttcggggaccgcttcggctgaagcatttgactcggtcttgggtgatacagcgtcttgccaccgggcctgtcagttgacctaccccttgcacacctaccctaaggaagaggagttgtacgcatgtcagagaggttgcaggctgttttcaatttgtcagtttgtggatgatggaattgacttaaatcgaactaaattggaatgtgaatctgcatgtacagaagcatattcccaatctgatgagcaatatgcttgccatcttggttgccagaatcagctgccattcgctgaactgagacaagaacaacttatgtccctgatgccaaaaatgcacctactctttcctctaactctggtgaggtcattctggagtgacatgatggactctgcacagagcttcataacctcttcatggactttttatcttcaagctgatgatggaaaaatagtcatattccagtctaagccagaaatccagtatgcaccacatttggaacaggagtctacaaatttgagagaatcatctctaagcaaaatgtcctatctgcaaatgagaaattcacaagcacacaggaattttcttgaagatggagaaagtgatggctttttaagaatgcctctctcttaactctgggtgggaattttaactacaactcttgtcctcctcggtgatggtatttgctttggatttgttgtgccactgttgctacagctgtgggacagtatgttccctctgagaagctgagtatctatggtggacttggagtttatgaatgaaacaaaggctgaacaaatattccgcttccttccccttgggggtggttagatctaanaactgaaaaatccttgaaaaaagcagggccctcttacctaccaaaagtggaatcttgcctcattccggaaaattttaagnnnnnnnnnnnnnnnnnnnnnnnnnnnnnattagacactctaaaaattcccctccccctaaaaaaaaat

SEQ ID NO: 28385 - DNA, 144 bp, Macaca Mulatta
gggctatgaggaggtttctcagaagttcacctccatacggcgagtccgtggtgataattactgtgcactgagggccacgctgttccaggccatgagccaggctgcggggctgccgctctggctgcaggatccagagctcatgct

SEQ ID NO: 28386 - DNA, 795 bp, Macaca Mulatta
  misc_feature (1)...(795): n = A,T,C or G
ggggagaagagctgatgacacatctggagatcgatcaatctggacagatactccagctgatagggaaaggaaagctaaggaaacacaagaagcaaggaagtcatccggtaagaaagatgaagaacatatattatcaggaagagataagagactggctgagcaggtatcttcatacaatgtaagtaagaaaataagatatatagagccaggtgtgatgactcttgnnnnnnnnnnnnnnnnnnnnnnnnnnnnnnnnnnnnnnnnnnnnnnnnnccaagagttcaagaccagcttgggcaacatagcaagaccttgtttctaaaaacatattttgttaatgagccaactgagttgtgaggatcacttgaaagcctccctgcnnnnnnnnnnnnnnnnnnagacaaaatatatagcccttttccccctatcttttagttctgtgtttatttttttctcttttgcttatttctctttcttttatatgtctacctctttaccatgtactttttatacatctatcctgaaataaactctgttgcatatatatatgtttttataaaattcttctgtgtttttcacagatatttccaattcacattttacatattaaattagcagaaatctaattattagagataggtagcacttgatgagagaaagcaagacccctgctcactcatggagatcttccatttataaatgtttacattataaacagacttgggatgttggatgtaaatattttaatatgggaagaaaaaacgtttttttgatgtagttcaatctaattttata

SEQ ID NO: 28387 - DNA, 257 bp, Macaca Mulatta
  misc_feature (1)...(257): n = A,T,C or G
gaggggttggttcccgtcgtcatacacgaagttgctggaagaaaatgagaccgaagcagtgactgtgcccacaccaannnnnnnnnnnnnnaagcatcagcaccgtgaacttgtctgagaacagcagtgttgtcatccccccacctgactacttggaatgcttgtccatgggggcagctgccgacaggagagcagacgcggccaggacgacatccacctttaaggccccagcgtccaagcccgagaccacagctcct

SEQ ID NO: 28388 - DNA, 1910 bp, Macaca Mulatta
  misc_feature (1)...(1910): n = A,T,C or G
caccatgcccacggagaccctacagacaggtagcatggtgaagccggtcagccccgcgggcaccttcacctctgccgtgcccctacgtatcctgaacaagggaccagactacttccgcaggcaggccgagcccaaccccaagaggctcagcgccgtggagaggctggaggccgacaaggccaagtacgtcaagagccaggaggtgatcaacgccaagcaggagcccgtaaagcccgccgtgctggccaagcccccggtgtgcccggctgccaagcgcgcgctgggcagccccacgctcaaagtatttggcaaccacgccaagaccgagagtggcgtgcagagggagaacctcaagctggagatcctgaagaatatcatcaatagctccgagggctccagctcgggctcggggcacaagcacagctcccgcaactggccaccccaccggtcggaaaccaccgacctgcaccgtcactccttcgcggagtccctgaaagtctatcccacgcagggccgcggcagcccgcaggagggcggctcccacgtgagcaggagactgctggagcagtcagccgagtccttcctccacgtgtcccacagctcttcggacatccgcaaggtgaccagcgtgaagcccttcaaggccatcccctgcagtagctctgcccctcccctgcctcccaagcccaaaatcgcagccatcgccaccatgaagtcccccgaggccgaccctgtggaaccagcttgtggagtcagccgaagaccctccctccagcggtctaagtcagacttgagtgacagatatttccgagtggacgcggacgtagagaggttcttcaactactgtggacggacccggaagannnnnnnnnnnnnnnnnnnnnnnnnnnnnnnnnnnnnnnnnnnnnnnnnnnnnnnnnnnnnnnnnnnnnnnnnnnnnnnnnnnnnnnnnnnnnnnnnnnnnnnnnnnnnnnnnnnnnnnnnnnnnnnnnnnnnnnnnnnnnnnnnnnnnnnnnnnnnnnnnnnnnnnnnnnnnnnnnnnnnnnnnnnnnnnnnnnnnnnnnnnnnnnnnnnnnnnnnnnnnnnnnnnnnnnnnnnnnnnnnnnnnnnnnnnnnnnnnnnnnnnnnnnnagggagggtgggtctctgtgcttacgcagttgtaaaggttgtgaggtctccttgaagtgttgtgagcttctccactctttgtgttgcttgttgtgcaatgttttcaagttgcatgcctgtcaacatggggactgacctggcttccacgtcaccatcgctgcagagcctggcctaacacgcgtcatctgccaaaagtttcaggccagaatctaattagggctttgctcttaagcaaaactgtttacatgaaaatggtatacgacttcttcaatatttatgtggttcttgtgtttttatatcccgcgctattatgtcttaattaaaagttttatcaactggcttttaagttgagcgcagaatctttttgaaataaaaagccactttgcctacatgtgagactattccaatgggacagtaaatgggatctgctaccaaacagatagtgactgaccacacatagaaccaggctgggttttctgtggaataaagtggtgagcctgacgttaatcgtttacatgttgaaattctcttgccacttagtgaagtgtcgctggggtaacaatgctaagttttgtgtccaattcagtgtgtaaatgttggtggttctgtgtaatgctgaccccaaggaaagacaatcagataaaatgaaggatggttaaatctaggaggttgggtgtttgggggttttgttgatgttgttctgatttgggatatttcagaaatttttaatactatcttttgacagaatggccaccctaaaacaaatactgaatgccttt

SEQ ID NO: 28389 - DNA, 801 bp, Macaca Mulatta
  misc_feature (1)...(801): n = A,T,C or G
ggcatgagaaaattcatactggggagaaaccgtatgcatgtaatgaatgtggtagagctttttctcgaatgtcatctgttacgctacatatgagaagtcacacgggggagaaaccctataaatgtaataaatgtggaaaagctttctctcaatgctcagtatttattatacatatgagaagtcacactggtgagaaaccctatgtatgtagcgaatgtgggaaagccttctctcaaagttcatcccttaccgtacatatgcgaaatcatacagctgagaaaccctatgaatgtaaggaatgtggaaaagccttcagcaggaaagaaaatctcattacacatcagaaaatnnnnnnnnnnnnnnnnnnnnntgaatgcagnnnnnnnnnnnnnnnnnntattcagatgtcaaacctcattcgacaccagagaattcatacgggtgagaaaccctatgcatgtacagtctgtggaaaagcctttagtcagaaatcaaacctcactgaacatgagaaaannnnnnnnnnnnnnnnnnnnnntcattgtaatcaatgtgggaaagctttcagtcagagacaaaatcttctttgacatganaaaattcatacgggagagaaaccattcaaatgtaatgaatgtgggtaagccttctctcgaatctcatccctcactcttcatgtgagaagtcacacagggggagaaaccctatgaatgttaataaatgtggggaaagccttttnnnnnnnnnnnnnnnnnnnnnnnnnnnnnnnnttgtcggccggncttcgggccctccaaaaaa

SEQ ID NO: 28390 - DNA, 437 bp, Macaca Mulatta
gttgcaatatggatatctttcaccctcccaggaaactattttaaacctaacccgtacttttgcatctgtataaaaatattagtgagatagaactgaaaataactgttctgctgacttgcagtgttgctgttaccttctgggtgtccagatttttcttccgtagatgttaatctcttttcatgtgcaatctttgcttcttttaggctatcgccccattccagcggagacttatgtaggagggaccttccctctacctcccccagttagtgacaggatgaggaaaagaagagcctttgctgataaagagttggagaacattatgctggagagagaatataaagaaagggagatgttggaaacttctcaagctgctgctctgtttctgcccaaccgcatagtgcctggacctgactataactcctacaaaagtgcctaca

SEQ ID NO: 28391 - DNA, 479 bp, Macaca Mulatta
catggttccgttgagcactgggtggaggagagagccccccatgagtcccagtacccttccctggctactccttgccatatctcagggttccaaagctccccgctcccccttgcaccctccccctcccaccactcactcaggatggtcagggcagagcagcggatgtacttgttttctgtcatctcagcatagagtgaccccatggcagcccagcagatgctgatcacctgggagaactgtaggcccatctagtgggagagtggccccctgacacaacagtggggtttccatcagccccccgggcctcccgcagccagcccttgcgtccctgccccgagcctaccatcaggacgaccgtgtagtgaaagctcatgcgttcgtagtggtgggtgatgcagaagttgtgcacgtcgctgatgaagatgcccaggtgtaagaagaagagcatcagtgcagccgtggtgagcatcatgcctttt

SEQ ID NO: 28392 - DNA, 953 bp, Macaca Mulatta
  misc_feature (1)...(953): n = A,T,C or G
gaggaacaaattctgaaacgtgtgcggaggaagattcgaaataaaagatctgctcaagagagccgcaggaaaaagaaggtgtatgttgggggtttagagagcagnnnnnnnnnnnnnnnnnnnnnnnnnnnnnnnnnnnnnnnnnnnnnnnnnnnnnnnnnnnnnnnnnnnnnnnnnnnnnnnnnnnnnnnnnnnnnnnnnnnnnnnnnnnnnnnnnnnnnnnnnnnnnnnnnnnnnnnnnnnnnnnnnnnnnnnnnnnnnnnnnnnnnnnnnnnnnnnnnnnnnnnnnnnnnnnnnnnnnnnnnnnnnnnnnnnnnnnnnnnnnnnnnnnnnnnnnnnnnnnnnnnnnnnnnnnnnnnnnnnnnnnnnnnnnnnnnnnnnnnnnnnnnnnnnnnnnnnnnnnnnnnnnnnnnnnnnnnnnnnnnnnnnnnnnnnnnnnnnnnnggacagctcagaccacgtactccaggcccctggcaactcttcctgcttactgcactacatgcctcaggctcccagtgcagagcctcccctggagtggccattccctgacctcttctcagagcctctctgccgaggtcccatcctccccctgcaggcaaatctcacaaggaaggggggatggcttcctaccggtagnnnnnnnnnnnnnnnnnnnnnnnnnnnnnnnnnnnnnnnnnnnnnnnnnnnnnnnnnnnnnnnnnnnnnnnnnnnnnnnnnnnnnnnnnnnnnnnnnnnnnnnnnnnnnnnnnnnnnnnnnnnnnnnnnnnnnnnnnnnnnnnnnnnnnnnnnnnnnnnnnnnnnnnnnnnnnnnnnnnnnnnnnnnnnnnnnnnnnnnnnnnnnnnnnnnnnnnnnnnnnnnnnnnnnnnnnnnnnnnnnnnnnnnnnnnnnnnnnnnnnnnnngcagtgagggaacgggtgaggaaagaaataaataagtgattctaatgct

SEQ ID NO: 28393 - DNA, 914 bp, Macaca Mulatta
  misc_feature (1)...(914): n = A,T,C or G
gtctcatgcacaaagagatgaaagattctcntgaggaaaatcttcaggactggaaagggtgtttataaataagagataatttccatttatcaaatggaacttaattagacatgaatatttgtctacagaatcattgttttatttaagaactgctataataatgacccactaacatcttaaacaccactaaccataatttgcaatactatggtcttaagaagaaagcttcaacggtgaattagattttgtgttgaagtgaataaaaagcatgtaaaattctgtgtctaagctaatcagaacctctatatgtaattcaacttttaaaaaaaaatacagatgtccattttgtattactgagctaaagcaattgataacacatgtaacagatatcgtagactgctcccacaatttacactgtaattccataattgtccaccaggacatactggctgaaaaagagtcaagtttttagatgttcatcttgtcaaaatgtagcaagtgggctttacattatggaaatagattaatagccttagtttgatattcagtgttttttcagagagtacacaaaacaagaattaggaatttaaagcagtttagttacctggaatatagtgcaggtaagacctaaacaaaaaggtgagcactactcaggctatagcttgctttgctgtanacccagtttanacacaggttttgatatcataattaatttagtattaatactttgtgacttgtgtactgctaggcagtactanaatanaatttctaaatccattttataaatatttgactaaacatatgctttgattntgatctttgctttgntctatggcccatttttcccaatacnactctcaaaaactgatgaaaaggatcacatatgaatgtatttacagaattttanttngtag

SEQ ID NO: 28394 - DNA, 164 bp, Macaca Mulatta
agggtttagtaacttcagtaatttgaaggagcacaaaaagacacacacggctgataaagtcttcacctgtgatgagtgtggaaagtcttttaatatgcaaaggaagttagtaaagcacagaattcggcacacgggggagcggccttacagctgctctgcctgcg

SEQ ID NO: 28395 - DNA, 450 bp, Macaca Mulatta
  misc_feature (1)...(450): n = A,T,C or G
ggggctcttcctgcggctgaaccgcccggctgagccgacattgtcggcgtcttagcgattcggtccgacgcgctccactttcgctacagcatggtggcctactggcgacaggctggactcagctacatccgatactcccagatctgtgcaaaagcagtcagagatgcactgaagacagaattcaaagcaaatgccgagaaggcttctggcagcagcgtcaaaattgtgaaagtaaagaaggaataatctaccctgactaaagcttgaaatgctacatttccaaggtgaagatgtgtgggcacatgttatggcagattgaaaaggatctcatttcnnnnnnnnnnnnnnnnnnnntgtcttgttcataaattgacaatgtcaataaattgaagtatggttcactgtaaattagccagagatggtggatgtgcctcttgtccggtaaccaaa

SEQ ID NO: 28396 - DNA, 127 bp, Macaca Mulatta
agattagagctggaactgaggcctacaggagaagttgagcagtattctgtcagtgcaacctatgagctccagagagaggacagagccttggtggacaccctgaagtttgtaactcaagcagaaggtg

SEQ ID NO: 28397 - DNA, 164 bp, Macaca Mulatta
ggtgaacattattcccatcatcgccaaggctgataccatctccaagagcgagctccacaagttcaagatcaagatcatgggcgagctggtcagcaacggggtccagatctaccagtttcccacggatgacgaggctgttgcagagattaacgcagtcatgaatg

SEQ ID NO: 28398 - DNA, 214 bp, Macaca Mulatta
agacttttccctcattatcattgatgaatgtcatcacaccaacaaagaagcagtgtataataacatcatgaggcgttatttgatgcagaagttgaaaaacaatagactcaagaaagaaaacaagccagtgattcctcttcctcagatgctgggactaacagcttcacctggtgttggaggggccacaaagcaagctaaagccgaagaacacatt

SEQ ID NO: 28399 - DNA, 2335 bp, Macaca Mulatta
  misc_feature (1)...(2335): n = A,T,C or G
ggagagggagctcgccggtcggggctagggaaggctgacccagctcggcccgggtgaaagggcggcgacggcactgggtggggccgagctccagggttggctgctgggctgctaagagaactgtgagccgctcggaaccgcgcgcctctcgggcggggcggggccggctgagggagtccgcgcgtgcccgcgccgagctgcctgctctggcggcttcgctgctagctcgcggcgacgtcgggccggtttttccaggatgaccgagctgaggcannnnnnnnnnnnnnnnnnnnnnnnnnnnnnnnnnnnnnaggagtcagagtcagaagcaaaggtagatggagagactgcatcggacagtgaaagccgggcagaatctgcacccctgccagtctctgcagatgataccccggaggtcctcaatagggccctttccaacttgtcttcaannnnnnnnnnnnnnnnnnnnnnnnnnnnnnnnnnnnnnnnnnnnnnnnnnnnnnnnnnnnnnnnnnnnnnnnnnnnnnnnnnnnnnnnnnnnnnnnnnnnnnnnnnnnnnnnnnnnnnnnnnnnnnnnnnnnnnnnnnnnnnnnnnnnnnnnnnnnnnnnnnnnnnnnnnnnnnnnnnnnnnnnnnnnnnnnnnggtactttctcctgtgtgtaaactatttcttctatggtgagacagtgacggattacttcttcaccctggtccagagagaagagcctttgcggattctcagtaaataccaccggttcatttcctttactctctatctaatagnnnnnnnnnnnnnnnnnnnnnnnnnnnnnnnnnnnnnnnnnnnnnnnnnnnnnnnnntttggctggacccatgtgacgctgctgattgttgtaacacagtcacatcttgttatccacaacctatttgaaggaatgatctggtnnnnnnnnnnnnnnnnnnnnnnnnnnnnnnnnnnnnnnnnnnnnnnnnnnnnnnnnnnnnnnnnnnnnnnnnnnnnnnnnnnnnnnnnnnnnnnnnnnnnnnnnnnnnnnnnnnnnnnnnnnnnnnnnnnnnnnnnnnnnnnnnnnnnnnnnnnnnnnnnnnnnnnnnnnnnnnnnnnnnnnnnnnnnnnnnnnnnnnnnnnnnnnnnnnnnnnnnnnnnnnnnnnnnnnnnnnnnnnnnnnnnnnnnnnnnnnnnnnnnnnnnnnnnnnnnnnnnnnnnnnnnnnnnnnnnnnnnnnnnnnnnnnnnnnnnnnnnnnnnnnnnnnnnnnnnnnnnnnnnnnnnnnnnnnnnnnnnnnnnnnnnnnnnnnnnnnnnnnnnnnnnnnnnnnnnnnnnnnnnnnnnnnnnnnnnnnnnnnnnnnnnnnnnnnnnnnnnnnnnnnnnnnnnnnnnnnnnnnnnnnnnnnnnnnnnnnnnnnnnnnnnnnnnnnnnnnnnnnnnnnnnnnnnnnnnnnnnnnnnnnnnnnnnnnnnnnnnnnnnnnnnaagcaaactgattcagcagttcctgaccttacggccagatcagcagctccatatcttcaacacgctgcggtctcatctgatcgacaaggggatgctgacatccgccacagaggacgagtaggggccacccagggccaaaagaacaggagtggaactgagcaggggcaggtctccaaggcaagcccagctggtgtgacttagacaatgatgaggcttcaactcactgtnnnnnnnnnnnnnnnnnnnnnntattttttatttgtgggttcaacaaatctgtacatacagcagtctatgtgtttagaatttgcgttgtgagtaaactacagctttgagttggaaagaagtcatgggttgtaaaaccatttggattttttaaaacaaaagtgtttatctggaagacagtgttgcccaggtcaggagtgttttcttggtggttccagctcctatcaattgaactgtttctgggctcagtcaaacacagacattcatctgtgtccaaccaaatcaggggacttccccacctgtggggggaggcacagcttggatgttttgtacacctagtcttttctagaaatcactgcttagagctgcaggagagttgccttctgtaggttggaggaatggaggcttactaaccagataagccttctgtccatccacaccaaaatcctgcagaatgtaaataagctctgctttataagatgggttcaccttcatcacagactgaannnnnnnnnnnnnnnnnnnncagaaagcacgaaaaattatttatagtagtctggagaaaaaacacactgtaatatttcaagtgtatgcagtagaatgtactgtaactgagccctttcccacatgtctaggctcc

SEQ ID NO: 28400 - DNA, 345 bp, Macaca Mulatta
aataaaataaacccatcacatttggaacataactgctcatctgacttgctggtggtggttttcttacctttgatgtgatgtgttttaagaagcactttcacaggcgagatttgtgtctaaagtgtcggggctgccgccagtccctttcacttcactgagccctgctctgtctgctcttgctctcacagggcaggctgaggaaggaagcagtgaacatggttgtgctggggagcggcacatctgttgtgcttgtggtgtgatagggtcgcatcaccccaggagttgtgtgcagctgctgagaaagtgtgggtgtgagtgggtgaaaagatggttgagggaagagtg

SEQ ID NO: 28401 - DNA, 1848 bp, Macaca Mulatta
  misc_feature (1)...(1848): n = A,T,C or G
agaatgtgaatggcataaaatatcacgctaagaatggtcacagaacacagattcgtgtccgcaaaccattcaaatgtcgctgtgggaagagttacaagacagctcagggcctgcggcaccacacaatcaatttccatcccccggtgtcggctgagatcatcaggaagatgcagcaatannnnnnnnnnnnnnnnnnnnnnnnnnnnnnnnnnnnnnnnnnnnnnnnnnnnnnnnnnnnnnnnnnnnnnnnnnnnnnnnnnnnnnnnnnnnnnnnnnnnnnnnnnnnnnnnnnnnnnnnnnnnnnnnnnnnnnnnnnnnnnnnnnnnnnnnnnnnnnnnnnnnnnnnnnnnnnnnnnnnnnnnnnnnnnnnnnnnnnnnnnnnnnnnnnnnnnnnnnnnnnnnnnnnnnnnnnnnnnnnnnnnnnnnnnnnnnnnnnnnnnnnnnnnnnnnnnnnnnnnnnnnnnnnnnnnnnnnnnnnnnnnnnnnnnnnnnnnnnnnnnnnnnnnnnnnnnnnnnnnnnnnnnnnnnnnnnnnnnnnnnnnnnnnnnnnnnnnnnnnnnnnnnnnnnnnnnnnnnnnnnnnnnnnnnnnnnnnnnnnnnnnnnnnnnnnnnnnnnnnnnnnnnnnnnnnnnnnnnnnnnnnnnnnnnnnnnnnnnnnnnnnnnnnnnnnnnnnnnnnnnnnnnnnnnnnnnnnnnnnnnnnnnnnnnnnnnnnnnnnnnnnnnnnnnnnnnnnnnnnnnnnnnnnnnnnnnnnnnnnnnnnnnnnnnnnnnnnnnnnnnnnnnnnnnnnnnnnnnnnnnnnnnnnnnnnnnnnnnnnnnnnnnnnnnnnnnnnnnnnnnnnnnnnnnnnnnnnnnnnnnnnnnnnnnnnnnnnnnnnnnnnnnnnnnnnnnnnnnnnnnnnnnnnnnnnnnnnnnnnnnnnnnnnnnnnnnnnnnnnnnnnnnnnnnnnnnnnnnnnnnnnnnnnnnnnnnnnnnnnnnnnnnnnnnnnnnnnnnnnnnnnnnnnnnnnnnnnnnnnnnnnnnnnnnnnnnnnnnnnnnnnnnnnnnnnnnnnnnnnnnnnnnnnnnnnnnnnnnnnnnnnnnnnnnnnnnnnnnnnnnnnnnnnnnnnnnnnnnnnnnnnnnnnnnnnnnnnnnnnnnnnnnnnnnnnnnnnnnnnnnnnnnnnnnnnnnnnnnnnnnnnnnnnnnnnnnnnnnnnnnnnnnnnnnnnnnnnnnnnnnnnnnnnnnnnnnnnnnnnnnnnnnnnnnnnnnnnnnnnnnnnnnnnnnnntttttaaaaggcacttttctcatcacattgtagagaggtctgcgttctcattggaaatgtctgtttagctttataaaacactttgctgaaatatgaaaatgagccttattgacaattaagtgcttcttgcagcaggtggtcaaagaaaagcgtgactaatctgacccgttagagtaacgtacacctggaccattcctgaagtttttcctcaccgacagtaccatcatgccttgagtgttcttttctcccaagtgctattccttaaacatgagagtttaccagttgcctaattatgcaataaaaaatgcttcaagatagctaactgcccataaaacaaactcaaattgcttattaaaaagtttcttcccatgttcccatttgatgaaaagtcttacgtaacatatagctgggaagcaggggtccctcctcaattttcaaacattttgaaaggatgacaattctgttagccagatgagtaaacctctgtattcattaagttctgaatctctcataatgagggattttaaagtatttataaatacactgccctctaaaaatttcctcagatctaaagtatg

SEQ ID NO: 28402 - DNA, 311 bp, Macaca Mulatta
tctctggcagccacagctgtgtgctcagtcagtgcactgggcaagctggaagtgtcggggggttaatgtctccaggagcaaccctgagtcaataaggagcaggacctcagcttcactgtccttgagcaggacaattctgaagtgtattctacataaactctcagaggatgcccagcaggatggcgtcccagttgctcacagcagtaacccactcattcatgtacttcctgcaggggctcctcccttccctctcttccccactccccacttgggcttcctgggatggctcccaaataaacctcttgcaccca

SEQ ID NO: 28403 - DNA, 1154 bp, Macaca Mulatta
  misc_feature (1)...(1154): n = A,T,C or G
gggacgcccagaggatcgaggagctctttgccaagaaccaccagctccgggaacagcagaagacactgaaggagaaccttcgggtgctggaaaacagnnnnnnnnnnnnnnnnnnnnnnnnnnnnnnnnnnnnnnnnnnnnnnnnnnnnnnnnnnnnnnnnnnnnnnnnnnnnnnnnnnnnnnnnnnnnnnnnnnnnnnnnnnnnnnnnnnnnnnnnnnnnnnnnnnnnnnnnnnnnnnnnnnnnnnnnnnnnnnnnnnnnnnnnnnnnnnnnnnnnnnnnnnnnnnnnnnnnnnnnnnnnnnnnnnnnnnnnnnnnnnnnnnnnnnnnnnnnnnnnnnnnnnnnnnnnnnnnnnnnnnnnnnnnnnnnnnnnnnnnnnnnnnnnnnnnnnnnnnnnnnnnnnnnnnnnnnnnnnnnnnnnnnnnnnnnnnnnnnnnnnnnnnnnnnnnnnnnnnnnnnnnnnnnnnnnnnnnnnnnnnnnnnnnnnnnnnnnnnnnnnnnnnnnnnnnnnnnnnnnnnnnnnnnnnnnnnnnnnnnnnnnnnnnnnnnnnnnnnnnnnnnnnnnnnnnnnnnnnnnnnnnnnnnnnnnnnnnnnnnnnnnnnnnnnnnnnnnnnnnnnnnnnnnnnnnnnnnnnnnnnnnnnnnnnnnnnnnnnnnnnnnnnnnnnnnnnnnnnnnnnnnnnnnnnnnnnnnnnnnnnnnnnnnnnnnnnnnnnnnnnnnnnnnnnnnnnnnnnnnnnnnnnnnnnnnnnnnnnnnnnnctctgcctcctaaaccgccccctctccctgcannnnnnnnnnnnnnnnnnnnnnnnnnnnnnnnnnnnnnnnnnnnnnnnnnnnnnnnnctccaggacctgaaggccggagaagcagaggcctgggaggagcctatagaactgctaaaaaaaaacaatgccctggcgggcatgcaggaccttcgcctggagggggcactacacctgctcctggcccagcagcagctgcgggctcgggccagggtaggcagtgtcaggccaaggggccagcccacacccagggagatgccgccctccccaccagtcggctcagactctgagggccctgagagtgaggggaccagggcagctaaagccacagcagcaggcctgcctggagggcggcacacacagcc

SEQ ID NO: 28404 - DNA, 372 bp, Macaca Mulatta
  misc_feature (1)...(372): n = A,T,C or G
tatgcaacagaacaaaacaacggtaaaattgtcatcattcagttgaacccttacaccctacggatcgaaggaacatggtatactgcatatgataaaaggtcagcttccaatgcctttatgatttgtggaattctgtatgtggtcaaatctgtatatgaggatgatgacaatgaggccactggaaataagattgactacatttacaacactgaccaaagcaaggatagtttggtggatgtaccctttcccaattcataccagtacattgcagctgtggattacaaccccagggacaacctgctttatgtatggaataactatcatgtcgtgaaatattctttggattttggaccgctggatagtagatcaggn

SEQ ID NO: 28405 - DNA, 833 bp, Macaca Mulatta
  misc_feature (1)...(833): n = A,T,C or G
tcagtatttcaactgaagttctatttatttgtgagactgtaagttacatgaaggcagcagaatattgtgccccatgcttctttacccctcacaatccttgccacaatgtggggcagtggatgggtgctcagtaagtacttaataaactgtggtggtttttttggtctgtctttggattgttaaaaaacagagagggatgatggcatgtaaaactgaactttagagtgtgaaaatcacactgtcttctgatatctgcagggacagagcattgggctgggggtaaggtgcatcggtttgaaaagcaaatgataaaatgtggattaaagtgcccagtacaaagcagatcctcactaaacatttcatttcccacccacactcaccaacccaccccatcatccctttcccttggtgccnnnnnnnnnnnnnnnnnnnctagtcattcttccctaatgtgccacttgagtgtcaagctgaccttgctgatggtgacattgcacttggatgtaccatccaatctgtgatgacattccctgctaataaaagacaacacaactcaagtctggcagcctttcttctctatttctggatgaatgcccagtgagactgtgcagtatagccagaagaggccttcttcccagcagcaaagctcggcatctagcctcaagctctggctgaactttgtggtcgacatcaatctaaagatataatgtctgactatgaccttgttccaaaaacttagaccaatagtatatgtaggaggtgggatatctcttcttccatgacataagtgctacccaggatttcttattgatttccttcggccacattgtctg

SEQ ID NO: 28406 - DNA, 848 bp, Macaca Mulatta
ggggaaggggccagtctggagacagtcaaggtagggaagacatacgagctactcaactgtgacaagcacaagtctatattgttgaagaatggacgggaccctggggaagtgcggccagacatcgcccaccagagtttgctgatgctgatggatagtcccctgaaccgagctggcttgctacaggtttatatccatacacagaagaatgttctgattgaagtgaatccccagacccgaattcccagaacctttgaccgcttttgtggcctcatggttcaacttttacacaagctcagtgttcgagcagctgatggcccccagaagctcttgaaggtaattaagaatccagtatcagatcactttccagttggatgtatgaaagttggcacttctttttccatcccggtttgcagttgacgtgcgtgagctggtgcccaacagtgatcccattgttttttgtggcaggggcctttgccccatggccaggtcatttgtgggaattttacagagaaaatgggggtccttccgcaacctatcccctttcttgcttgccctcgcctgtgctaaaactttactattccctttttaagaaaatatgggggggtctcttttgaacgtaaattaacacccgttttttgaaaccataaatccggttggaggtccccatccctttgaacccctgtgccagagaacctacatgcccgggataaaataattcttttcctgccccttatgaattgaagtaatgttttagggtaaagcaaaagatttggtaaagattggctcttattcttattaccctcattaacttcctgtcttattgcctagaaatatataacaagaaaaac

SEQ ID NO: 28407 - DNA, 1895 bp, Macaca Mulatta
  misc_feature (1)...(1895): n = A,T,C or G
tagagactgtagccgtggagactgttacttaccaacgggtaccaacacgcagcagccgctgccgccgccgcgggagccgctgcccgaactcccggcccgaactccagnnnnnnnnnnnnnnnnnnnnnnnnnnnnnnnnnnnnnnnnnnnnnnnnnnnnnnnnnnnnnnnnnnnnnnnnnnnnnnnnnnnnnnnnnnnnnnnnnnnnnnnnnnnnnnnnnnnnnnnnnnnnnnnnnnnnnnnnnnnnnnnnnnnnnnnnnnnnnnnnnnnnnnnnnnnnnnnnnnnnnnnnnaggtgcagccagcgcagcacgtgtatcctgcccaggtgcagtacgtggaagggggagacgccgtctacacgaatggagccatnnnnnnnnnnnnnnnnnnnnnnnnnnnnnnnnnnnnnnnnnnnnnnnnnnnnnnnnnnnnnnnnnnnnnnnnnnnnnnnnnnnnnnnnnnnnnnnnnnnnnnnnnnnnnnnnnnnnnnnnnnnnnnnnnnnnnnnnnnnnnnnnnnnnnnnnnnnnnnnnnnnnnnnnnnnnnnnnnnnnnnnnnnnnnnnnnnnnnnnnnnnnnnnnnnnnnnnnnnnnnnnnnnnnnnnnnnnnnnnnnnnnnnnnnnnnnnnnnnnnngctccagtggctgttggataattatgaaactgcggaaggtgtgagtctccccagaagttctctttacaaccactaccttcggcactgccaggagcacaagctggacccggtgaacgctgcctccttcgggaaactgatccgttctgtgtttatggggctgaggacacggcggctgggcaccagnnnnnnnnnnnnnnnnnnnnnnnnnnnnnnnnnnnnnnnnnnnnnnnnnnnnnnnnnnnnnnnnnnnnnnnnnnnnnnnnnnnnnnnnnnnnnnnnnnnnnnnnnnnnnnnnnnnnnnnnnnnnnnnnnnnnnnnnnnnnnnnnnnnnnnnnnnnnnnnnnnnnnnnnnnnnnnnnnnnnnnnnnnnnnnnnnnnnnnnnnnnnnnnnnnnnnnnnnnnnnnnnnnnnnnnnnnnnnnnnnnnnnnnnnnnnnnnnnnnnnnnnnnnnnnnnnnnnnnnnnnnnnnnnnnnnnnnnnnnnnnnnnnnnnnnnnnnnnnnnnnnnnnnnnnnnnnnnnnnnnnnnnnnnnnnnnnnnnnnnnnnnnnnnnnnnnnnnnnnnnnnnnnnnnnnnnnnnnnnnnnnnnnnnnnnnnnnnnnnnnnnnnnnnnnnnnnnnnnnnnnnnnnnnnnnnnnnnnnnnnnnncagtgacgaagaccccgagggcgccgtcctgcccaaggacaagctcatctccctgtgtcaatgcgaccccatcctcaggtggatgaggagctgcgaccacatcctctaccaggcgctggtggagattctcatccccgacgtgctgaggccggtccccagtnnnnnnnnnnnnnnnnnnnnnnnnnnnnnnnnnnnnnnnnnnnnnnnnnnnnnnnnnnnnnnnnnnnnnnnnnnnnnnnnnnnnnnnnnnnnnnnnnnnnnnnnnnnnnnnnnnnnnnnnnnnnnnnnnnnnnnnnnnnnnnnnnnnnnnnnnnnnnnnnnnnnnnnnnnnnnnnnnnnnnnnnnnnnnnnnnnnnnnnnnnnnnnnnnnnnnnnnnnnnnnnnnnnnnnnnnnnnnnnnnncaggagcaggcctcgtgggtgtgccagtgtgaggagagtgtggtgcagcggctggagcaggatttcaagctgaccctgcagcagcagagctccctggaccagtgggccagctggctggacagcgtggtcacccaggtcctgaagcagcatgccggcagccccagcttccccaaggccgcccggcagttcctgctgaaatggtccttttaca

SEQ ID NO: 28408 - DNA, 563 bp, Macaca Mulatta
  misc_feature (1)...(563): n = A,T,C or G
gggattggagctctcccgtgtcggcttgtagcccagaaggtgaagaacctgctgtggggccagggcttcccagattatgtggccccttttggaaattcgcaggcccaggatgtgctggactgggtgcccatccacttcatcacccagtcattcaacaggaaggattcctgccagctcccaggggctttggttatagaagtgaagtggaccaaatacggatccctactgaatccacaggccaaaatagtcaatgtaactgcaaatctaatttcatcctcctttcctgaggtcagctcaggaaatgaaaggacgattcttatttctactgcggttacttttgtggatgtgtctgcacctgcagaggcaggcttcagagctccgccagccatcaatgccaggctgccctttaacttcttcttcccgtttgtttgacaatgctcatatgaaaggatacatcaattccttaatatacatgtgaaatttgaaaactgtacattcgatgcgactaaattttatatacaactannnnnnnnnnnnnnnnnnnnnnnnnnnnnnnnnnnnnn

SEQ ID NO: 28409 - DNA, 278 bp, Macaca Mulatta
catgttaattctcgagaactaagcctgtgccagtgctttcctaagcagtatacctttaatcagaactcattcccagagcctggatgctattacacatgcttttaagaaatgtcaatgtatgtcctttaataactctaccactttggagcaagctattccagcattggttttgaatgctgtatgcaaccagtcagaataccacgtacgctgcactgttcttagagtgtttccatacttaccaccgatctacaagggttgatccctgtttttaccatcac

SEQ ID NO: 28410 - DNA, 590 bp, Macaca Mulatta
tctgagatcagagcacagctcagcagcaccaggctgaattccccatgggtcctgtgacctcagcccacgcggggacctacaggtgctacagctcactcagctccaacccctacctgctgtctcaccccagtgaccccctggagctcgtggtctcagggcacaggaagtctgacataattaatgaggagactggagggaaccctgctacagcagaggaagggtttctgaggaactccataaaactcatgtcaagagacacaggggaagagaagaatgcagagcccaggagtgaggctggcctcagggctcttctccactgttttgattctcaggagaagctgagaccctcagcccatcacaaaaccagacagattccaagactggccaacacccacaggattacacagtggagaatctcatccgcatgggcgtggctggcttggtcctggtggtcctcgggattctgctatttgaggctcagcacagccagagaagcccccaagatgcagccggccggtgaacagcagagatgacaatgctcccttcagagtggtggagcctcaggaacagatctgatgatcccaggaagt

SEQ ID NO: 28411 - DNA, 103 bp, Macaca Mulatta
cctaggaccctgtgggccaagaggtaagccaggcaaggatggaaaaccaggaactcctggaccagctggagaaaaaggcaacaaaggttctaaaggagagcca

SEQ ID NO: 28412 - DNA, 220 bp, Macaca Mulatta
gcttcctcctcccctcggttttacccagcttgcgctccccagccgcaagtcggccgcgctttacccttcagcgcttggagggttctgcgtcccttcccgctgcgcctgcgcggtcccgcctcgccccacgcgcgggctcgcgcttcggttctcccagatctgctctcagcatccggctcttttctcgctccggcccgctgcccgctgcgccagcaccatg

SEQ ID NO: 28413 - DNA, 951 bp, Macaca Mulatta
  misc_feature (1)...(951): n = A,T,C or G
tgaatcttatagaaattggatgttctaaaaaattaggaaaaaaaaaatgaaatatttaatccctcatttggaatagctccctgagtttgaaatcacatttcatatgcaaaaataattttttaggtcagaatgctgtatttttaaccacagatgctgaccttgaccttgactggtgaatatttccaggcaccgtatggatgaacaggaacagatgccaattcagtttgccaaattctgatatatgccctacctggcttgtgaaaattttttaagtatctcttaacccccaaacctccctggttctctgaaaccgaccgtcttaatctgattcccaatacnnnnnnnnnnnnnnnnnnntattccctgaaagatcatacatataagtatttgttgcctgtgaatagatacagagaaaccaagtacaaatgtgcattaacaattcagcgatgtagctgtggatctctggatggctatgcaagctgtgagaaagtcccccactggctttgcacttgctgcgcaccagaggcgaccatccaggcagcatcaacctgaagatggggtgaatcccagcagctgctcgatgggcttaaaccgccactcgtcagcctccagctcttctaccaaaccagctagtttttccatccgagcaacttgctgatcatgtttcacctgtttaagcgtggatgccacttgatagctaaaaacagattcgcagaggaatctctcagagccatcttctaacatctctccagctactttggggtaggtgaaaagggctttccgtggtggggcaaggtctgagacactgaaaccagatccagtgacagaacttccactgaccccaccagctgaagaggatgatgatgaagcagccatttcctctctagcagagttcttacttcactcagcggctttagcactttcccctacagccccgcccccaggaccccc

SEQ ID NO: 28414 - DNA, 2993 bp, Macaca Mulatta
  misc_feature (1)...(2993): n = A,T,C or G
tgcaggatctgtggcatccagcacctggagcgggcaggcgagaacctgtccctcctgacctccttctacttctgcgtcgtcaccttctccaccgtggggtacggcgatgtcacgcccaagatcaggccnnnnnnnnnnnnnnnnnnnnnnnnnnnnnnnnnnnnnnnnnnnnnnnnnnnnnnnnnnnnnnnnnnnnnnnnnnnnnnnnnnnnnnnnnnnnnnnnnnnnnnnnnnnnnnnnnnnnnnnnnnnnnnnnnnnnnnnnnnnnnnnnnnnnnnnnnnnnnnnnnnnnnnnnnnnnnnnnnnnnnnnnnnnnnnnnnnnnnnnnnnnnnnnnnnnnnnnnnnnnnnnnnnnnnnnnnnnnnnnnnnnnnnnnnnnnnnnnnnnnnnnnnnnnnnnnnnnnnnnnnnnnnnnnnnnnnnnnnnnnnnnnnnnnnnnnnnnnnnnnnnnnnnnnnnnnnnnnnnnnnnnnnnnnnnnnnnnnnnnnnnnnnnnnnnnnnnnnnnnnnnnnnnnnnnnnnnnnnnnnnnnnnnnnnnnnnnnnnnnnnnnnnnnnnnnnnnnnnnnnnnnnnnnnnnnnnnnnnnnnnnnnnnnnnnnnnnnnnnnnnnnnnnnnnnnnnnnnnnnnnnnnnnnnnnnnnnnnnnnnnnnnnnnnnnnnnnnnnnnnnnnnnnnnnnnnnnnnnnnnnnnnnnnnnnnnnnnnnnnnnnnnnnnnnnnnnnnnnnnnnnnnnnnnnnnnnnnnnnnnnnnnnnnnnnnnnnnnnnnnnnnnnnnnnnnnnnnnnnnnnnnnnnnnnnnnnnnnnnnnnnnnnnnnnnnnnnnnnnnnnnnnnnnnnnnnnnnnnnnnnnnnnnnnnnnnnnnnnnnnnnnnnnnnnnnnnnnnnnnnnnnnnnnnnnnnnnnnnnnnnnnnnnnnnnnnnnnnnnnnnnnnnnnnnnnnnnnnnnnnnnnnnnnnnnnnnnnnnnnnnnnnnnnnnnnnnnnnnnnnnnnnnnnnnnnnnnnnnnnnnnnnnnnnnnnnnnnnnnnnnnnnnnnnnnnnnnnnnnnnnnnnnnnnnnnnnnnnnnnnnnnnnnnnnnnnnnnnnnnnnnnnnnnnnnnnnnnnnnnnnnnnnnnnnnnnnnnnnnnnnnnnnnnnnnnnnnnnnnnnnnnnnnnnnnnnnnnnnnnnnnnnnnnnnnnnnnnnnnnnnnnnnnnnnnnnnnnnnnnnnnnnnnnnnnnnnnnnnnnnnnnnnnnnnnnnnnnnnnnnnnnnnnnnnnnnnnnnnnnnnnnnnnnnnnnnnnnnnnnnnnnnnnnnnnnnnnnnnnnnnnnnnnnnnnnnnnnnnnnnnnnnnnnnnnnnnnnnnnnnnnnnnnnnnnnnnnnnnnnnnnnnnnnnnnnnnnnnnnnnnnnnnnnnnnnnnnnnnnnnnnnnnnnnnnnnnnnnnnnnnnnnnnnnnnnnnnnnnnnnnnnnnnnnnnnnnnnnnnnnnnnnnnnnnnnnnnnnnnnnnnnnnnnnnnnnnnnnnnnnnnnnnnnnnnnnnnnnnnnnnnnnnnnnnnnnnnnnnnnnnnnnnnnnnnnnnnnnnnnnnnnnnnnnnnnnnnnnnnnnnnnnnnnnnnnnnnnnnnnnnnnnnnnnnnnnnnnnnnnnnnnnnnnnnnnnnnnnnnnnnnnnnnnnnnnnnnnnnnnnnnnnnnnnnnnnnnnnnnnnnnnnnnnnnnnnnnnnnnnnnnnnnnnnnnnnnnnnnnnnnnnnnnnnnnnnnnnnnnnnnnnnnnnnnnnnnnnnnnnnnnnnnnnnnnnnnnnnnnnnnnnnnnnnnnnnnnnnnnnnnnnnnnnnnnnnnnnnnnnnnnnnnnnnnnnnnnnnnnnnnnnnnnnnnnnnnnnnnnnnnnnnnnnnnnnnnnnnnnnnnnnnnnnnnnnnnnnnnnnnnnnnnnnnnnnnnnnnnnnnnnnnnnnnnnnnnnnnnnnnnnnnnnnnnnnnnnnnnnnnnnnnnnnnnnnnnnnnnnnnnnnnnnnnnnnnnnnnnnnnnnnnnnnnnnnnnnnnnnnnnnnnnnnnnnnnnnnnnnnnnnnnnnnnnnnnnnnnnnnnnnnnnnnnnnnnnnnnnnnnnnnnnnnnnnnnnnnnnnnnnnnnnnnnnnnnnnnnnnnnnnnnnnnnnnnnnnnnnnnnnnnnnnnnnnnnnnnnnnnnnnnnnnnnnnnnnnnnnnnnnnnnnnnnnnnnnnnnnnnnnnnnnnnnnnnnnnnnnnnnnnnnnnnnnnnnnnnnnnnnnnnnnnnnnnnnnnnnnnnnnnnnnnnnnnnnnnnnnnnnnnnnnnnnnnnnnnnnnnnnnnnnnnnnnnnnnnnnnnnnnnnnnnnnnnnnnnnnnnnnnnnnnnnnnnnnnnnnnnnnnnnnnnnnnnnnnnnnnnnnnnnnnnnnnnnnnnnnnnnnnnnnnnnnnnnnnnnnnnnnnnnnnnnnnnnnnnnnnnnnnnnnnnnnnnnnnnnnnnnnnnnnnnnnnnnnnnnnnnnnnnnnnnnnnnnnnnnnnnnnnnnnnnnnnnnnnnnnnnnnnnnnnnnnnnnnnnnnnnnnnnnnnnnnnnnnnnnnnnnnnnnnnnnnnnnnnnnnnnnnnnnnnnnnnnnnnnnnnnnnnnnnnnnnnnnnnnnnnnnnnnnnnnnnnnnnnnnnnnnnnnnnnnnnnnnnnnnnnnnnnnnnnnnnnnnnnnnnnnnnnnnnnnnnnnnnnnnnnnnnnnnnnnnnnnnnnnnnnnnnnnnnnnnnnnnnnnnnnnnnnnnnnnnnnnnnnnnnnnnnnnnnnnnnnnnnnnnnnnnnnnnnnnnnnnnnnnnnnnnnnnnnnnnnnnnnnnnnnnnnnnnnnnnnnnnnnnnnnnnnnnnnnnnnnnnnnnnnnnnnnnnnnctatctcatccgctccgaccccctggctcacgtggccagcagctcccagagccgcaagagcagctgcagccacaagctatcgtcctgcaaccccgagactcgcgacgagacgcagctctg

SEQ ID NO: 28415 - DNA, 6978 bp, Macaca Mulatta
  misc_feature (1)...(6978): n = A,T,C or G
cagtcaaagtaaaaaaaccttccttggatttttcaggaagttttcacaattgnnnnnnnnnnnnnnnnnnnnncacaccacaacaaaacaaaagcaaaaaaatcctatgcttccactcaaggaaaaaattttagctttagctccactctcaatacattatttaatccattgaaggtagcaaatatttctcacagtctgttggagggtgcagcagtttattacagaagtatgaaatgcttttatttaaaaaatatattttgccgtttaggtagatgtcatcaaataatccaatttggaaaccaacattcttacttctttttccaacagttgttcctatcatcataaaaacatgttaaatttttctcatcctttcaaaaaatctctggagcttgcctcaccctccagatacagcctcaactgtcattctaccatgaaatcagacttcttgagatggtttcagctggactccatccttcaactgacaacccaacacaagcgtattcatctctcgttaacattactagcagtgagtgacattagaaagcttttgacacatgtcagtctttattgtgatgaacttcacagatacatttgacattggtgtgcctcatttatttgttgaaactttttttctttgccttccataaagtttctttctcttctgtgtcattctacttctatgactgctccttttcaagtaaaacagaatgcatctcaggattattttaaaacaagatgaagtacagagttatacctaaattgagtatttaagtgatggcatcagaaaggaaacccatttagaatatgaaggcatagtcagccaccagttacttttgtaacctgaagctagtctccttcctactccggactgaatgtcttctgtgtaatgcaagcgatctggcttgatgatatacaaggaccgataaaattttgctggggattctggaagcaaaaaaaaattgcctttgacattatgtccccttgctaagtccctggggactttgacattatcccccactgagcagtggcgaggaagttggcatttactaataagctatgaaagggcagtgccttttgacatttcagctccacccatggcacacccactcaaggaacatataaatgaagagatccattccgttctcagacaagatttttcaagcaaaatgaagtccatcatcctctttgtcctttccctgctccttatcttggagaagcaagcagctgtaatgggacaaaaaggtgagtggagagggtaagccttgggaaagctactcagaaagaatggcctctaagggtattcagggtgcaaacagtaacctgttcaggcacagattcttctccttgatgaaaattgatttttctccacccaacgctgtaggcttttggaaatatcagtaatttgttgggaaaaggtgggaggtaagagttgcaagagagctttggagataatgaatgcatatatttctattattaattaccaggtggatcaaaaggccaattatcaagtggatcttcccgatttccacatagacataggagccagcactattctggacaaaaagacaaacaacatactgaatccaaaggcagtttttctattcaacacacatatcatgtagatgccaatgatcatgaccggacccgaaaaagtcagcaatattatttgaatgcccaacataaaacaacaaaatcaaaacaacatctacgtagacgtcaaagactgctcaattataaacaaaaaggcagaggccgtgttaaaccaaaacgtcattttcatctgatagttatacatcgtaaaggaggccaagttcatcacgggacacaaaatccttctcaagatcaggggaatagcccatctggaaagggaatattccgtcaatattcaaacacagaagaaaggctatggtttcgtggactaagtaaagaacaagcttcagcctctggtgcacaaaaaggtagaacacaaggtggatcccaaaccaattatgttctccaaactgaagagctagtagctaacaaacaacaaaacaaacaacaacgtgagactcaaaattctcatcgaaataaagggcattaccaaaatgtgtttgaagtgagagaggaacattcaagtaaactacaaacttcactccatcctgcacatcaacacagactccaacatggatacaaagacatttttactacccaaaatgagctcctagtatataacaagaatcaacaccagacaaaaaatctcaatcaagatcaagagcatggccagaaggcacataaaggatcataccaatcttcaagcacagaagaaagacaacctaaccatgaagaaaatagtgtacagaaaggtgtacccaaaggcagcatttctatccaaactgaagagaaaatatatggcaagtctcaaaaccaggtaacaattcctagtcaagatcaagagcatggccataaggaaaataaaatatcataccaatcttcaagtgcagaagaaagacgactcaacagtggagaaaagggcatacagaaaggtgtacccaaaggcagcatttctatccaaactgaagagaaaatatatggcaagtctcaaaaccaggtaacaattcctagtcaagatcaagagcatggccataaggaaaataaaatatcataccaatcttcaagtgcagaagaaagacgactcaacagtggagaaaagggcatacagaaaggtgtacccaaaggcagcatttctatccaaactgaagagaaaatatatggcaagtctcaaaaccaggtaacaattcctagtcaagatcaagagcatggccataaggaaaataaaatatcataccaatcttcaagtacagaagaaagacgactcaacagtggagaaaagggcatacagagaggtgtatcgaaaggcagcatttctatccaaactgaagagaaaatacatggcaagtctcaaaaccaggtagcaattcctagtcaagatcaagagcatggccataaggaaaataaaatatcataccaatcttcaagtgcagaagaaagacaactcaatagtggagaaaagggcatacagaaaggtgtatccaaaggcagtatttctatccaaactgaagagaaaatatatggcaagtctcaaaaccaggtaacaattcctagtcaagatcaagagcatggccataaggaaaataaaatagcataccaatcttcaagtacagaagaaagacaactcaactatggaggaaagagcattcagaaagacgtatcccaaagcagtctttctttccaaactgaaaagctagtagaaggcaagtctcaaatccagacaccaaatcctaatcaaggtcaatggtctggccaaaatgcaaaaggaaattctggtaaatctgcagatagagaacaagacctactcagtcatgaacaagaaggcagataccaacaggaattcagtggggcacataatactgtaaatatagagcacgaagttgcctatgatgatcttttgacacaacaatataatgaagacagaaatccagtatctacatagccctattgcttagaaaccacttgaaaagttggaccaataacaaggtaagttttcttttcttaccaagtaggagaggtgcctgtcccaaagttggggactctccaggaacatggtaggactgataaccattattcacatcaatagaagtgctgtattacaagtggtgggaagatgaacaccatttcctggtgagtagaggacatggtagtggcagggaaggatgcttggactatcactgggtcctagaattcctattcttaattgagtattcttcaacaatatttttatacatgcctacctgctaaaggtttttttgaacatgcactgactatatatgcatatttatgagtttatggtatactcttgtcagttcttatactttagattagtaaacctcaaattctttctcatatagtatgaaatactacagcagttaacattttctttctgcatgtacatgaatgttcttgcatccctgttagagttcatctgtgctccttcagagaccacaagcccaaagactagcagtccactctctccgaaaataggaaagatatgagtagaaagcaggattcctgttcaggttgtgaaaaaggaagtgtaaaggggggtgcaggagatggtgagagatctcaggtgctaattggacacttgcaatgtcaggagaggaaaagtttaacctggattggggaaatggttcttccatgcccctttgcaataagtaacactacctgaagagagggtaagcagcagaagcaatggtcccagctgataactagtgacctggtgtcctaatgatcaggcggctggtgcagttggtgctaaaggggacaggggtctcagctctcccatcctcacccccactctccactattctcacatatctggttgtcttttctctctctaggtgtcacctgacctcagtgaagtctttgatgtttctgaaatgcagactcccatgtggtcccagatccttggcccgtgaatgacaccaccttcaaatttccaataaagggatcattttctgctttatctgcttttggctccagtgatctctgaattcctagtagctcaaggggctgagggcatttctgataaaaatggttttggaagaaaagaatgggatatttttgaagtattagggaaaataataatcaaagccacatttctagatgtattgatagaaatccaacactaaaaataagatgctattactctgccaggcacacatttacctcctgatgccaatccgaaagtctctcgtgacctctgtactaataggaccccaggatctaacagtcccccagaaagaacagagaaaatgtattgcaacaagccctaggaaagtccctgatctactagtgccatgagtattccccaagtccacagcagcacatcccttcacttagcttaagaattgtcctactcctacagcatacatttagatacaattacaccaaagagtggtatgtcaagtctccaccacttcagcaagagtgagtggatttaaaaatgtcatctgtggatggaaagatcagaggaccaggccagagtcttggggcaggtggtgtgttaataatataaattctactccttttatgccctttcaccctctattctaaagatgcttccagggaaagccaaatatccaggagaagaagccagcatagaggaataagaaaaatcactagcctgggaataagagatctggattcctttctagctctgttttaagaactagtacatctttaattaaatcttttctttcctgcaagtttaagtcccacatctgcacatgaaaaactttgacacagttaacttcatagtacatgctgactaaatattgtagagcttccttaaaaagaaagagagagagagagatggaggcagaaggagaagagagaaagagagaagacaannnnnnnnnnnnnnnnnnnnnagagacnnnnnnnnnnnnnnnnnnnnnnnnnnnnnnnnnnnnagtnnnnnnnnnnnnnnnnnnnnnnngaatgaaggaaannnnnnnnnnnnnnnnnnnnnnnnnngnnnnnnnnnnnnnnnnnnnnnnnnnnnnnnnnnnnnnnnnnnnnnnnnnnnnnnnnnnnnnnnnnnnnnnnnnnnnnnnnnnnnnnnnnnnnnnnnnnnnnnnnnnnnnnngaaggaagaaaggaagaatcttctctatgaggtctcatattgcttgtagatgtgtgataagagacttggtcatagtgttatgagaatcctgtctctcttcactgcatccttcccaaaaacacaaaggccctgtgttcagccacctgccttagtttaccagcccaccagttaaagaggagaaacggtgttgggcttaggggccttagcatcagggaagctacaattacctgctacagtctactgaacagactctcttctctatatgtggagagacatacattcaacagtttccctgacatgttgctgattgtgcagggagggaaacctaaattagcatgcaaataaccaagacagccagagtcataaatgctgtgtgctgtgttacaattagcttgaactgtggatcccaccgcttgcatagtctgggaaagtggggtctctgatgtagagttccttcatcttaatgtggggataacaataaccatctcacagaggtgcttagagatattgagtgagatgatctcaaccccagtgctcaaaaaaatagtgccaggacaacaaatttggaagnnnnnnnnnnnnnnnnnnnnnnnattatgccttctttgaaagagaggtaaaatacatataaagaaaagcacagatcttgtgtatttacttgaatgagatttgacaaacacatacatgtgattgcacaacacatagatgaacatatggaacactcatcttgccttatgcctcctttccgaaattcagtcccagttcttcaggggaaaatattatactgacttctagaaactcataactcactgtttttaattcttatataatgaaattatgtaataacattaccttttgtgtatcactgttattcagtgttgggattcattctgttttgttgtatcacagttcattcattttattgctgaatagcattccattgtttgactctccacatttgttttcctatttatctgctgataaacatttggtgttcccagtttgggtcattgtgaattgggatatcacataagttcttgtacaaggcacagtaatatatatttttaaatatctgtggtaaataactaggagtagaattttctcccagtgtgtggcnnnnnnnnnnnnnnnnnnctcaatgatgatgtattcggaagagctaaagttttaaaatgtgatgaaatcaaacatattcattttccttttaatatgaatattatggtatctaagaacttttgccttccccaaggctgaaaaaatgttctgtctgtgatgtccttccctagaagctt

SEQ ID NO: 28416 - DNA, 846 bp, Macaca Mulatta
  misc_feature (1)...(846): n = A,T,C or G
catggaaactgccctgcacactggagtctctgcaggtgatgtggaggtggccaatccaccagcagcaagggagagcatgncgctcttccgagattctgggtcactgaagatcatggcgcagttgttcaggagatgtgctgccccatctgctgtagcgaatatgtgaggggggaggtggcaactgagctgccatgccaccactattcccacaagccgtgtgtgtccatctggcttcagaagtcaggcacctgccctgtgtgccgctgcatgttccctcccccactctaaagaccaaggctgtttactcctggtctgattattttccccatctgaaatccacaatactgcaggagccctcttgaaattaacaatggaaacaaaaccagtcagtcagttagcctaaacctattgattcctcgtgattatttccaatgtgaaaacagttgtgtatgattgcattaaaaatcatatcatcttttagaggttagaaaagggaaaactaaactttataaatgctacttgagattgcagtaagaacatacgttttctaacctgaaagttaaatcgcatttgttttcttcagtagaatgtgttgctgttacttgtaatgtcaagtgtatctgttaaatatgtccaaaaggcaaaatcatttttgttgcatgttatgggtcgatgttcctgtaattgcagtgctgtaaaagcttattaaagtttttcttttggttttacatggtgtaatggaattctttggttttgtctgaaacagtggtactgaatgactttataattgatcccttgcatttgcatcaaaaactttagtttcactggaaatgctgacttcaacaa

SEQ ID NO: 28417 - DNA, 635 bp, Macaca Mulatta
ataataaattatacattttcttctcatcagaaattgcaaattccacaaaaagcagcacaagaggtaaaattggccattaagccattttaccaaaataaagatatcaccaaggaagaatataaagaaattgtacggaaagcagtagataaagtaagttatgcctttagtggagtatgtgcacattgttttgaaccacctctgttttaataaatgaatgctgaagtttaattaaaataataaaagctagctcctactaattcctgtctacttttttgccttttgactagtttgtatgagataatgaaacatgaaaataagtctggttatctctttggggttgtttttcacaaagctttctattttggctttaatccctttaagcatgaaaaaagtttaccctccaccccttttttcttaggtttgtcatagtaagagtggagaagtaaattctactaaagtggcaaatctggttaaagcctatgtagacaaatacaaatattcacggaaggggagccaaaagaaaactctggaagaacctgtgtctactgaaaaaaacataggctgaaatggggaacgctgtcaaagacattatcaggatatctgcaaagtgcaatttcaacatgtaccattaactg

SEQ ID NO: 28418 - DNA, 1738 bp, Macaca Mulatta
  misc_feature (1)...(1738): n = A,T,C or G
gggatgcactgacagagcccctggctatcgttgagggttataactcctatttcagcttcagccgcaaccgtagcggctattctggnnnnnnnnnnnnnnnnnnnnnnnnnnnnnnnnnnnnnnnnnnnnnnnnnnnnnnnnnnnnnnnnnnnnnnnnnnnnnnnnnnnnnnnnnnnnnnnnnnnnnnnnnnnnnnnnnnnnnnnnnnnnnnnnnnnnnnnnnnnnnnnnnnnnnnnnnnnnnnnnnnnnnnnnnnnnnnnnnnnnnnnnnnnnnnnnnnnnnnnnnnnnnnnnnnnnnnnnnnnnnnnnnnnnnnnnnnnnnnnnnnnnnnnnnnnnnnnnnnnnnnnnnnnnnnnnnnnnnnnnnnnnnnnnnnnnnnnnnnnnnnnnnnnnnnnnnnnnnnnnnnnnnnnnnnnnnnnnnnnnnnnnnnnnnnnnnnnnnnnnnnnnnnnnnnnnnnnnnnnnnnnnnnnnnnnnnnnnnnnnnnnnnnnnnnnnnnnnnnnnnnnnnnnnnnnnnnnnnnnnnnnnnnnnnnnnnnnnnnnnnnnnnnnnnnnnnnnnnnnnnnnnnnnnnnnnnnnnnnnnnnnnnnnnnnnnnnnnnnnnnnnnnnnnnnnnnnnnnnnnnnnnnnnnnnnnnnnnnnnnnnnnnnnnnnnnnnnnnnnnnnnnnnnnnnnnnnnnnnnnnnnnnnnnnnnnnnnnnnnnnnnnnnnnnnnnnnnnnnnnnnnnnnnnnnnnnnnnnnnnnnnnnnnnnnnnnnnnnnnnnnnnnnnnnnnnnnnnnnnnnnnnnnnnnnnnnnnnnnnnnnnnnnnnnnnnnnnnnnnnnnnnnnnnnnnnnnnnnnnnnnnnnnnnnnnnnnnnnnnnnnnnnnnnnnnnnnnnnnnnnnnnnnnnnnnnnnnnnnnnnnnnnnnnnnnnnnnnnnnnnnnnnnnnnnnnnnnnnnnnnnnnnnnnnnnnnnnnnnnnnnnnnnnnnnnnnnnnnnnnnnnnnnnnnnnnnnnnnnnnnnnnnnnnnnnnnnnnnnnnnnnnnnnnnnnnnnnnnnnnnntgtccccaagcctctgctgactaaaactgcctagcccaccactgatgagcgccctcatgaccccgaagactccagaagaggaggcagtggccaaagtggtgaaggggcgggccaaggcttcagaagccaaagatgagaaggaggtacggacctcattctggaagtctgtgctggcggggcccttgcgcacacccctctgtgggggccacagggagccatgtgtgatgcgtactgtgaagaagccaggacccaacctgggccgccgcttctatatgtgtgccaggccccggggtcctcccactgacccctcctcccggtgcaacttcttcctctggagcaggcccagctgaaccaatggaggcctggggacgtctggcatagtcacccctgcacgtgatctgaggccagctccccttccctgagctgcctcctgcttctccccgaaagtctcctacccttctcttcctcttcttagccctctcttcctcactgaccttcctacctagctccttgttggtgagctttttgcaccttaatgctgtgacccagcccgctacaccactttccaccttcctgtctgaagtacacagacactggctgccccgggaagttgtgtgattttaaatcacttctgtctttgctggaaaatgtatttgtgcataaataaagtctgtgtatttgtttcagggtt

SEQ ID NO: 28419 - DNA, 1110 bp, Macaca Mulatta
  misc_feature (1)...(1110): n = A,T,C or G
cctgcccatgcccagaggctgccccggatgcaggaggattccccgctgggaggaggctcttctggggaagatgacccactgcatgaggaggatctgcccagtgaagaggatccacccagagaggaggatccacccagagaggaggatctacctgnnnnnnnnnnnnnnnnnnnnnnnnnnnnnnnnnnnnnnnnnnnnnnnnnnnnnnnnnnnnnnnnnnnnnnnnnnnnnnnnnnnnnnnnnnnnnnnnnnnnnnnnnnnnnnnnnnnnnnnnnnnnnnnnnnnnnnnnnnnnnnnnnnnnnnnnnnnnnnnnnnnnnnnnnnnnnnnnnnggcgacccgccctggccccaggtgtccccagcctgcgcgggccgcttccagtccccggtagatatccgcccccagctcgccgccttctgccccgccctgcgatttctggaactcctgggcttcgagctcccgctgctcccagaactgcgcctgcgcaacaatggccacagtgnnnnnnnnnnnnnnnnnnnnnnnnnnnnnnnnnnnnnnnnnnnnnnnnnnnnnnnnnnnnnnnnnnnnnnnnnnnnnnnnnnnnnnnnnnnnnnnnnnnnnnnnnnnnnnnnnnnnnnnnnnnnnnnnnnnnnnnnnnnnnnnnnnnnnnnnnnnnnnnnnnnnnnnnnnnnnnnnnnnnnnnnnnnnnnnnnnnnnnnnnnnnnnnnnnnnnnnnnnnnnnnnnnnnnnnnnnnnnnnnnnnnnnnnnnnnnnnnnnnnnnnnnnnnnnnnnnnnnnnnnnnnnnnnnnnnnnnnnnnnnnnnnnnnnnnnnnnnnnnnnnnnnnnnnnnnnnnnnnnnnnnnnnnnnnnnnnnnnnnnnnnnnnnnnnnnnnnnnnnnnnnnnnnnnnnnnnnnnnnnnnnnnnnnnnnnnnnnnnnnnnnnnnnnnnnnnnnnnnnnnnnnnnnnnnnnnnnnnnnagctccacgccctctctgacgccctgtggggacctggtgactctcggctacagctgaacttccgagtgacgcagcctttgaatgggcgagtgattgaggcctccttccctgctgaagtggacagcagtcctcgggctgctgagccag

SEQ ID NO: 28420 - DNA, 258 bp, Macaca Mulatta
agttactgaacgtgaaaaaggaacccaagcaaagaggaaggagttggggaggggccaccaaagcctctgggccccatccatagccctgacctgaaccgcgcctagggcctccagcctgggacctgcccggcaggagaggtggggggcagccgaggggccccagctgggcctgctacttcctttgggccagacaagaaggggtcaaaagaagggcggggagggggccccagggagccagagcccacgagccatttattg

SEQ ID NO: 28421 - DNA, 767 bp, Macaca Mulatta
tgtccagcagcaccttcccgcggatgcactacagctcgcactacgacacgcgcgacgactgcgccgtggcccacgcgggcaccaagatcaaccgcatcccggccaacctgctggaccagttcgagaagcagctgccgctgcaccgggacggcttccacacgctgcagtaccagaggacgtccgcggccgccgagcagcgcagcgagagccccgggcggatccgccacctggtacactccgtgcagaagctcttcaccaagtcgcactcgctggagggctcctccaagagcaacgccaacggcaccaaggcggacggccgggcggacgaccaccaccacgcccaccacgccaagcacagcaagaggagcaagagcaaggagcgcaagcccgagggcaaaccccggcccggcgtgagcagctggtggagctcggacgacaacctggacagcgacagcacctaccggacgcccagcgtgctcaaccggcaccacctgggcccggtggcccactgctaccccgacgcgctgcagagcccgttcggggacctgtccctcaagacctccaaaagcaacaacgacgtcaaatgctcagcctgcgagggtttggcgctgacgcccgatgccaagtacctgaagcgcagctcctggtccacgctgacagtcagccaggccaaggaggcctaccgcaagagctcgctgaacctggacaagccgctgctgcaccaggacgccaagcccgccctgaggccgtgccactacctccaggta

SEQ ID NO: 28422 - DNA, 246 bp, Macaca Mulatta
ggggggtcgttcgcccctgcctgactgcagtgttgagcctgtatgggaggtaggagctgatcatctgcacagtggtcggcccctctgcagcgaaggtcactgagccacccgagtcggagcctgcggttcccgaagtggccacggcgcggcagctgtgcgctggctcccgcggggggttctgtccctcttcccggtccaaaattcagcgcgctccaggccgcgggcttgcgcatagggggacgctcc

SEQ ID NO: 28423 - DNA, 1302 bp, Macaca Mulatta
  misc_feature (1)...(1302): n = A,T,C or G
accctattactttctttgacacaccccctatgctgtttgtgtttattgcactaggccgatggctggaacatatagcaaaggnnnnnnnnnnnnnnnnnnnnnnnnnnnnnnnnnnnnnnnnnnnnnnnnnnnnnnnnnnnnnnnnnnnnnnnnnnnnnnnnnnnnnnnnnnnnnnnnnnnnnnnnnnnnnnnnnnnnnnnnnnnnnnnnnnnnnnnnnnnnnnnnnnnnnnnnnnnnnnnnnnnnnnnnnnnnnnnnnnnnnnnnnnnnnnnnnnnnnnnnnnnnnnnnnnnnnnnnnnnnnnnnnnnnnnnnnnnnnnnnnnnnnnnnnnnnnnnnnnnnnnnnnnnnnnnnnnnnnnnnnnnnnnnnnnnnnnnnnnnnnnnnnnnnnnnnnnnnnnnnnnnnnnnnnnnnnnnnnnnnnnnnnnnnnnnnnnnnnnnnnnnnnnnnnnnnnnnnnnnnnnnnnnnnnnnnnnnnnnnnnnnnnnnnnnnnnnnnnnnnnnnnnnnnnnnnnnnnnnnnnnnnnnnnnnnnnnnnnnnnnnnnnnnnnnnnnnnnnnnnnnnnnnnnnnnnnnnnnnnnnnnnnnnnnnnnnnnnnnnnnnnnnnnnnnnnnnnnnnnnnnnnnnnnnnnnnnnnnnnnnnnnnnnnnnnnnnnnnnnnnnnnnnnnnnnnnnnnnnnnnnnnnnnnnnnnnnnnnnnnnnnnnnnnnnnnnnnnnnnnnnnnnnnnnnnnnnnnnnnnnnnnnnnnnnnnnnnnnnnnnnnnnnnnnnnnnnnnnnnnnnnnnnnnnnnnnnnnnnnnnnnnnnnnnnnnnnnnnnnnnnnnnnnnnnnnnnnnnnnnnnnnnnnnnnnnnnnnnnnnnnnnnnnnnnnnnnnnnnnnnnnnnnnnnnnnnnnnnnnnnnnnnnnnnnnnnnnnnnnnnnnnnnnnnnnnnnnnnnnnnnnnnnnnnnnnnnnnnnnnnnnnnnnnnnnnnnnnnnnnnnnnnnnnnnnnnnnnnnnnnnnnnnnnnnnnnnnnnnnnnnnnnnnnnnnnnnnnnnnnnnnnnnnnnnnnnnnnnnnnnnnnnnnnnnnnnnnnnnnnnnnnnnnnnnnnnnnnnnnnnnnnnnnnnnnnnnnnnnnnnnnnnnnnnnnnnnnnnnnnnnnnnnnnnnnnnnnnnnnnnnnnnnnnnnnnnnnnnnnnnnnnatgctcttaatgctcaacagtataaagtcctcattggtaacggggagtggatgattagaaaatggtcttgtcataagtaacaatgtagatgatttcatgactgaacatgagaaaaaa

SEQ ID NO: 28424 - DNA, 193 bp, Macaca Mulatta
ctccttttggagagcggctgggcctggttggtcacagtcctagctctgccagcctgaacttcctccatgccctggaggtcatgttcaaatccaccatccagctcatgttcatgcccaggagcctgtctcgctggaccagccccaaggtgtggaaggagcactttgaggcctgggactgcatcttccagtacgg

SEQ ID NO: 28425 - DNA, 3703 bp, Macaca Mulatta
  misc_feature (1)...(3703): n = A,T,C or G
ggaggccggagatgctgggcttgctgtcgctgtgggacatgacccgcatgctgaacatgctcatcgtgttccgcttcctgcgcatcatccccagcatgaannnnnnnnnnnnnnnnnnnnnnnnnnnnnnnnnnnnnnnnnnnnnnnnnnnnnnnnnnnnnnnnnnnnnnnnnnnnnnnnnnnnnnnnnnnnnnnnnnnnnnnnnnnnnnnnnnnnnnnnnnnnnnnnnnnnnnnnnnnnnnnnnnnnnnnnnnnnnnnnnnnnnnnnnnnnnnnnnnnnnnnnnnnnnnnnnnnnnnnnnnnnnnnnnnnnnnnnnnnnnnnnnnnnnnnnnnnnnnnnnnnnnnnnnnnnnnnnnnnnnnnnnnnnnnnnnnnnnnnnnnnnnnnnnnnnnnnnnnnnnnnnnnnnnnnnnnnnnnnnnnnnnnnnnnnnnnnnnnnnnnnnnnnnnnnnnnnnnnnnnnnnnnnnnnnnnnnnnnnnnnnnnnnnnnnnnnnnnnnnnnnnnnnnnnnnnnnnnnnnnnnnnnnnnnnnnnnnnnnnnnnnnnnnnnnnnnnnnnnnnnnnnnnnnnnnnnnnnnnnnnnnnnnnagggatattctggaggagcccagggaggatgagctcatggagaggctgaaccagcacccgcacctgcagctgtgcaggtgacatccgggctgccgtcccagccagggcggcaggagagagaggctggcctacacaggtgcccatcatggaagaggcggccatgctatgaccagccgagcaggaagagacctttcctctgatagaccactaagctggagacaggaatcaagtccttcgcgtgcggcccaacagccatccacagaacagctgctggtgcttccgggaggcgccacgcgctccgctttcttttatagctgcttcagtgagaattcgctcgcccactccacagggaccttacagacaaaaaagcgagaagcagcggcctcccctgtcccctgcagcttcgggtgcctttgctgctggtggccgttagggaccacaggcctgannnnnnnnnnnnnnnnnnnnnnnnnnnnnnnnnnnnnnnnnnnnnnnnnnnnnnnnnnnnnnnnnnnnnnnnnnnnnnnnnnnnnnnnnnnnnnnnnnnnnnnnnnnnnnnnnnnnnnnnnnnnnnnnnnnnnnnnnnnnnnnnnnnnnnnnnnnnnnnnnnnnnnnnnnnnnnnnnnnnnnnnnnnnnnnnnnnnnnnnnnnnnnnnnnnnnnnnnnnnnnnnnnnnnnnnnnnnnnnnnnnnnnnnnnnnnnnnnnnnnnnnnnnnnnnnnnnnnnnnnnnnnnnnnnnnnnnnnnnnnnnnnnnnnnnnnnnnnnnnnnnnnnnnnnnnnnnnnnnnnnnnnnnnnnnnnnnnnnnnnnnnnnnnnnnnnnnnnnnnnnnnnnnnnnnnnnnnnnnnnnnnnnnnnnnnnnnnnnnnnnnnnnnnnnnnnnnnnnnnnnnnnnnnnnnnnnnnnnnnnnnnnnnnnnnnnnnnnnnnnnnnnnnnnnnnnnnnnnnnnnnnnnnnnnnnnnnnnnnnnnnnnnnnnnnnnnnnnnnnnnnnnnnnnnnnnnnnnnnnnnnnnnnnnnnnnnnnnnnnnnnnnnnnnnnnnnnnnnnnnnnnnnnnnnnnnnnnnnnnnnnnnnnnnnnnnnnnnnnnnnnnnnnnnnnnnnnnnnnnnnnnnnnnnnnnnnnnnnnnnnnnnnnnnnnnnnnnnnnnnnnnnnnnnnnnnnnnnnnnnnnnnnnnnnnnnnnnnnnnnnnnnnnnnnnnnnnnnnnnnnnnnnnnnnnnnnnnnnnnnnnnnnnnnnnnnnnnnnnnnnnnnnnnnnnnnnnnnnnnnnnnnnnnnnnnnnnnnnnnnnnnnnnnnnnnnnnnnnnnnnnnnnnnnnnnnnnnnnnnnnnnnnnnnnnnnnnnnnnnnnnnnnnnnnnnnnnnnnnnnnnnnnnnnnnnnnnnnnnnnnnnnnnnnnnnnnnnnnnnnnnnnnnnnnnnnnnnnnnnnnnnnnnnnnnnnnnnnnnnnnnnnnnnnnnnnnnnnnnnnnnnnnnnnnnnnnnnnnnnnnnnnnnnnnnnnnnnnnnnnnnnnnnnnnnnnnnnnnnnnnnnnnnnnnnnnnnnnnnnnnnnnnnnnnnnnnnnnnnnnnnnnnnnnnnnnnnnnnnnnnnnnnnnnnnnnnnnnnnnnnnnnnnnnnnnnnnnnnnnnnnnnnnnnnnnnnnnnnnnnnnnnnnnnnnnnnnnnnnnnnnnnnnnnnnnnnnnnnnnnnnnnnnnnnnnnnnnnnnnnnnnnnnnnnnnnnnnnnnnnnnnnnnnnnnnnnnnnnnnnnnnnnnnnnnnnnnnnnnnnnnnnnnnnnnnnnnnnnnnnnnnnnnnnnnnnnnnnnnnnnnnnnnnnnnnnnnnnnnnnnnnnnnnnnnnnnnnnnnnnnnnnnnnnnnnnnnnnnnnnnnnnnnnnnnnnnnnnnnnnnnnnnnnnnnnnnnnnnnnnnnnnnnnnnnnnnnnnnnnnnnnnnnnnnnnnnnnnnnnnnnnnnnnnnnnnnnnnnnnnnnnnnnnnnnnnnnnnnnnnnnnnnnnnnnnnnnnnnnnnnnnnnnnnnnnnnnnnnnnnnnnnnnnnnnnnnnnnnnnnnnnnnnnnnnnnnnnnnnnnnnnnnnnnnnnnnnnnnnnnnnnnnnnnnnnnnnnnnnnnnnnnnnnnnnnnnnnnnnnnnnnnnnnnnnnnnnnnnnnnnnnnnnnnnnnnnnnnnnnnnnnnnnnnnnnnnnnnnnnnnnnnnnnnnnnnnnnnnnnnnnnnnnnnnnnnnnnnnnnnnnnnnnnnnnnnnnnnnnnnnnnnnnnnnnnnnnnnnnnnnnnnnnnnnnnnnnnnnnnnnnnnnnnnnnnnnnnnnnnnnnnnnnnnnnnnnnnnnnnnnnnnnnnnnnnnnnnnnnnnnnnnnnnnnnnnnnnnnnnnnnnnnnnnnnnnnnnnnnnnnnnnnnnnnnnnnnnnnnnnnnnnnnnnnnnnnnnnnnnnnnnnnnnnnnnnnnnnnnnnnnnnnnnnnnnnnnnnnnnnnnnnnnnnnnnnnnnnnnnnnnnnnnnnnnnnnnnnnnnnnnnnnnnnnnnnnnnnnnnnnnnnnnnnnnnnnnnnnnnnnnnnnnnnnnnnnnnnnnnnnnnnnnnnnnnnnnnnnnnnnnnnnnnnnnnnnnnnnnnnnnnnnnnnnnnnnnnnnnnnnnnnnnnnnnnnnnnnnnnnnnnnnnnnnnnnnnnnnnnnnnnnnnnnnnnnnnnnnnnnnnnnnnnnnnnnnnnnnnnnnnnnnnnnnnnnnnnnnnnnnnnnnnnnnnnnnnnnnnnnnnnnnnnnnnnnnnnnnnnnnnnnnnnnnnnnnnnnnnnnnnnnnnnnnnnnnnnnnnnnnnnnnnnnnnnnnnnnnnnnnnnnnnnnnnnnnnnnnnnnnnnnnnnnnnnnnnnnnnnnnnnnnnnnnnnnnnnnnnnnnnnnnnnnnnnnnnnnnnnnnnnnnnnnnnnnnnnnnnnnnnnnnnnnnnnnnnnnnnnnnnnnnnnnnnnnnnnnnnnnnnnnnnnnnnnttgaagatatggtcttggcagaggtaattaagttaaaataaggtcattagggtgagccctaatccaaaggatgggtgtcctaatcagaggaggagattaggacccagacacacacacagaaagagagccaggtga

SEQ ID NO: 28426 - DNA, 94 bp, Macaca Mulatta
gccacgacatttttccaccacatcaacctgcagtatagcaccatctcggagttctgcacaggagaggcatgccagaccatggccgtgtgcaaca

SEQ ID NO: 28427 - DNA, 2265 bp, Macaca Mulatta
  misc_feature (1)...(2265): n = A,T,C or G
ccttggaagttgttctcaaccgtatccagcnnnnnnnnnnnnnnnnnnnnnnnnnnnnnnnnnnnnnnnnnnnnnnnnnnnnnnnnnnnnnnnnnnnnnnnnnnnnnnnnnnnnnnnnnnnnnnnnnnnnnnnnnnnnnnnnnnnnnnnnnnnnnnnnnnnnnnnnnnnnnnnnnnnnnnnnnnnnnnnnnnnnnnnnnnnnnnnnnnnnnnnnnnnnnnnnnnnnnnnnnnnnnnnnnnnnnnnnnnnnnnnnnnnnnnnnnnnnnnnnnnnnnnnnnnnnnnnnnnnnnnnnnnnnnnnnnnnnnnnnnnnnnnnnnnnnnnnnnnnnnnnnnnnnnnnnnnnnnnnnnnnnnnnnnnnnnnnnnnnnnnnnnnnnnnnnnnnnnnnnnnnnnnnnnnnnnnnnnnnnnnnnnnnnnnnnnnnnnnnnnnnnnnnnnnnnnnnnnnnnnnnnnnnnnnnnnnnnnnnnnnnnnnnnnnnnnnnnnnnnnnnnnnnnnnnnnnnnnnnnnnnnnnnnnnnnnnnnnnnnnnnnnnnnnnnnnnnnnnnnnnnnnnnnnnnnnnnnnnnnnnnnnnnnnnnnnnnnnnnnnnnnnnnnnnnnnnnnnnnnnnnnnnnnnnnnnnnnnnnnnnnnnnnnnnnnnnnnnnnnnnnnnnnnnnnnnnnnnnnnnnnnnnnnnnnnnnnnnnnnnnnnnnnnnnnnnnnnnnnnnnnnnnnnnnnnnnnnnnnnnnnnnnnnnnnnnnnnnnnnnnnnnnnnnnnnnnnnnnnnnnnnnnnnnnnnnggtttggtaaaggctccagtgtggtggcctatgaaggacaatcctggcacgactactgcttccactgcaaaaaatgctccgtgaatctggccaacaagcgctttgttttccaccaggagcaagtgtattgccccgactgtgccaaaaagctgtaaactgacaggggctcctgtcctgtaaaatggcatttgaatctcgttctttgtgtccttactttctgccctataccatcaataggggaagagtggtccttcccctctttaaagttctccttccgtcttttctcccattttacagtattactcaaataagggcacacagtgatcatattagcatttagtaaaaagcaaccctgcagcaaagtgaatttctgtctgactgcaatttaaaattgaaaacttaggtagattgactcttctgcatgtttctcatagagcaaaaaagtgctaatcatttagccacttagtgatgtaagcaagaagcataggagataaagcccccactgaggtgcctcttgtgcctcagctgggacccaccgtgtagacacacgacatgcaagagttgcagcggctgctccaactcactgctcaccctcttctgtgagcaggaaaagaacttactgacatgcatggtttaacttcctcatcagaactctgcccttccttctgttcttttgtgctttcaaatgactaacannnnnnnnnnnnnnnnnnnnnnnnnnnnnnnnnnnnnnnnnnnnnnnnnnnnnnnnnnnnnnnnnnnnnnnnnnnnnnnnnnnnnnnnnnnnnnnnnnnnnnnnnnnnnnnnnnnnnnnnnnnnnnnnnnnnnnnnnnnnnnnnnnnnnnnnnnnnnnnnnnnnnnnnnnnnnnnnnnnnnnnnnnnnnnnnnnnnnnnnnnnnnnnnnnnnnnnnnnnnnnnnnnnnnnnnnnnnnnnnnnnnnnnnnnnnnnnnnnnnnnnnnnnnnnnnnnnnnnnnnnnnnnnnnnnnnnnnnnnnnnnnnnnnnnnnnnnnnnnnnnnnnnnnnnnnnnnnnnnnnnnnnnnnnnnnnnnnnnnnnnnnnnnnnnnnnnnnnnnnnnnnnnnnnnnnnnnnnnnnnnnnnnnnnnnnnnnnnnnnnnnnnnnnnnnnnnnnnnnnnnagttgaatcccttgtaaagtagtagttgtctgctctttgtccatgtgttaatgaggactgcaacgtcccttctcttgtgattcctaggacttttcctcaagaggaaatctggatttccacctaccgcttacctgaaatgcaggatcacctacttactgtattctacattattatatgacatagtataatgagacaatatcaaaagtaaacatgtaatgacaatacatactaacattcttgtaggagtggttagagaagctgatgcctcatttctacattctgtcattagctattatcatctaacgtttcagtgtatccttacagaaataaagcagcatatgaata

SEQ ID NO: 28428 - DNA, 667 bp, Macaca Mulatta
ttcaaatgattatgattagttatgtcttttaataaaaaggaaatacttttcaactttttatatatccaaaattcagagctttaaaaatgattattttgatttcccaaaaacactaaaggtggttttaatattttccctttatattttaacttattgttgctgaaaactctatgtccagctttaactatcttctctgtatttttatttcatttcatattaatgagaagagtttttttcagagattaaaaaaggcagtttttctgttattgttaaatacacactatcactgaacaaatgtagcttttatgtgatctgttttaaagttaaaaccggatggaaatagccgtttgaaagctttggttatgaaacatgcggagtgtattaagtacggcttgacattatgttttatttaaatgctttttatcgctaaatgacttgcagatgaaaaaaaactaaggtggcctgagagtttaaatgctgtgtacaacaatgctttgataatatattttaagtatgagttatcagctatatgtcaattgatatttctgtgcagtatttatatgtaaattatatttacctttttgcttattttacaaatattaagaaagtattctaacatttcataattttgaaatgattcatctttcagaaataaaagtatgaatct

SEQ ID NO: 28429 - DNA, 870 bp, Macaca Mulatta
  misc_feature (1)...(870): n = A,T,C or G
cagataacccagatcgagaaagaggtatccagtagtggtcaggaagtgcagtccagtgccaaggaggtgacccagctccggcacggtttcaaaaggttggagattgagctgcagtctcagctcagcannnnnnnnnnnnnnnnnnnnnnnnnnnnnnnnnnnnnnnnnnnnnnnnnnnnnnnnnnnnnnnnnnnnnnnnnnnnnnnnnnnnnnnnnnnnnnnnnnnnnnnnnnnnnnnnnnnnnnnnnnnnnnnnnnnnnnnnnnnnnnnnnnnnnnnnnnnnnnnnnnnnnnnnnnnnnnnnnnnnnnnnnnnnnnnnnnnnnnnnnnnnnnnnnnnnnnnnnnnnnnnnnnnnnnnnnnnnnnnnnnnnnnnnnnnnnnnnnnnnnnnnnnnnnnnnnnnnnnnnnnnnnnnnnnnnnnnnnnnnnnnnnnnnnnnnnnnnnnnnnnnnnnnnnnnnnnnnnnnnnnnnnnnnnnnnnnnnnnnnnnnnnnnnnnnnnnnnnnnnnnnnnnnnnnnnnnnnnnnnnnnnnnnnnnnnnnnnnnnnnnnnnntggctatggtggaggaagtggaggtggccatagcggaggaagtggaggtggccatagtggaggaagtgggggcaactatggaggaggaagtggctctggaggaggaagtgggggtggctatggtggaggaagtgggtccaggggaggaagtggaggcagccatggtggaggaagtggttttggaggtgaaagtggaggcagctacggaggtggtgaagaagggagtggaagtggtggcggctatggaggaggaagcggaaaatcatcccattcccagtcttcttcctcaaaatctggtgaccaagatgagacaaaag

SEQ ID NO: 28430 - DNA, 854 bp, Macaca Mulatta
ggcattagtagcgaattgcttcagtctttgttctcagaatgggacaatccagtatttgcccgttatccagaggttgctgttgatgtaagcagtggccaggctgagagcttagcagttaaaattcacaacatcttgtatccctatcgtttcaccaaagaaatgattcattcaatgcaggttctccagcaagtcgatagcaagtttattgcctgtttgatgagcactaagactgaagagaatggcgaggcaggtggaaacctgctcgtgctggtggatcagcacgctgcccatgagcgtatccgtctggagcagcttatcattgattcctatgagaagcaacaggcacaatgctctggtcggaaaaaattactgtcttctactctaattcctccactagagataacagtgacacaggaaccaaggagactcttatggttatctctttaggtgttaccactaaaatctggaaaatctgggcccttgaacttgtatttccagaccctagtgaattctctggtacttgtggggaaaagtaccacctctgtttttgtgggaaagagaaagccggatgaactttccgaagaggaaaaatctactggtgaccaaaaattttcttgggaaggaattttatcccaaaaacaagttggaaacttactccctaaaccaacgggagggccatccatagggaaactttggcccctggacatggtccccaaaaggtgggtttggcattcccacaagccttgcccttggggggccactataaagttttaatagaaggggcctctgaacctttcaaggacaagcttcccgcccctgttatgagaaaaccttgtggcctcatctgggcatgc

SEQ ID NO: 28431 - DNA, 119 bp, Macaca Mulatta
ggactctccacctctcgacctcgtgtggtcatccaacttgagcgtggcgaggagccctgggttcccagcggaacggacacgatcctgtccaggaacacctacaggaggcgcaaccctgg

SEQ ID NO: 28432 - DNA, 566 bp, Macaca Mulatta
tcaccatccccaccccatcaataaaacacaaatttagtgctggaggttccttccatccaaccctgggtttccttcctccttttggtgaagaaggaaagagaaaaaacaagacaagccctcgcccagccgagtcagcactgcgttcatttccctaagccccatttcctcaggacggcttcctccccttacagagttgcagtggcaaccaagtcagctctgctcaggagctgccctggacagcaaactggcctgtgctgagtcctgtccaagaccaggggagggtggagaagattagaagcccggagctcccagccgaccctggaatccttaggaagggctaggctgggggccaaggaagaaactccccctccgaaacaagatgatctcttgtttaataacggggccagctgggctcagaggtgataatggggagccgtgtaccctgagaccagcctgcaggggacagaggcaacacagaggggccacaaggatcagtgctgagggtcccgcccccctgcccacctaaagaaccccctccactgcccgcctgagagcccccatgaccc

SEQ ID NO: 28433 - DNA, 132 bp, Macaca Mulatta
gttcagaaatggggcacagaggaagttgctgcttggctggatctgctcaatttgggagagtacaaagatatcttcatccgtcatgacatcagaggggctgaacttttgcatctggaaaggcgagatcttaag

SEQ ID NO: 28434 - DNA, 1177 bp, Macaca Mulatta
  misc_feature (1)...(1177): n = A,T,C or G
catatgctgacacgcagcatgtagtaggtgggatatacaacgcgagtgggtaactatgtacagtatacgcggcggcgcgagcgcattataggtgtgcaattgcgcggcacacggggcggggnagcactcgacggacacaaaacgggaaagggggggcgcgaaatggtaacatagggggcgtggngctgtcgtagctctgagcacaaggataaccggcacgagaatagttgggacgcgtggtctcgtatcgccagcgcggaggagtgcaatatgcgggggcacacagagggggagagcgatacaaagggggcgctgtgtaccagcggcagagaataccgctcagggattacgttccgatggcgagatatcgtgggatagggtaagacgtctctgcgcgctcgctacaggcgccgctatatcgttaaggggctaggaggtagtgccacgagngtatcgatgggcggctcatcaaggggggggagtacgccgtacgcatcgagactgaaggagtgagtacagtcgacggcgttctggaaggcgagccattagggtgtggagaggggtgtgaagagcacgggaaggcgcatgaaggtggagtggggatttgcgcaattggatagcacggacgccaagtggcacaagcggggggtgcaatagaggaaggagggaaacggtgcggttacgagtcggggattctcgccaggtggcggtaggggagcggaccttcgacgctggttactgatggatgatcgaagcgcagaaggcgcgggatacgaggctatttatattagggaatcaagacgggagttatagcattcggtatcctttgtgtgtcgtgtgaaggatgctttcgaagcagcaggtgctttcttaattaaatggtagagatgttcaggaagatcaggagcaagtccgttagacttaagaattcttaagattttattgcctgtcacaaaacgtgcttgtgcaacgccatgtgaatctctcaggatcacaccgatttgtgaaggagtcaggcccttctgggccagtttgtaaatctgctccttcacgtcgtcagatgtcaacttcaaccaagtggggacgctgcgtcgatagggcaaagccgactgggacaggcccttcccgggagcatgcatgcgacccatgatggcggcagtcaggcagcgaaaggccc

SEQ ID NO: 28435 - DNA, 1914 bp, Macaca Mulatta
  misc_feature (1)...(1914): n = A,T,C or G
agattggttcattaaaaatactgaaggaaatcagtgataatcctcaaatcagacgtaatattgttgaccttgggggcttaccaattatggtgaatatacttgattctccacacaagagtctgaaatgtttggcagccgaaactattgcgaatgttgccaagtttaaaagagcacggcgggtggtgaggcagcacgggggtatcaccaaactggnnnnnnnnnnnnnnnnnnnnnnnnnnnnnnnnnnnnnnnnnnnnnnnnnnnnnnnnnnnnnnnnnnnnnnnnnnnnnnnnnnnnnnnnnnnnnnnnnnnnnnnnnnnnnnnnnnnnnnnnnnnnnnnnnnnnnnnnnnnnnnnnnnnnnnnnnnnnnnnnnnnnnnnnnnnnnnnnnnnnnnnnnnnnnnnnnnnnnnnnnnnnnnnnnnnnnnnnnnnnnnnnnnnnnnnnnnnnnnnnnnnnnnnnnnnnnnnnnnnnnnnnnnnnnnnnnnnnnnnnnnnnnnnnnnnnnnnnnnnnnnnnnnnnnnnnnnnnnnnnnnnnnnnnnnnnnnnnnnnnnnnnnnnnnnnnnnnnnnnnnnnnnnnnnnnnnnnnnnnnnnnnnnnnnnnnnnnnnnnnnnnnnnnnnnnnnnnnnnnnnnnnnnnnnnnnnnnnnnnnnnnnnnnnnnnnnnnnnnnnnnnnnnnnnnnnnnnnnnnnnnnnnnnnnnnnnnnnnnnnnnnnnnnnnnnnnnnnnnnnnnnnnnnnnnnnnnnnnnnnnnnnnnnnnnnnnnnnnnnnnnnnnnnnnnnnnnnnnnnnnnnnnnnnnnnnnnnnnnnnnnnnnnnnnnnnnnnnnnnnnnnnnnnnnnnnnnnnnnnnnnnnnnnnnnnnnnnnnnnnnnnnnnnnnnnnnnnnnnnnnnnnnnnnnnnnnnnnnnnnnnnnnnnnnnnnnnnnnnnnnnnnnnnnnnnnnnnnnnnnnnnnnnnnnnnnnnnnnnnnnnnnnnnnnnnnnnnnnnnnnnnnnnnnnnnnnnnnnnnnnnnnnnnnnnnnnnnnnnnnnnnnnnnnnnnnnnnnnnnnnnnnnnnnnnnnnnnnnnnnnnnnnnnnnnnnnnnnnnnnnnnnnnnnnnnnnnnnnnnnnnnnnnnnnnnnnnnnnnnnnnnnnnnnnnnnnnnnnnnnnnnnnnnnnnnnnnnnnnnnnnnnnnnnnnnnnnnnnnnnnnnnnnnnnnnnnnnnnnnnnnnnnnnnnnnnnnnnnnnnnnnnnnnnnnnnnnnnnnnnnnnnnnnnnnnnnnnnnnnnnnnnnnnnnnnnnnnnnnnnnnnnnnnnnnnnnnnnnnnnnnnnnnnnnnnnnnnnnnnnnnnnnnnnnnnnnnnnnnnnnnnnnnnnnnnnnnnnnnnnnnnnnnnnnnnnnnnnnnnnnnnnnnnnnnnnnnnnnnnnnnnnnnnnnnnnnnnnnnnnnnnnnnnnnnnnnnnnnnnnnnnnnnnnnnnnnnnnnnnnnnnnnnnnnnnnnnagcttctgctggatatggttgggtcccctgaccaggatctccaggaagctgcagctggttgtatatccaatatccgcaggctggctcttgctacagagaaggccagatacacttgaaatttaaatggacattacaagccatcaaattctacatgacacaggacatgtcactcccatggccaggaagcctaccttgggaaacatttataagcaaaccctttcaaccgccgaaatgaaaacgcataaatcaaaaatgcacagaatgtttttcatctgaaaattgcctggagacttttgtttccatttaatgttttagggatatgacatgtagtaagatggaaagccaataaacctctgataagtttctaagaatttgagaatatacgtatacagtatatatagagttcagtgatgcttttgtatttgtg

SEQ ID NO: 28436 - DNA, 145 bp, Macaca Mulatta
gtttagaaacctgctgaagtggtatgctaaggagttcaaagacccgctgctgcaggagcccccagcctggtttaagtcctttctgttttgcgagcttgtgtttcagctgcctttctttcccatgcaacgtatgccttcctcaaag

SEQ ID NO: 28437 - DNA, 568 bp, Macaca Mulatta
tccattgcacacacagagacttttgccccgattctctatgtctttaaattccagaatgaagaagaggtctttgcatggaataatgaagtaaaacagggactttcaagtagcatctttaccaaagatctgggcagaatcttccgctggcttggacctaaaggatcagactgtggcattgtaaatgtcaacattccaacaagtggggctgagattggaggtgcctttggaggagaaaagcacactggtggtggcagggagtctggcagtgatgcctggaagcactacatgagaaggtctacttgtactatcaactacagtaaagaccttcctctggcccaaggaatcaagtttcagtaaaggtgttttagatgaacattccttaatttgaagttttccggcagctgtttttgaagaagacaaagaatattaaagttttccctgaataaaggcatcaccatgactgtgacagtgactaatccccctatgagcccaagggcctgattaaatcaagagagccctttttttaaaatcgaaataaaattgttacaacatagtcatatttactagc

SEQ ID NO: 28438 - DNA, 536 bp, Macaca Mulatta
  misc_feature (1)...(536): n = A,T,C or G
acatctaactgaagcacagcagatgtctactggaatacaatcagcgaaacttacctgaaggggttgccnnnnnnnnnnnnnagacacagttagaacagttaccagaacacatcaaggagccaatctgggaaacactatcagaagaaaaagaagaaagcaagtcataaagcctcagggaggccatttgtgcctgaatttggaatgagggtgggccagatgagtatgtttaagcggagagtgcttccagctgagatgatttgagtctgcctaactgttccattgagttcttgtgccttcatcagctgagagcagggaatggcacttttaatggaagaaccacttttatctgttctttttatacatgtcattgtttcagttctgatttcaacaaacatgagcaaaccactttgactcaaagtggaaagtgaaaattctattttgttatgctactagtgttcaattattagtttgcaccatttttaatttatgtcagttgatgcatctgaaaataagtgcttgaagtgttcacaccctta

SEQ ID NO: 28439 - DNA, 470 bp, Macaca Mulatta
ggggctcaaagatgaaccctttgtggaataccatggtcatcggaggctatgctgatggagagagcttcctcggttatgtggacatgcttggtgtagcctatgaagccccttcgctggccactggttatggtgcctacttggctcagcctctgctgcgagaagttctggagaagcagccagtgctaagccagaccgaggcccgtaacctagtagaacgctgcatgcgagtgctgtactaccgagatgcccgttcttacaaccggtttcaaatcgccactgtaactgaaaaaggtgttgaaatagagggaccattgtctgcagagaccaactgggatattgcccacatgatcagtggctttgaatgaaatacagatgcattatccagaactgaagttataccctacttttaactttgaacttggctggttcaaagataagactcttcttttgtaaagtaaataaattcttca

SEQ ID NO: 28440 - DNA, 554 bp, Macaca Mulatta
  misc_feature (1)...(554): n = A,T,C or G
ggcacgaggattttgtactccggaatatttggtactgtgtttcactcaaaccactgacttaacagatactactgtgtataacatgtactaaatattacagttattgtgcataacagattgttcctcttctattcgtgtgtatacaggcaattcatgttttaatgtaaataaataccattttgcagnnnnnnnnnnnnnnnnnnnnnnnnnnnnnnnnnnnnnnnnnnnnnnnnnnnnnnnnnnnnnnnnnnnnnnnnnnnnnnnnnnnnnnnnnnnnnnnnnnnnnnnnnnnnnnnnnnnnnnnnnnnnnnnnnnnnnnnnnnnnnnnnnnnnnnnnnnnnnnnnnnnnnnnnnnnnnnnnnnnnnnnnnnnnnnnnnnnnnnnnnnnnnnnnnnnnnnnnnnnnnnnnnnnnnnnnnnnnnnnnnnnnnnnnnnnnnnnnnnnnnnnnnnnnnnnnnnnnnnnnnnnnnnnnnnnnnnnnnnnnnnnnnnnnnnnnnnnnnnnnnnnnnnnnnnnnnnnnnnnnnnnnnnnnnnnnnnnnnnnnnnnnnnnnn

SEQ ID NO: 28441 - DNA, 317 bp, Macaca Mulatta
  misc_feature (1)...(317): n = A,T,C or G
cgcaaggccacgatcctggtgcagctcctcctcttcaccctcatcggcctggtcacagcctttgtgcccagctttgagctctacatggccctgcgctttgctgtggctactgccatcgctggatttgccttcagcaatgtcaccctacnnnnnnnngggtggggcccacatggaggacgcaagccgtggtcctgacccagtgcaccttctccctcgggcagatggtgctcgcgggactcgcctatggtttccgcaactggaggctccttcagatcactggcactgcacctggcttactgctcttcttctacttctgg

SEQ ID NO: 28442 - DNA, 774 bp, Macaca Mulatta
  misc_feature (1)...(774): n = A,T,C or G
attttggttaattaaccgnnnnnnnnnnnnnnnnnnnnnnnnnnnnnacctagcaatgctcccgtttttattgtaagaattttcttttctccctaagagactttctgttagactctttatatatgagatgcttgtttgaatttggtagtctgtaacattttccagctcatgtgaaaatggaaaactagaacctgaactattatctacaacattgccaaagtccgggggtaaagctaaaagttgataaatagacaatttattgatttatgtgtgtcnnnnnnnnnnnnnnnnnnnnnnnnnnnngtgtgtatatgtatatatcacaaagttgtattttaaatatcctttcttttaatttaagggatgtcaaataaatgaaaggaggttaaaaatagccaaaataaatgagctgtaaaggtctataacatactaaaaaaggcagtttcaggtatgtaaggaaaggagcattatactcacctagaaagtgagatcttggctatggctggaggtcagtcactttatggcataaattatggttttatttgagaggtacaaagactgtttttaattcaaattgtgcatttattggcatctaaatctagcatgattttacttaaagcacaaaagaaataccacacaataccaaattacagcaaaagttacaataaatacaacaaaattttcctttggctagaaatcttacgttatacctgaaaaattggttttaaaaaatgttcatcatggctgggcacnnnnnnnnnnnnnnnnnnnnnn

SEQ ID NO: 28443 - DNA, 1385 bp, Macaca Mulatta
tgggaaaggaaaagactcatatcaacattgtcatcattggacatgtagattcgggcaagtccaccactactggccatctgatctacaaatgtggtggcatcgacaaaagaaccattgaaaaatttgagaaggaggctgctgagatgggaaagggctccttcaagtatgcctgggttttagataaactgaaagctgagcgggaacgtggtatcaccattgatctctccttgtggaaatttgagaccagcaagtactatgtgactatcattgatgccccaggacacagagacttcatcaaaaacatgattacagggacatctcaggctgactgtgctgtcctgattgttgctgctggtgttggtgaatttgaagctggtatctccaaaaatgggcagacccgagagcatgctcttctggcttacacactgggtgtgaaacaactaattgttggtgttaacaaaatggattccactgagccaccctacagccagaagagatatgaggaaattgttaaggaagtcagcacttacataaagaaaattggctacaaccccatcacagtagcatttgtgccaatttctggttggaatggtgacagcatgctggagccaagtgctaacatgccttggttcagggaatggaaggtcacccgtaaggatggcattcccagtgaaccacgctgcttgaggctctggactgcatcctacccaccaactcgtccaactgacaagcccttaaagcctgcctctccaggatgtctacaaaattggtggtattggtactgttcctgttggctgtgactggtgttctcaaacccagtatggtggtcacctttgctgcagtcagtgttacaactgaagtaaaagtctgtcgaaatgcaccatgaagctttgagtgaagttcttcctggggacaatgtgggcttcaatgtcaagaatgtgtctgtcaaggatgttcatcttggcaacgttgctggtgacagcaaaaacgacccaccaatagaagcagctggcttcaccactcaggtgattatcctgaaccatccaggccaaatcagcactggctatgcccctgtactggattgccacatggttcatactgcatgcaagtttgctgagctgaaggaaaagattgatcgccattctggtaaaaagctggaagatggccctaaattctttaagtcgggtgatgctgccatcgttgatgtggttcctggcaaacccatgtgtgttgagagcttctaggactatccacttctgggtcgctttgctgttcatgatgtgagacagacagttgccatgggtgtcatcagagcagtggacaagaaggctgctggagctggcaagctcaccaagtctgcccagaaagctcagaagggtaaatga

SEQ ID NO: 28444 - DNA, 186 bp, Macaca Mulatta
agaaatatccgcagcccaaagggcagaagaagaagaagatcgtcaagtacggcatgggtggcctcatcatcctcttcctcatcgccatcatctggttcccgctgctcttcatgtcgctggtgcgttccgtggtcggggtcgtcaaccagcccgtcgatgtcaccgtcaccctcaagctgggcggct

SEQ ID NO: 28445 - DNA, 904 bp, Macaca Mulatta
aatggaaacatttttgagatttttggtcaaataagatttttaggcgtttaagagaaaatattgaattgtgttagattccctcagaaaatgtacgcagtggtatctgaaagaggtaaaagctgggacttcccttttttttcaggtcacacagtacttgcttgacaaagaccttatcatagatgaagatacgctatatgagctgtcactaaaaattgaacctcgactccctgcttgaagatctggccttgcccctgagtccacgggatgttcatggaaagcaggacagacagaattgtgtatgccttgcctcacatggtacagcacgaagccagtctcctttctccaccaaagaagatagaaccagactggaattctgtctccattcagagagaaacccagctgtttgggtcaaagacagatgcttcaaacttgggtgggaaggtgaaagatggctatttagaaagctggtggcacgttttacgtaagggaatgttagatgggagatggtagttgccattttaacaaagcaggtaaattggtaaattttaaactctgtccgtgttctgttagaactcagggacaaggatccatgaaaaagacctgtgatgtttctctggcactatactggcctgggcacacctaccaatcttctaggatttgactggttccattacatttccttttggtataagcttcacagaaaagctgacacttcctctacagagatggaccaacacataagcaatttcagtctacagcatgtgcatggttttcagtgcattctaaatatttctatgtgaggaatggtaccttctgaaactggctttccagtctttaggcaacgggataggaaagaaagaatgaaacacaaatggatttgtatgtaacatttccttaattaaag

SEQ ID NO: 28446 - DNA, 1912 bp, Macaca Mulatta
  misc_feature (1)...(1912): n = A,T,C or G
tgccttacctctaccgggcccccggttacaggcacacccnggttcccaaggacgcccggaccaccctttcctcaggccagaactttgagcaactgaggcaggagtgcctgcagagaggcaccctttttgaggatgcagactttccggccagcaattcctccctgttctacagcgagaggccgcaggtcccctttgtgtggaaacgaccaggggnnnnnnnnnnnnnnnnnnnnnnnnnnnnnnnnnnnnnnnnnnnnnnnnnnnnnnnnnnnnnnnnnnnnnnnnnnnnnnnnnnnnnnnnnnnnnnnnnnnnnnnnnnnnnnnnnnnnnnnnnnnnnnnnnnnnnnnnnnnnnnnnnnnnnnnnnnnnnnnnnnnnnnnnnnnnnnnnnnnnnnnnnnnnnnnnnnnnnnnnnnnnnnnnnnnnnnnnnnnnnnnnnnnnnnnnnnnnnnnnnnnnnnnnnnnnnnnnnnnnnnnnnnnnnnnnnnnnnnnnnnnnnnnnnnnnnnnnnnnnnnnnnnnnnnnnnnnnnnnnnnnnnnnnnnnnnnnnnnnnnnnnnnnnnnnnnnnnnnnnnnnnnnnnnnnnnnnnnnnnnnnnnnnnnnnnnnnnnnnnnnnnnnnnnnnnnnnnnnnnnnnnnnnnnnnnnnnnnnnnnnnnnnnnnnnnnnnnnnnnnnnnnnnnnnnnnnnnnnnnnnnnnnnnnnnnnnnaagtgctgcggaatctgaggcccggacgccgttcggtcttattaagggtcacgcctacagtgtaacgggaattgaccaggtannnnnnnnnnnnnnnnnnnnnnnnnnnnnnnnnnnnnnnnnnnnnnnnnnnnnnnnnnnnnnnnnnnnnnnnnnnnnnnnnnnnnnnnnnnnnnnnnnnnnnnnnnnnnnnnnnnnnaaagtggagatctgcaacctcactcccgatgccctggaggaagatgcggtccacaaatgggaggtgacggtccatcagggaagttgggttcgtggctccacggctgggggctgccgcaatttcctgnnnnnnnnnnnnnnnnnnnnnnnnnnnnnnnnnnnnnnnnnnnnnnnnnnnnnnnnnnnnnnnnnnnnnnnnnnnnnnnnnnnnnnnnnnnnnnnnnnnnnnnnnnnnnnnnnnnnnnnnnnnnnnnnnnnnnnnnnnnnnnnnnnnnnnnnnnnnnnnnnnnnnnnnnnnnnnnnnnnnnnnnnnnnnnnnnnnnnnnnnnnnnnnnnnnnnnnnnnnnnnnnnnnnnnnnnnnnnnnnnnnnnnnnnnnnnnnnnnnnnnnnnnnnnnnnnnnnnnnnnnnnnnnnnnnnnnnnnnnnnnnnnnnnnnnnnnnnnnnnnnnnnnnnnnnnnnnnnnnnnnnnnnnnnnnnnnnnnnnnnnnnnngggatatggatggaaatgtagacattgaccttcntganagcccccaaagccaactccgcctgaccaggagacagaggaggagctgcggtttcgagctctgtttgaacaagtcgctggtgagnnnnnnnnnnnnnnnnnnnnnnnnnnnnnnnnnnnnnnnnnnnnnnnnnnnnnnnnnnnnnnnnnnnnnnnnnnnnnnnnnnnnnnnnnnnnnnnnnnnnnnnnnnnnnnnnnnnnnnnnnnaccagcgggaatgggaagctggagtttgatgaattcaaagtcttctgggacaagctgaagcagtggataaccttttccttcggtttgatgctgacaagtccggcaccatgtctacctatgaactgcggactgcactgaaagctgcagnnnaggctttcagctgagcagccacctcctacagctgatcgtgctcaggtatgcggatgaggagctccagatggacttcgatgacttcctcaactgccttgtccggctggagaatgcgagccg

SEQ ID NO: 28447 - DNA, 171 bp, Macaca Mulatta
atccttgaattctcatgggtaatctcaattgtacggttttgaaacaagtttttcttttctttcctagaagaacacaaacagaacgggcaggataaggactcttccataacaagactatgaagccacttccacaccaattccaggccacctaatcccatcccaggaggccac

SEQ ID NO: 28448 - DNA, 216 bp, Macaca Mulatta
agcgtccagacccattccgtcgacaaagcgtggtcttagatcccatgttacaggacggtacctttagcagccggagggcaacgttcatgagagactggtccaacaagatgcctgacacggcttacgaacgcaagctaaagagcctcatggagaaaagcaccgagcctaagatggaaaccataaggatgctgaagccagaggaggtgctgagctgcc

SEQ ID NO: 28449 - DNA, 741 bp, Macaca Mulatta
actcagctggacagcccacgcctgtccctctggagctgggctgctgctgcctcaggaccccccctccaaccccagacagagcctgagctggccagggccgggagggcgggagggagggagcgggggtgggccgtgtacagcgtcagcacctgggcaggtctacggagctgtgagacgtgatgattaaaatccctgatgtttctctttgcagaagagttcttgtcggagcagggggaagcccctgggggctggaggtgggcttctggggaggcctaaaagtcccagacagagcagggcaggtcctggcctcaggtccgcagccatgggggaccgacttggagccaaactcacagggcctcagggagtgtccccggactcctagatgtggggccgtggcccacctgagcacacacaggtaggctcgcacaagcccacagagcgcctgggttcttccacccaaagcgaggccacagtatggtcgagaccagggccagtgctagtgcgtttaggtgttgtggtcacatcagacccgagccaaggaacgcaggaactgtggctgtctcatctctgtggcagcaacaggtgtggcatgatggccggagccggggccacgactgcctgaccttggctgaccggtcctgagacacaggagggagggactcgtgttccatctgtgcagtggtgccgctccaagtcccattctcactcgggcgacctcagcccggtggtctcctcgcttct

SEQ ID NO: 28450 - DNA, 167 bp, Macaca Mulatta
aaacctcttggccaatccttttaactgtaactgctacctggcttggttgggagagtggctcaggaagaagagaattgtcacgggaaatcctcgatgtcaaaaaccgtacttcctaaaagaaatacccatccaggatgtggccattcaggacttcacttgtgatgacg

SEQ ID NO: 28451 - DNA, 802 bp, Macaca Mulatta
cctccaccaccgtccccaagatgctggccaatcacatacttgggactcagaccatctccttctctagctgtctcatgcagatgtgttttctctgtatgttttctgacatgaacaatttcctcctggctgtgatggcctatgaccgctttgtcactgtgtgccaccccttccattacgcagcaaagatgacccatcagctctgtgccctgctggtcactggatcacgggtggttaccaacttgaatgctctgctgcacaccctgctgatggctcgactctcattctgtgcagacaacaccatcccccacatcttctgtgatgtgactcccctcctgaaactctcctgttcagacacacacctcaatgaggtgatgattcttactgagactgccgtagtcatgatcaccccatttctttgcatcctggcttcctatatgcacatcgcctgtgccttcttgagggtcctatccatgaagggaagatggaaagccttttccacctgtggctcccacctggctgtggttctcctcttctgtggtaccatcatatctctgtatttcagcccttcatcctcccactcagctcagagagatatagcagctgctgtgatgttcacagtggtgactgccatgatgaatccttttatctacagcctgaggaacaaggacataaaaggggctcttgtaaaagtgattgctgtgaaattcttttctgttcaataattatatggactaagaaattcctagaaggagctaatttctgagataatcctgtttattttttctactgtatgaaacttagc

SEQ ID NO: 28452 - DNA, 229 bp, Macaca Mulatta
ccaggaactcaccccacaaggctgtcctctgctctggtgagttcagggctcctgcaacttggtctgcagtgaccctggggttcctggttaggacccatgttctctaggtcctagcaccctgcatggggcagtgtttgtgacattgggcccagctattctgagggaaggactccaaccttcatcaggcgtggcccgagatgtgggtggccctgggcatggggcatggatg

SEQ ID NO: 28453 - DNA, 314 bp, Macaca Mulatta
  misc_feature (1)...(314): n = A,T,C or G
gctttccccacaaataaaccagagaaagatgcaagacatgtagtaaaagtggnnnnnnnnnnnnnnnnnnnnnnnnnnnnnnnnnnnnnnnnnnnnnnnnnnnnnnnnnnnnnnnnnnnnnnnnnnnnnnnnnnnnnnnnnnnnnnnnnnnnnnnnnnnnnnnnnnnnnnnnnnnnnnnnnnnnnnnnnnnnnnnnnnnnnnnnnnnagttacagatttatggtaatagaaagactaggaatagatttacagaagatctcaggccagaatggtgcctttaaaaagtcaactgtcctgcaattaggtatccgaat

SEQ ID NO: 28454 - DNA, 1264 bp, Macaca Mulatta
  misc_feature (1)...(1264): n = A,T,C or G
ggcggccatgttatcaagtgcagagtcattttctaaacatgctcatgagattatgttgaaatacaaagataagaagtggtaccagttctgacaaccagaatccaataagtccaacttcagccagaaggaaaaaagttttccatttttattacattatttaaaaaagttaactttaaagggatgttcgtcactgaatactgttctttcctagcacaatcatgcactgttttacctcagtcatgtggctttaactgaggagtgttcacacgcactcgaaatggagtatatgatgtgtgccagttatgagttgacaatttgggaattaaacaggtcacacgtgacagatgaagaaaccaagggggattctgaggagacctggtgcagggactaatcctggatcattcctgtattaaactttcatatgccaaaagggtttgtgccattttatctgccgtcagtgtttgacctgtttggggcagaggcaataagtcagaagtcttgaagctgaaatagttatatatgtgtcattggactggattataagcagctgtcttggactttctcctctcttaacactgactggtcatcagtatcattaatgaaaaagaaacaaactgttatcatctctttagacaagtaagctgaaatggtggggctttaaatagtaaaaaaccatacacatagttggacttggtgtatggagctactcttggattcttgttattatagacttgtatttagttcatattttgtcaaaagcaaaacaagaagatacatcacttttcattgaaaagaaaagtgtagagcatgaccgaattgctcatcattctgggagtttccatgtagtggctatgcagtgtggaaagtgagaaaaacctccattgtggtgaggagaatacttcaatgtcccttggccttgttctcattaattcagctaaagggggatttgaccaaaataacactggttaaatttgaaaaaatgttgaaattggctatgtttttaacttttgccttgaatttttataaagtgttttaacccaaatttaccttttgcctttctttaatttaaaattgnnnnnnnnnnnnnnnnnnnncccctaatttccaccaataaggcctccacttccccttttttaaaaacgccccctctaattgggctaaaccgggttcccaaaacaccttccggggggattgacaccccctgttaaaccccctccaatggccacatgtgcctatgccccccggtgccaaaattttaccagga

SEQ ID NO: 28455 - DNA, 416 bp, Macaca Mulatta
  misc_feature (1)...(416): n = A,T,C or G
ccctccaggcactgaagcgtaagaagaggtatgagaagcagctggcgcagatcgacggcacattatcaaccatcgagttccagcgggaggccctggagaatgccaacaccaacaccgaggtgctcaagaacatgggctatgccgccaaggccatgaaggcggcccatgacaacatgnnnnnnnnnnnnnnnnnnnnnnnnnnnnnnnnnnnnnnnnnnnnnnnnnnnnnnnnnnnnnnnnnnnnnnnnnnnnnnnnnnnnnnnnnnnnnnnnnnnnnnnnnnnnnnnnaggatgagctcatggcagaattagaagaactagaacaggaggaactagacaagaatttgctggaaatcagtggacccgaaacagtccctctaccaaatgttccctctatagccctaccatcaaaaccc

SEQ ID NO: 28456 - DNA, 319 bp, Macaca Mulatta
  misc_feature (1)...(319): n = A,T,C or G
gcaactgcactcaagcgtgcggacaggcaacctggagacatgtctgctcctgctatccctgggtgcccaggccaacttcttccacccagagaagggcacaacacctctgcacgtggctgccaaggcagggcagatactgcaggccgagctgcttgtagtgtatggggctgaccctggctcccctgatgttaatggccgcacacccattgactatgccaggncaggcaggcggggcaccatgagctggcggaaaggctggttgaatgccaatatgagctcactgaccggctggccttctacctctgtggacgcaagccgg

SEQ ID NO: 28457 - DNA, 523 bp, Macaca Mulatta
  misc_feature (1)...(523): n = A,T,C or G
cgtgggcggcgggaatccgcggacatcgagtccggtctaggctcccgagtccgcgctcctgggcgggaggccccgtcggggtcttgcatggggctgctacatgcctagatcgcactgactgcttgattcttgtcgttttctccagtatatggcgtatgacgccggtgcagcgggggggcccggaggccctggtggccctgggatggggaaccgcggtggcttccgcggaggtttcggcagtggcatccggggccggggtcgcggccgtggacgnnnnnnnnnnnnnnnnnnnnnnnnnnnnnnnnnnnnnnnnnnnnnnnnnnnnnnnnnnnnnnnnnnnnnnnnnnnnnnnnnnnnnnnnnnnnnnnnnnnnnnnnnnnnnnnnnnnnnnnnnnnnnnnnnnnnnnnnnnnnaggaatctgagatcattgactttttcttgggggcttctctcaaagacgaggttttgaagattatgccggtgcagaagcagacccgtgctggccagcgcaccaggtttaag

SEQ ID NO: 28458 - DNA, 1015 bp, Macaca Mulatta
  misc_feature (1)...(1015): n = A,T,C or G
gtgaccgggaggatcttcccaatctacctcatcgtccacctgattgcctcctgcatcgacccagccgacttcaatgtcagactcatgaagaactactctcagcccatgccgatcttcgacagatcgaaacacgcacacgtgatccagaaccagttctgccacctgtgcaaggtcaccgtgaacaagaaaaccaaacactgcatttcctgcaataagtgtgtatccggcttcgaccaccactgcaagtggatcaacaactgcgtgggaagccgtaattactggtnnnnnnnnnnnnnnnnnnnnnnnnnnnnnnnnnnnnnnnnnnnnnnnnnnnnnnnnnnnnnnnnnnnnnnnnnnnnnnnnnnnnnnnnnnnnnnnnnnnnnnnnnnnnnnnnnnnnnnnnnagatgtcaagaatacgaacacgtggctgctgttccttcccctgttcccggtgcaggtgcagaccctgatagtcgtgatcatcgggatggtcgtgctcctgctggacctgcttggcttggtgcagctgggccagctgctcatcttccacatctacctgnnnnnnnnnnnnnnnnnnnnnnnnnnnnnnnnnnnnnnnnnnnnnnnnnnnnnnnnnnnnnnnnnnnnnnnnnnnnnnnnnnnnnnnnnnnnnnnnnnnnnnnnnnnnnnnnnnnnnnnnnnnnnnnnnnnnnnnnnnnnnnnnnnnnnnnnnnnnnnnnnnnnnnnnnnnnnnnnnnnnnnnnnnnnnnnnnnnnnnnnnnnnnnnnnnnnnnnnnnnnnnnnnnnnnnnnnnnnnnnnnnnnnnnnnnnnnnnnnnnnnnnnnnnnnnnnnnnnnnnnnnnnnnnnnnnnnnnnnnnnnnnnnnnnnnnnnnnnnnnnnnnnnnnnnnnnnnnnnnnnnnnnnnnnnnnnnnnnnnnnnnnnnnnnnnnnnnnnnnnnnnnnnnnnnnnnnnnnnnnncaacaagaaagaagacagcccatgaaaaccgacagtgctgaaagtgaagcctga

SEQ ID NO: 28459 - DNA, 738 bp, Macaca Mulatta
  misc_feature (1)...(738): n = A,T,C or G
ggatgacacctgagaacggattctggactatgggactgactgatgggaaaaagtatcggactctaactgagcccagaaccaacctggaacttcctgaatcccctaggaaagtgggggtcttcctggactatgagactggagatatctcattctacaatgctgtgaatggatcccatattcatactttcctggacgtctccttctctgagcctctatatcctgttttcagaattttgactttggagcccactgccctgaccatttgtccagcgccaaaagaagaagagagttcctccaattctgaccgagtggtgatcattaggtgtctccctagagacaccagtgaccctgggcttagctagggaaagtggggagcctcaggctgaagtaacttgtctctgcttctccctgcccagcttagagctgagggcctccccctctatagcaaccaatcacaaccataaagctacaggcacacactgaagcactttactgatactcattcaattattcatatgccagttgtttgagtttagtaccaccttattgtcctcttagacagataaggaaactggggtgcagaaaagtgaattaactttacaaagtagacatgactacttaataacagagctgggatctaaacagcagtaactaacattaatggagaacttaaaaatgttnctgaagtgctgtgttatgaagctttggtgggatgtccactccttttaatccctccaa

SEQ ID NO: 28460 - DNA, 731 bp, Macaca Mulatta
gggtcatggccatcggcttcgtgggctgcctgggcgccatcaaggagaacaagtgcctcctgctcgctttcttcctgctgctgctgctggtgttcctgctggaggccaccattgccatcctcttcttcgcctacacggacaagattgacaggtacgcccagcaagacctgaagaaaggcttgcacctgtacggcacgcagggcaacgtgggcctcaccaacgcctggagcatcatccagactgacttccgctgctgtggtgtctccaactacactgactggtttgaggtgtacaacgccacgcgggtgcctgactcctgctgcctggagttcagtgagagctgcgggctgcacgcacctggcacctggtggaaggcgccgtgctacgagacggtgaaggtgtggctccaggagaacctgctggctgtgggcgtctttgggctgtgcacggcactggtgcagatcctaggcctgaccttcgccatgaccatgtactgccaggtggtcaaggcagacacctactgcgcataggctgcctgcttctctgccaaaaggacgcccacagggaagatgggccgtgcccacagcttgccttttcccaccaaccagccttcgggtgcctctgcccccaaggcttgggaagaaaggcaagggaagggaaacagggtgcccccgggaagccccccccggtaaacccctggttttttcttaaagaaagggcccccctggggt

SEQ ID NO: 28461 - DNA, 3947 bp, Macaca Mulatta
  misc_feature (1)...(3947): n = A,T,C or G
cagttctgaaaagactggtagtgacaatgatgttgaagatccagtagatcttccctactgttcacagagaagaagcgatatcagtactctagtctggttaagctagtgtcagtgttcctnnnnnnnnnnnnnnnnnnnnnnnnnnnnnnnnnnnnnnnnnnnnnnnnnnnnnnnnnnnnnnnnnnnnnnnnnnnnnnnnnnnnnnnnnnnnnnnnnnnnnnnnnnnnnnnnnnnnnnnnnnnnnnnnnnnnnnnnnnnnnnnnnnnnnnnnnnnnnnnnnnnnnnnnnnnnnnnnnnnnnnnnnnnnnnnnnnnnnnnnnnnnnnnnnnnnnnnnnnnnnnnnnnnnnnnnnnnnnnnnnnnnnnnnnnnnnnnnnnnnnnnnnnnnnnnnnnnnnnnnnnnnnnnnnnnnnnnnnnnnnnnnnnnnnnnnnnnnnnnnnnngcaagaaggtaagagtactgctaatgctgaagataatgaaatggaagaagagacagatgatgggccattactggttcctcgagtaaaagtggcagaagatggctctattattttggatgaagaaagnnnnnnnnnnnnnnnnnnnnnnnnnnnnnnnnnnnnnnnnnnnnnnnnnnnnnnnnnnnnnnnnnnnnnnnnnnnnnnnnnnnnnnnnnnnnnnnnnnnnnnnnnnnnnnnnnnnnnnnnnnnnnnnnnnnnnnnnnnnnnnnnnnnnnnnnnagccatcagcatggtaggaactgacttttctatgatcggacaactttttcctcacagagcaaggatagaaattaagnnnnnnnnnnnnnnnnnnnnnnnnnnnnnnnnnnnnnnnnnnnnnnnnnnnnnnnnnnnnnnnnnnnnnnnnnnnnnnnnnnnnnnnnnnnnnnnnnnnnnnnnnnnnnnnnnnnnnnnnnnnnnnnnnnnnnnnnnnnnnnnnnnnnnnnnnnnnnnnnnnnnnnnnnnnnnnnnnnnnnnnnnnnnnnnnnnnnnnnnnnnnnnnnnnnnnnnnnnnnnnnnnnnnnnnnnnnnnnnnnnnnnnnnnnnnnnnnnnnnnnnnnnnnnnnnnnnnnnnnnnnnnnnnnnnnnnnnnnnnnnnnnnnnnnnnnnnnnnnnnnnnnnnnnnnnnnnnnnnnnnnnnnnnnnnnnnnnnnnnnnnnnnnnnnnnnnnnnnnnnnnnnnnnnnnnnnnnnnnnnnnnnnnnnnnnnnnnnnnnnnnnnnnnnnnnnnnnnnnnnnnnnnnnnnnnnnnnnnnnnnnnnnnnnnnnnnnnnnataaatgtcaggctataaggcccgaggtaaaggaaggtgaatgcagtaaggagcagatgctttcctgcacacaaaacgtagatggcattgtgggttttgcctccagtgaaaaagttgagaaaagaactgaccccatcctttcattaagnnnnnnnnnnnnnnnnnnnnnnnnnnnnnnnnnnnnnnnnnnnnnnnnnnnnnnnnnnnnnnnnnnnnnnnnnnnnnnnnnnnnnnnnnnnnnnnnnnnnnnnnnnnnnnnnnnnnnnnnnnnnnnnnnnnnnnnnnnnnnnnnnnnnnnnnnnnnnnnggaaattgatcaaacagaaaatgttaaaccgatgttgagaggttgcttccagagacctaaacccaatttgtcaagggctgggaagaaatcggttctttcacaagacaaaacagaggcagagagcaagaattcacattcaaaaacttcagttgaaaagnnnnnnnnnnnnnnnnnnnnnnnnnnnnnnnnnnnnnnnnnnnnnnnnnnnnnnnnnnnnnnnnnnnnnnnnnnnnnnnnnnnnnnnnnnnnnnnnnnnnnnnnnnnnnnnnnnnnnnnnnnnnnnnnnnnnnnnnnnnnnnnnnnnnnnnnnnnnnnnnnnnnnnnnnnnnnnnnnnnnnnnnnnnnnnnnnnnnnnnnnnnnnnnnnnnnnnnnnnnnnnnnnnnnnnnnnnnnnnnnnnnnnnnnnnnnnnnnnnnnnnnnnnnnnnnnnnnnnnnnnnnnnnnnnnnnnnnnnnnnnnnnnnnnnnnnnnnnnnnnnnnnnnnnnnnnnnnnnnnnnnnnnnnnnnnnnnnnnnnnnnnnnnnnnnnnnnnnnnnnnnnnnnnnnnnnnnnnnnnnnnnnnnnnnnnnnnnnnnttcaagagaataataaagcaaataaacttaatcaagtcccaattctaaggactcgatttcagaaaccaaagccaaatatcggaagaggaaccggaaggagagaaatttcctcaaaagaagaagtactagagaagattcttgcctctggggaaatgacagcagcattgagagaaactgtaagactagacacctcaccaaaggagatggtaccagcagagattaatactactaaagaaatgcagtcagatttaaaagaaactggaagaagagccatttctcccagggagaagattctagatgtgattgatgtcaccagggaagtggagacaggtttgaaagcaaggggaagagagatttgtttaagggagaagacaccagaggtgattgatgccactaaggaaatagacaaagatttggaagaaactggaagaagagaaatacccccacatgaaaatggcccagaggaggtcaagcctgtaggtgaaatggagacaaatttaaaagcaactggaaatgagagttccccaagagagaagacaccagaggtgattgatgccactcaggaaatagacaaaaatttggaaaacactggaaaaagaaaaatatccccaaaggaaaatggcccagaggaggtcaagcctgtagatgaaatggagacagatttgaaagcaactggaagagagagttccccaagagagaagacaccagaggtgattgatgctactgaggaaatagagatagatttggaagaaactgaaagagaaatatccccacaggaaaatggcccagaggagatcaagcctctaggtgaaatggagacggattnnnnnnnnnnnnnnnnnnnnnnnnnnnnnnnnnnnnnnnnnnnnnnnnnnnnnnnnnnnnnnnnnnnnnnnnnnnnnnnnnnnnnnnnnnnnnnnnnnnnnnnnnnnnnnnnnnnnnnnnnnnnnnnnnnnnnnnnnnnnnnnnnnnnnnnnnnnnnnnnnnnnnnnnnnnnnnnnnnnnnnnnnnnnnnnnnnnnnnnnnnnnnnnnnnnnnnnnnnnnnnnnnnnnnnnnnnnnnnnnnnnnnnnnnnnnnnnnnnnnnnnnnnnnnnnnnnnnnnnnnnnnnnnnnnnnnnnnnnnnnnnnnnnnnnnnnnnnnnnnnnnnnnnnnnnnnnnnnnnnnnnnnnnnnnnnnnnnnnnnnnnnnnnnnnnnnnnnnnnnnnnnnnnnnnnnnnnnnnnnnnnnnnnnnnnnnnnnnnnnnnnnnnnnnnnnnnnnnnnnnnnnnnnnnnnnnnnnnnnnnnnnnnnnnnnnnnnnnnnnnnnnnnnnnnnnnnnnnnnnnnnnnnnnnnnnnnnnnnnnnnnnnnnnnnnnnnnnnnnnnnnnnnnnnnnnnnnnnnnnnnnnnnnnnnnnnnnnnnnnnnnnnnnnnnnnnnnnnnnnnnnnnnnnnnnnnnnnnnnnnnnnnnnnnnnnnnnnnnnnnnnnnnnnnnnnnnnnnnnnnnnnnnnnnnnnnnnnnnnnnnnnnnnnnnnnnnnnnnnnnnnnnnnnnnnnnnnnnnnnnnnnnnnnnnnnnnnnnnnnnnnnnnnnnnnnnnnnnnnnnnnnnnnnnnnnnnnnnnnnnnnnngatgaagcttccctaatgatatcaagagaaaaagacacatcaggtcacaggaatgaggaggctgtgatattgccatgtacacagactgaaaagaacctttcaccttcaaattcttgtgaacctaaagaggagtctcagtcagcacaagcccaggaaaatgacttagttgtttctgtgggg

SEQ ID NO: 28462 - DNA, 1740 bp, Macaca Mulatta
  misc_feature (1)...(1740): n = A,T,C or G
nggtgatcactgttggaaggcagctgcttgaggtccaaggcagtcagtgtcccctctcttttgcctcgggacagctggttatttatcagactcctaagaagttttccttgctccctagtagaagagagagattatgcagcgggcttttgattgatccaatgggaattacattgatctggtgtctggccttggttcttatcaagtggatcacctctaannnnnnnnnnnnnnnnnnnnnnnnnnnnnnnnnnnnnnnnnnnnnnnnnnnnnnnnnnnnnnnnnnnnnnnnnnnnnnnnnnnnnnnnnnnnnnnnnnnnnnnnnnnnnnnnnnnnnnnnnnnnnnnnnnnnnnnnnnnnnnnnnnnnnnnnnnnnnnnnnnnnnnnnnnnnnnnnnnnnnnnnnnnnnnnnnnnnnnnnnnnnnnnnnnnnnnnnnnnnnnnnnnnnnnnnnnnnnnnnnnnnnnnnnnnnnnnnnnnnnnnnnnnnnnnnnnnnnnnnnnnnnnnnnnnnnnnnnnnnnnnnnnnnnnnnnnnnnnnnnnnnnnnnnnnnnnnnnnnnnnnnnnnnnnnnnnnnnnnnnnnnnnnnnnnnnnnnnnnnnnnnnnnnnnnnnnnnnnnnnnnnnnnnnnnnnnnnnnnnnnnnnnnnnnnnnnnnnnnnnnnnnnnnnnnnnnnnnnnnnnnnnnnnnnnnnnnnnnnnnnnnnnnnnnnnnnnnnnnnnnnnnnnnnnnnnnnnnnnnnnnnnnnnnnnnnnnnnnnnnnnnnnnnnnnnnnnnnnnnnnnnnnnnnnnnnnnnnnnnnnnnnnnnnnnnnnnnnnnnnnnnnnnnnnnnnnnnnnnnnnnnnnnnnnnnnnnnnnnnnnnnnnnnnnnnnnnnnnnnnnnnnnnnnnnnnnnnnnnnnnnnnnnnnnnnnnnnnnnnnnnnnnnnnnnnnnnnnnnnnnnnnnnnnnnnnnnnnnnnnnnnnnnnnnnnnnnnnnnnnnnnnnnnnnnnnnnnnnnnnnnnnnnnnnnnnnnnnnnnnnnnnnnnnnnnnnnnnnnnnnnnnnnnnnnnnnnnnnnnnnnnnnnnnnnnnnnnnnnnnnnnnnnnnnnnnnnnnnnnnnnnnnnnnnnnnnnnnnnnnnnnnnnnnnnnnnnnnnnnnnnnnagatggctttgaaatgtgctgatatttgtaacccatgtcggacctgggaattaagcaagcagtggagtgaaaaagtaacggaggaattcttccatcaaggcnnnnnnnnnnnnnnnnnnnnnnnnnnnnnnnnnnnnnnnnnnnnnnnnnnnnnnnnnnnnnnnnnnnnnnnnnnnnnnnnnnnnnnnnnnnnnnnnnnnnnnnnnnnnnnnnnnnnnnnnnnnnnnnnnnnnnnnnnnnnnnnnnnnnnnnnnnnnnnnnnnnnnnnnnnnnnnnnnnnnnnnnnnnnnnnnnnnnnnnnnnnnnnnnnnnnnnnnnnnnnnnnnnnnnnnnnnnnnnnnnnnnnnnnnnnnnnnnnnnnnnnnnnnnnnnnnnnnnnnnnnnnnnnnnnnnnnnnnnnnnnnnnnnnnnnnnnnnnnnnnnnnnnnnnnnnnnnnnnnnnnnnnnnnnnnnnnnnnnnnnnnnnnnnnnnnnnnnnnnnnnnnncaagtgagtgatgccagccagcattatttatttccgagatttcctctgttggatcatttgaacccacttgttaattgtaagacctgaacatacagcaatatgaatttggctt

SEQ ID NO: 28463 - DNA, 947 bp, Macaca Mulatta
aaagacaggacatggaaacgttaaaggctacaacaggtgccccgtggccccaccgcaccagagcctgcaccccatccaccagcgccacatcactatgcccacaagcgtcccccagcagcaggtatttggcctggcggaacccaaaaggaagccctcgctcttctggcacaccttcaacaggctcacccccttccggaaatgaaaacaggaggctgtgcttccacggagctgggtgtcaagaggagaactgtctttgtttcttgtgtgcttcaatccagggaaggtttcttggacccagtgataaaaacttcctttttgggatcaatgaaggagagaaggtcttggaatcaccttcagtctttggagacccagctgcctttgtggaagggaggagatggtcatgacacaaagctttatcaaaactacacagaaacacccgtgacccgctaggagatggcccagatgtgggacccggtaccgtgctctacagtgagtggcgaggcagcagctgaagccacccctgctgatggtgagcaagtgctgccgctggtcctaacacagcgtccagggctttgcagctcctacggggtgacgaggttagaggatcgcttcggcgtttgattttcaacggtgtcgtcaagacggtgttgacacaatgctgcacatgtctggtccacagttacaaattgagctcttaatctcttctgttaccacgggggacatacagtggccattgaactgacacggtgttcctgggcttgtcacacaaatctaactggagtacagcgcatctggaaagtcctacctgagcgaggggaataccaggagctatctacacagaccaggaaagatagatctcaagacggttagcaggagaactcggagtggaatggaataaccctcgataacataaatacacacaaagagggggcacgttatgaatatct

SEQ ID NO: 28464 - DNA, 136 bp, Macaca Mulatta
agatatgtcttctccaactactatgaagaagcctgaaaagccattgttcagctctgcatctccacaggattcttccccaagactgagcactttcccccagcaccaccatcccggaatacctggagttgcacacagt

SEQ ID NO: 28465 - DNA, 844 bp, Macaca Mulatta
  misc_feature (1)...(844): n = A,T,C or G
aggtggacgaggaggtactcaagtgccagcagggcgtatccagtctggccttcgccctggccttcttgcagcgcatggacatgaagccgctggtggtcttggggctgcccgccccaacggcgccctcgggctgtctttccttctgggaggccaaggcgcagctggctgagagctgcaaggtgctggtggacgcgcttcgacacaacgccgcnnnnnnnnnnnnnnnnnnnnnnnnnnnnnnnnnnnnnnnnnnnnnnnnnnnnnnnnnnnnnnnnnnnnnnnnnnnnnnnnnnnnnnnnnnnnnnnnnnnnnnnnnnnnnnnnnnnnnnnnnnnnnnnnnnnnnnnnnnnnnnnnnnnnnnnnnnnnnnnnnnnnnnnnnnnnnnnnnnnnnnnnnnnnnnnnnnnnnnnnnnnnnnnnnnnnnnnnnnnnnnnnnnnnnnnnnnnnnnnnnnnnnnnnnnnnnnnnnnnnnnnnnnnnnnnnnnnnnnnnnnnnnnnnnnnnnnnnnnnnnnnnnnnnnnnnnnnnnnnnnnnnnnnnnnnnnnnnnnnnnnnnnnnnnnnnnnnnnnnnnnnnnnnnnnnnnnnnnnnnnnnnnnnnnnnnnnnnnnnnnnnnnnnnnnnnnnnnnnnnnnnnnnnnnnnnnnnnnnnnnnnnnnnnnnnnnnnnnnngggtccgggaccctgttcaagaacgccgagcgaatgctacgggtgcgcaggctggacgagctggaccagggccgtctagtggacctggtcaacgccagcttcggcaagaagctcagggacgactacctggcctcgctgcgcccgcggctgcactccatctacgtctccgagggg

SEQ ID NO: 28466 - DNA, 1548 bp, Macaca Mulatta
  misc_feature (1)...(1548): n = A,T,C or G
ctgtctttgcaggaagaagaaaacacctgagtgaccagatgtcccagctccaggtgccttgccagatggccagaaccacacctcttgaagagtgacagnnagtactgtgaagcatggtttctgcacaccttgaatgattggaaccccaaagactcaagaaggagctaaagatcttgaagtagacatgaataaaacannnnnnnnnnnnnnnnnnnnnnnnnnnnnnnnnnnnnnnnnnnnnnnnnnnnnnnnnnnnnnnnnnnnnnnnnnnnnnnnnnnnnnnnnnnnnnnnnnnnnnnnnnnnnnnnnnnnnnnnnnnnnnnnnnnnnnnnnnnnnnnnnnnnnnnnnnnnnnnnnnnnnnnnnnnnnnnnnnnnnnnnnnnnnnnnnnnnnnnnnnnnnnnnnnnnnnnnnnnnnnnnnnnnnnnnagctgggcttggagcgtttccacggagttggcatcctggggtttaactctgcggagtggtttatcactgctgttggcgccatcctagnnnnnnnnnnnnnnnnnnnnnnnnnnnnnnnnnnnnnnnnnnnnnnnnnnnnnnnnnnnnnnnnnnnnnnnnnnnnnnnnnnnntgggatgatttcatggaacttggcggaagcattgctgacacccaactggagcaggtcatccagagccagaaggcgaatcaatgcgcagtgctcatctacacttccgggaccacaggcatgcccaagggagtgatgctcagtcatgacaaatcacgtggatggcaggagcagtggcacaggactttaaactgacagaaaagcatgagacggtggtcagctacctcccactcagccacattgcagcacagatgatggacatctgggtacccataaagattggggcgctcacatactttgctcaagcagatgctctcaagnnnnnnnnnnnnnnnnnnnnnnnnnnnnnnnnnnnnnnnnnnnnnnnnnnnnnnnnnnnnnnnnnnnnnnnnnnnnnnnnnnnnnnnnnnnnnnnnnnnnnnnnnnnnnnnnnnnnnnnnnnnnnnnnnnnnnnnnnnnnnnnnnnnnnnnnnnnnnnnnnnnnnnnnnnnnnnnnnnnnnnnnnnnnnnnnnnnnnnnnnnnnnnnnnnnnnnnnnnnnnnnnnnnnnnnnnnnnnnnnnnnnnnnnnnnnnnnnnnnnnnnnnnnnnnnnnnnnnnnnnnnnnnnnnnnnnnnnnnnnnnnnnnnnnnnnnnnnnnnnnnnnnnnnnnnnnnnnnnnnnnnnnnnnnnnnnnnnnnnnnnnnnnnnnnnnnnnnnnnnnnnnnnnnnnnnnnnnnnnnnnnnnnnnnnnnngctgtggcaagatcttgactgggtgcaagaatatgctgttccagcagaacaaggatggtattggggagatctgcctctggggtaggcacatcttcatgggctacctggaaagtgagactgaaactacagaggccatcgatgatgaaggctggctacactctggggatctgggccagctggacagtctgggattcctctatgtcactggccgcatcaaag

SEQ ID NO: 28467 - DNA, 1892 bp, Macaca Mulatta
  misc_feature (1)...(1892): n = A,T,C or G
gtccctgttttggaggagctaggagcgttgccggcccctgaagtggagcgagagggaggtgcttcgccgtttctcctgccaggggaggtcccggcttcccgtggaggctccggaccaagccccttcagcttctccctccggatcgatgtgctgctgttaacccgtgaggaggcggcggcagcggnnnnnnnnnnnnnnnnnnnnnnnnnnnnnnnnnnnnnnnnnnnnnnnnnnnnnnnnnnnnnnnnnnnnnnnnnnnnnnnnnnnnnnnnnnnnnnnnnnnnnnnnnnnnnnnnnnnnnnnnnnnnnnnnnnnnnnnnnnnnnnnnnnnnnnnnnnnnnnnnnnnnnnnnnnnnnnnnnnnnnnnnnnnnnnnnnnnnnnnnnnnnnnnnnnnnnnnnnnnnnnnnnnnnnnnnnnnnnnnnnnnnnnnnnnnnnnnnnnnnnnnnnnnnnnnnnnnnnnnnnnnnnnnnnnnnnnnnnnnnnnnnnnnnnnnnnnnnnnnnnnnnnnnnnnnnnnnnnnnnnnnnnnnnnnnnnnnnnnnnnnnnnnnnnnnnnnnnnnnnnnnnnnnnnnnnnnnnnnnnnnnnnnnnnnnnnnnnnnnnnnnnnnnnnnnnnnnnnnnnnnnnnnnnnnnnnnnnnnnnnnnnnnnnnnnnnnnnnnnnnnnnnnnnnnnnnnnnnnnnnnnnnnnnnnnnnnnnnnnnnnnnnnnnnnnnnnnnnnnnnnnnnnnnnnnnnnnnnnnnnnnnnnnnnnnnnnnnnnnnnnnnnnnnnnnnnnnnnnnnnnnnnnnnnnnnnnnnnnnnnnnnnnnnnnnnnnnnnnnnnnnnnnnnnnnnnnnnnnnnnnnnnnnnnnnnnnnnnnnnnnnnnnnnnnnnnnnnnnnnnnnnnnnnnnnnnnnnnnnnnnnnnnnnnnnnnnnnnnnnnnnnnnnnnnnnnnnnnnnnnnnnnnnnnnnnnnnnnnnnnnnnnnnnnnnnnnnnnnnnnnnnnnnnnnnnnnnnnnnnnnnnnnnnnnnnnnnnnnnnnnnnnnnnnnnnnnnnnnnnnnnnnnnnnnnnnnnnnnnnnnnnnnnnnnnnnnnnnnnnnnnnnnnnnnnnnnnnnnnnnnnnnnnnnnnnnnnnnnnnnnnnnnnnnnnnnnnnnnnnnnnnnnnnnnnnnnnnnnnnnnnnnnnnnnnnnnnnnnnnnnnnnnnnnnnnnnnnnnnnnnnnnnnnnnnnnnnnnnnnnnnnnnnnnnnnnnnnnnnnnnnnnnnnnnnnnnnnnnnnnnnnnnnnnnnnnnnnnnnnnnnnnnnnnnnnnnnnnnnnnnnnnnnnnnnnnnnnnnnnnnnnnnnnnnnnnnnnnnnnnnnnnnnnnnnnnnnnnnnnnnnnnnnnnnnatgattctggaacagagtgcacaccaggagaatctaagaatttggggcaaaaagaaaatggcaattacatcatgtatgcaagagcaacatctggggacaaacttaacaacaataaattctcactctgtagtattagaaatataagccaggttcttgagaagaagagaaacaactgttttgttgnnnnnnnnnnnnnnnnnnnnnnnnnnnnnnnnnnnnnnnnnnnnnnnnnnnnnnnnnnnnnnnnnnnnnnnnnnnnnnnnnnnnnnnnnnnnnnnnnnnnnnnnnnnnnnnnnnnnnnnnnnnnnnnnnnnnnnnnnnnnnnnnnnnnnagtccaagtcaaggtccttgttgtacagcacagtgtgcattcaagtcaaaatctgagaagtgtcgggatgattcagactgtgcaagggaaggaatatgtaatggcttcacagctctctgcccagcatctgaccctaaaccaaacttcacagactgtaataggcatacacaagtgtgcattaatgg

SEQ ID NO: 28468 - DNA, 168 bp, Macaca Mulatta
gaggctccaggaagaaaagcaccagcgagacctggactgggaccggcggaggattcagggggcccgcgccgccctgctgtttgagcggcagcagcggcggcagcagcgtgacctgcgcagagctctggacagcagcaacctcagcctggccaaggagcagcgtttgca

SEQ ID NO: 28469 - DNA, 636 bp, Macaca Mulatta
tgtcatgtatttttgtatgttactataagtaataacaatagaagaaagaaatagactagaatgatctcattccatttgtttttacccctgctgtaagttctgggtctacttttcctaaaacaaagaaactgggactgcttctggtaggatgactagaaatgttcagatatttgtctgtattcactgattacaggttatatttattagttaaagctctcacacatatttatgtgcaaaatagccttactattttggctgaatttagatgaaatcacagtagtttgcactactttaaattatcttacctagattcaatgctctttacttaataaattgttcattaatcaaaacatagaagtgggtgtgttggtccaagacaagttacctaaacatcagagatctgccctggagatccaggttggggtattgacctgaaacttcaatcaaaattagattagaaattcaaagtaccattatcaacaggaggaatagagacttgtgtttctctgaaatatgttgcatttttacttttagtcatgaccttttttaagagaagtatttacttcacttacacccattgcaaacttttaaaactctatagctctgtgttaacatcgttctgaaatactcaaatgc

SEQ ID NO: 28470 - DNA, 371 bp, Macaca Mulatta
  misc_feature (1)...(371): n = A,T,C or G
tgggagctcccttcggaagtgtaatgtatgagtttgttgggaagtctgcacctttcctcatcctgaccttcctggcactactggatggagnnnnnnnnnnnnnnnnnnnnnnnnnnnnnnnnnnnnnnnnnnnagagtgccaaggggactccactctttatgcttctcaaagacccttacatcttggtggctgcagnnnnnnnnnnnnnnnnnnnnnnnnnnnnnnnnnnnnnnnnnnnnnnnnnnnnnnnnnnnnnnnnnnnnnnnnnnnnnnnnnnnnnnnnnnnnnnggtctagctttcttgcctgccagcgtgtcctaccttattggcaccaacctctttggtgtgttggccaacaagatgggtcgg

SEQ ID NO: 28471 - DNA, 1875 bp, Macaca Mulatta
  misc_feature (1)...(1875): n = A,T,C or G
agaaatggaagaattagctgaacatggcatatttctccctcctaatatgcaaggactgactgatgatcagattgaagaattgaaattgaaagatgaatggggtgaaaaatgtgtacccagtggaggtgcagtatttaaaaaggatgatattggacgaaggaatgggcaagnnnnnnnnnnnnnnnnnnnnnnnnnnnnnnnnnnnnnnnnnnnnnnnnnnnnnnnnnnnnnnnnnnagaaacaagtggaagccggtgtatgtgttacgatggagatggtgaaagatgccttggatcagcttcgaggcgcggtgatgattgtttaccccatggggttgccaccgtatgatcccatccgcatggagtttgaaaataaggaagatttgtcgggaacgcagnnnnnnnnnnnnnnnnnnnnnnnnnnnnnnnnnnnnnnnnnnnnnnnnnnnnnnnnnnnnnnnnnnnnnnnnnnnnnnnnnnnnnnnnnnnnnnnnnnnnnnnnnnnnnnnnnnnntatcgccaagattcagcaagtaagtactttttgctttaacatgtcaatattttttgttatttcccttcaaactgataaaaatgtacagtgaatctgaaagatttaaactactgatacaaatattttaatcctattggcttgggtttaaactaaaaatatcctcttcctgcacaccagcaaaaactagaagaaaatatggattgtttagtgatacctagagtttgttttgatatgtgggggagaggaaatacactatgttaatttcaacctcaataatagggctgcaagtaaacaaatattttccttgaaatgtaaaatttcgcccgacactgatttcaggcttttgcaaactgctgatgccatgtacaggaggaggaaagtttcgagacctttgaaggacatcgtgtagcgctgtaacctgaggggccgccttggttttgtgggtgctcctacgtcactaggctgtgattttggggaaatggggccctccaccatacgtagatccagagtctgtggctctgagcctcctccctttcccactggacctgcctacagtgtctgccttgggaatggccaagacagagatggcgtcgtgcagcctctggtctccacacagtgagagtccagggctcaagtctgctcaagaccgaggcttccctcgatgcttcacttcgggtgatcagacgtgggggacctgtttatctttagtagttggcaaaggcaattgtaaaacatttgttgtaacttcaggattgtcactctaagaaccttaattcacaatttgctctgctatcctctttgcagaggggacagggagctccagcccgagagcctattattagcagcgaggagcagaagcagctgatgctgttctaccacagaaggcaagaggagctcaaggtagcggggaacagatgggctttctgcagtgctggcgctcagcatagcctgcgtgccttacctggggctggtggggagtggtgagctctgcaggatgccggggagggctctttctagaccttctctctctgcagggctgtcggggtcctgccagatgtctcccggggctaaacatggaagggtcccgctcctagtgggcagggagaggggaggtcagtcatggactctttcttccgtctctttatgtgcaaaacaccttcctgaaatgcctgcctgagtaaaacgtatttgtttccagagattggaagaaaatgatgacgacgcctgtttaaactcaccatgggcggataacactgctttgaaaagacattttcatggagtaaaagacataaagtggagaccaagatgaagttcaccagctgatgacgcttccaaagagattagctcacctttctcctaggc

SEQ ID NO: 28472 - DNA, 474 bp, Macaca Mulatta
gcctgtgaacatacctcggacgcctctggatccaagaatcaggggcctgaggatctggggacatgagctggtttctaaaatcttataactcactagctagtggtggcctgagaactttagggtgactgatgctacccccacagaggaggcaggagccccaggactaacacctgactgaccaaagcagccccttgtaagcggctctgagtcttttggaggacagggacagtttgtggctgaggcaagtgtttgctggcaaaacatatgtagagcacaaagggtcagtcctctggcagaacagatgccacggagtaccacaagcaggaaaggatggtcttcttgagtagcaggagtcagggggctgtaccctgggggtgccaggaaatgctctctgacctaccaataaaggaaaagcagtgactcattctgctgtttgcacctgtcaagagggagaagggaagagtaatagagtga

SEQ ID NO: 28473 - DNA, 1004 bp, Macaca Mulatta
  misc_feature (1)...(1004): n = A,T,C or G
aatatccttctcaaaagtacatcccagggactaaatgggaaaaggagaaaaaattcctttcttctnctccccaggactcttgaagaaaaggaatttcttataaatgctttaatattcaggcgtgggttcaagtgtagagcgatatcctttgattttcttgctagtaggtcaacattaaagcttttggcatttgtattcacttctcctttaacgacgacagttcgtccagggcccatgggggtgttcaaccttgcagcaaatggcaggctaagctggggcgtgccagactttggaaccttttctctacttatctctgtcagttccagaccagatgcttgggtactctgtaaatccgagctgaatctaaaaccaatggagtgaatattcactttgccataaatgcccagagtgtctattttctctgtgccgatcctgtggccatagagcagagtatgttttccatttacagccacctggaatttgtcccttcagcaccataatcacgatctcaaaagacttctctcttttgaaaggcgtgtcataagtgatctcttcccgtccccatttttcttttatcaaagtattgcaaacaatgcagccggcccttttgaaacgaggattgaaatgaaaggccacgtcggcgcgaggtttcacgctgctgccatactgcagatccacctggaatctgtctgcatcactaggaacatgcccacgtattacaatcaaagttccaggatccaactgatcgggaatggtgccaacatacgggattaccgggttatagatgatattctgtaggttgtttaatgacaacatcatccttttccagcttcttgttggagtctcttctgtgtatgacctgagattttaggccagtttcatttaaaggttacctggattgaaactgaggcactggccccaaggactggtgtttcaggcgctccacggagcaagttgtttgtcagccgctaggtgccgtccggttcccggctggggcgtccccc

SEQ ID NO: 28474 - DNA, 774 bp, Macaca Mulatta
ggggacagctgggatgttgggcagggtgccatggatgatggcggtggagcctttatatcatgggaagcactctcacttattaaagatcttgggctgcgtccaaagaggactctgcggctggtgctctggactgcagaagaacaaggtggagttggtgccttccagtattatcagttacacaaggtaaatatttccaactacagcctagtgatggagtctgacacgggaaccttcttacccactgggctgcaattcactggcagtgaaaaggccagggccatcatggaggaggttatgagcctgctgcagcccctcaatatcactcaggttctgagccatggagaagggacagacatcaacttttggatccaagctggagtgcctggagccagtctacttgatgacttatacaagtatttcttcttccatcactcccacggagacaccatgactgtcatggatccaaagcagatgaatgttgctgctgctgtttgggctgttgtttcctatgttgttgcagacatggaagaaatgctgcctaggtcctagaaacagtaagaaagaaacattttcatgcttctggccaggaatcctggctctgcaactttggaaaacccctcttcacataacaatttcatctaattcatcttcaaagcgcaactctatttcatgttttctgttattatcctttcctgatactttcccaaattcctctgattctagaaaaaaggatcatttctcccctcccttcccccccttagaattcaactttga

SEQ ID NO: 28475 - DNA, 187 bp, Macaca Mulatta
aggaatgtaccaggtcatccagggtatcatctctcctgtcaacgacaactatgggaagaaagacctcgcagcttctcatcaccgagtggcaatggcccggctggccctgcagacatccgactggatcagggtggacccctgggagagtgagcagacacagtggatggagacggtgaaggtgctgagg

SEQ ID NO: 28476 - DNA, 492 bp, Macaca Mulatta
  misc_feature (1)...(492): n = A,T,C or G
ttgcttgttatgctcacctgggcttgcgtagctaagtagtttttgtgtacttttttcaataaaataatatcaaagttgaaaaactcttcttctaaaaccacactgagtgcagtgggataccccccgctgcagacctcttacctccaggcgggctcctctggccgctccaagatgcaaggctgcctccgccatctttcttcacgatcactagtagttctgtagcaaattgcaggatgtagggctgagaccctcagtctggtaacacccactggaatgaacttttctttctacaccagccttgctcacctgccccttacatcatctggctcccacagaggtttaaaccatcccatgagcagttctaggtaaattgccagatagggataagaactgaattcatttctcagccatatgcttgtctcanacaggtggctaatgaagtattcgtcattttccaccaggagctatacagggagagcacaggcactatgc

SEQ ID NO: 28477 - DNA, 613 bp, Macaca Mulatta
aaataaacccttttacccaaaaggggtcaaaaaaaaaaatcggggcggggagaggggcatacccgttattcaacatttgggaggctaaggggggggattctttaatttaggctttcaaaaccgccttgggcaacatggcaagatttgtttttcccaaaatataaaaataggcagggcaaggtgcactcctaaagtcccagctactgggaaggctgagttgggaggatcttttgaacccaggaggtcgaggctgcagtaaggcaagattgtgtcactatattctaagctgggagacagagtaaaaccctgtctcaaaagataaaaataaaaaacaataccattcttctattttttatttgaaaaatatagttaattaaaattgttttatttacattaacaggtaatgagtttattgtgattctgaaataaactaataaatagctatttggagtcctcaataaattttaatgttttggttctgggaccaaaaagtttgagaactacttatctaggagactttaatttgtaggtctcctttgatcagactaacaggcagggagtaacatctttagagcacaaacccaacatcctcaaagaataaaccagattaccc

SEQ ID NO: 28478 - DNA, 382 bp, Macaca Mulatta
aacaagctttctgtggtcttagctatacatctccttcctcccacgttcctctttgtgcagaaataaaatccatgtcccttgagccagctggtggggggtgctgagaaccttggggaagggcaggaaggctgattaatattttccagtcttagtttaaaaaggggggatggtggggaaatgagagccagaaaataaaaatctagaaatcctcataagaattcttgaaccgttgtcattttcttgtcatgccctaacaccatgatcaatgaatagtgtgaaccttaataaagaggcctgcgtgcctgccaaggagtctggatggaagcagaggatccaagtttcctctgcaaatagttgtattagggagcagagccaaccctgg

SEQ ID NO: 28479 - DNA, 231 bp, Macaca Mulatta
ccagctgatggacacagaagccctctgcaagctcttatgggctgcctggaggccactggtaagtcaggtgggccaggagtggaccaaggacagagctctggtgccaggcgctagtgacaattctgcaggtggaggcctgagtcaccacccgatgatgctgtcttcggtccttggcaacctgagtttccatcacaacagagaatgatctggatgaaaaccaacacacattgg

SEQ ID NO: 28480 - DNA, 173 bp, Macaca Mulatta
gaaaataatttcatggatataaccatcattttgtccagagacaatacaactaaatttaacagtgagtggtgggttctcaacctgactggaaacagaatatataatccgaactctcaggccctggaactggtggtcttcaatgacaaagtcagtcccccaagtctggggttcct

SEQ ID NO: 28481 - DNA, 171 bp, Macaca Mulatta
ctttgcaggcatctctcgcagcaccacgattgtgacggcgtatgtgatgactgtgacggggctaggctggcgggacgtgcttgaagccatcaaggccacccggcccatcgccaaccccaacccaggctttaggcagcagcttgaagagtttggctggggcagttcccagaa

SEQ ID NO: 28482 - DNA, 366 bp, Macaca Mulatta
actataaataaatatatcatcatttccatggtaatattactaagagtcaactcctatttcatatagatgaaaaattattcattttttcaagatttttaactgacttaatgatgggttatttattacagaacttgaatggaagctagcagaagttggagcaatacagactgatttggaagaaaacccccaaaaagacattgtagatatgatggtatcttcaattagaaacacttctattcatgatgacagtgatagctccaacagtgataatgataccaaatagagagaaatattcagtaaatagcttttagtatatgtgtactgaatgttttacttatgactgcatttataattagggatcagaaa

SEQ ID NO: 28483 - DNA, 852 bp, Macaca Mulatta
  misc_feature (1)...(852): n = A,T,C or G
aggtccagcatcctttgaagcatgagttcttaccaggagaagcagacctttaccccaccacctcagcttcaacagcagcaggtgaaacaacccagccagcctccacctcaggaaccatttgttcccataaccaaggagccatgccacccaaaggtttccacaacctgaaacacaaagatccagagccagnnnnnnnnnnnnnnnnnnnnnnnnnnnnnnnnnnnnnnnnnnnnnnnnnnnnnnnnnnnnnnnnnnnnnnnnnnnnnnnnnnnnnnnnnnnnnnnnnnnnnnnnnnnnnnnnnnnnnnnnnnnnnnnnnnnnnnnnnnnnnnnnnnnnnnnnnnnnnnnnnnnnnnnnnnnnnnnnnnnnnnnnnnnnnnnnnnnnnnnnnnnnnnnnnnnnnnnnnnnnnnnnnnnnnnnnnnnnnnnnnnnnnnnnnnnnnnnnnnnnnnnnnnnnnnnnnnnnnnnnnnnnnnnnnnnnnnnnnnnnnnnnnnnnnnnnnnnnnnnnnnnnnnnnnnnnnnnnnnnnnnnnnnnnnnnnnnnnnnnnnnnnnnnnnnnnnnnnnnnnnnnnnnnnnnnnnnnnnnnnnnnnnnnnnnnnnnnnnnnnnnnnnnnnnnnnnnnnnnnnnnnnnnnnnnnnnnnnnnnnnnnnnnnnnnnnnnnnnnnnnnnnnnnnnnnnnnnnnnnnnnnnnnnnnnnnnnnnnnnnnnnnngaagaatcctctaagcccctgaattaagcagaaagtcttagtggcttttctggtcttcagctgctcagggttcatctgaggaatcgagtgaaaagaaattcatgtttcttgctctgccctgattaaatcacttttaat

SEQ ID NO: 28484 - DNA, 122 bp, Macaca Mulatta
ggggtgagcctccggagcagggctaaaggccgtctccccatccccatggtcatcttgcctttcatgaagcatggggacctgcacgccttcctgctcgcctcccggattaaagagaacccctt

SEQ ID NO: 28485 - DNA, 391 bp, Macaca Mulatta
  misc_feature (1)...(391): n = A,T,C or G
ctgcttaaacctctgtccctgacggtccctgccagtctctctggtcgaccccaacacactaggaggacagacacgggctccagactccactaannnnnnnnnnnnnnnnnnnnnnnnnnnnnnnnnnnnnnnnnnnnnnnnnnnnnnnnnnnnnnnnnnnnnnnnnnnnnnnnnnnnnnnnnnnnnnnnnnnnnnnnnnnnnnnnnnnnnnnnnnnnnnnnnnnnnnnnnnnnnnnnnnnnnnnnnnnnnnnnnnnnnnnnnnnnnnnnnnnnnnnnnnnnnnnnnnnnnnnnnnnnnnnnnnnnnnnnnnnnnnnnnnnnnnnnnnnnnnnnnnnnnnnnnnnnnnnnnnnnnnnnnnnnnnnnnntctctcaagtttccaagaacttgg

SEQ ID NO: 28486 - DNA, 1219 bp, Macaca Mulatta
  misc_feature (1)...(1219): n = A,T,C or G
gtgtttaaaatggcttcagatcttatcannnnnnnnnnnnnnnnnnnnnnnnnnnnnnnnnnngcacagctgtagatgcagaactgatgccatctggtgtgattctacagaataagagagaaaatttacccagagtgtgccatgcactggcttttctgggaatggcaaggtgccaggatttgtttttggttcgcttgcaggggtggaaacttggaactaggtnnnnnnnnnnnnnnnnnnnnnnnnnnnnnnnnnnnnnnnnnnnnnnnnnnnnnnnnnnnnnnnnnnnnnnnnnnnnnnnnnnnnnnnnnnnnnnnnnnnnnnnnnnnnnnnnnnnnnnnnnnnnnnnnnnnnnnnnnnnnnnnnnnnnnnnnnnnnnnnnnnnnnnnnnnnnnnnnnnnnnnnnnnnnnnnnnnnnnnnnnnnnnnnnnnnnnnnnnnnnnnnnnnnnnnnnnnnnnnnnnnnnnnnnnnnnnnnnnnnnnnnnnnnnnnnnnnnnnnnnnnnnnnnnnnnnnnnnnnnnnnnnnnnnnnnnnnnnnnnnnnnnnnnnnnnnnnnnnnnnnnnnnnnnnnnnnnnnnnnnnnnnnnnnnnnnnnnnnnnnnnnnnnnnntctgacagagtgagcagagtgaaggcatgtcaggtgttctcacaaaactcttgacaggactgacctctcttagccaatatccttgtcccacatcaggattttctagagggccctgggtacctgcgcacttccttggtggccataacctctttatggagggttggtgtaggataaagaatgttctaccacgctgctccctcatctgcatcatttctctcctctctaattatcctgtcagttatattttggtggagtctgggtttgtgtatttgattcctataaaaagaccgttgctttcatgcatggaggaggggaatctatgcagagaaaggctaccttactcctttctgtgactccaccaccggtctaggaatatcctgggagaagaattgcctctcaaagctgcttctataagcagcctacatcctagctaagcaaagaagaaacacttcccacatccagggctgtctaaaagaactttctgtgatgacagaaatgttctatatctgcagtgtccaatatgctaaccatttagacacatggggctagtgaacacttgaaatgtggctagtgtgactgaggaaggaaaatttaaatattgtttaatt

SEQ ID NO: 28487 - DNA, 1103 bp, Macaca Mulatta
  misc_feature (1)...(1103): n = A,T,C or G
cagatttgcagatcaaggagaacccaggagtttaaagaagcgcaggaaggtctctgagatccttgcagtagctacatcctcagagggaggaggaagatggctnnnnnnnnnnnnnnnnnnnnnnnnnnnnnnnnnnnnnnnnnnnnnnnnnnnnnnnnnnnnnnncatcaggagacccagctgtgctcctggatggttttaccacaagcccaattgctatggttacttcaggaagctgaggaactggtctgatgcnnnnnnnnnnnnnnnnnnnnnnnnnnnnnnnnnnnnnnnnnnnnnnnnnnnnnnnnnnnnnnnnnnnnnnnnnnnnnnnnnnnnnnnnnnnnnnnnnnnnnnnnnnnnnnnnnnnnnnnnnnnnnnnnnnnnnnnnnnnnnnnnnnnnnnnnnnnnnnnnnnnnnnnnnnnnnnnnnnnnnnnnnnnnnnnnnnnnnnnnnnnnnnnnnnnnnnnnnnnnnnnnnnnnnnnnnnnnnnnnnnnnnnnnnnnnnnnnnnnnnnnnnnnnnnnnnnnnnnnnnnnnnnnnnnnnnnnnnnnnnnnnnnnnnnnnnnnnnnnnnnnnnnnnnnnnnnnnnnnnnnnnnnnnnnnnnnnnnnnnnnnnnnnnnnnnnnnnnnnnnnnnnnnnnnnnnnnnnnnnnnnnnnnnnnnnnnnnnnnnnnnnnnnnnnnnnnnnnnnnnnnnnnnnnnnnnnnnnnnnnnnnnnnnnnnnnnnnnnnnnnnnnnnnnnnnnnnnnnnnnnnnnnnnnnnnnnnnnnnnnnnnnnnnnnnnnnnnnnnnnnnnnnnnnnnnnnnnnnnnnnnnnnnnnnnnnnnnnnnnnnnnnnnnnnnnnnnnnnnnnnnnnnnnnnnnnnnnnnnnnnnnnnnnnnnnnnnnnnnnnnnnnnnnnnnnnnnnnnnnnnnnnnnnnnnnnnnnnnnnnnnnnnnnnnnnnnnnnnnnnnnngccctctctccattgcctataccccatcacagccactcaactcctgcttttttttcctttggcccttggaaggtttaccagtagaatccttgctaggctgatgtgggccgtacattcctttaataaaccattgtgtacataaga

SEQ ID NO: 28488 - DNA, 579 bp, Macaca Mulatta
ctattccctagacactgataaggtggcggcagtgttttatactgttgtatttcccatgtttaatccaataatttatagtttcagaaacaagcatgtgaaaaatgctctcaaaaagctatcagaaagaaattgtattttaaaatgaatggtattcaaatcacttaagaatagtcaatatctaacttacccttccaatctcataaacagcaattatgccatgaacatcttatgtgcaactattttaaatttatcacattttcagaaataaagataacttgttatactcaatgcattaaaatgtttcatcctctctccaaaaattatctccacaattctactctataaaacattacctaaataagcataatcatgatttctatccaattagtgtttctaaaatactttgtacattgattctgttctttactatgttgtattgaaggtaaatattgacttttcagtcaatcaatcagtattagaagctacttggtagcagagcatgtgtatattggcttgttttttccaacatctgtttggtacctggtatactgcatgtcctccttatctgtgtgtttaggc

SEQ ID NO: 28489 - DNA, 227 bp, Macaca Mulatta
catcaacaggtctagtatgtagcccactgataaaacagaggaagatgtgtctcctccccccctcttcctaatggtctatgtgcctttctccatatattgtctctttaccccttaccctctcccttgggctctgatgaaaaattgttgactgcagcttcggaagtttagatctgagaaccaaccgtagaatatttcagttctaggaaataaaaccagttgattaaagc

SEQ ID NO: 28490 - DNA, 908 bp, Macaca Mulatta
  misc_feature (1)...(908): n = A,T,C or G
cgccgtgtcccggcccggccgcgggcagccccgcttcatcgccgtgggctacgtggacgacacgcagttcgtgcggtttgacagcgacgccgagagtccgaggatggagccgcgggcgccgtggatggagcaggaggggccggagtattgggaagaggagacactgttcttcaaggcccgcgcacagactgannnnnnnnnnnnnnnnnnnnnnnnnnnnnnnnnnnnnnnnnnnnnnnnnnnntctcacaccctccagaggatgtttggctgcgacctggggcccgacgggcgcctcctccgcgggtatgaacagttcgcctacgacggcagggattacatcatcctgaacgaggacctgcgctcctggacggccgcggacatggcggctcagttcacccagcggaagtgggaggcggcccgtgcggcggagcagcacagaacctacctggagggcgagtgcctggagtggctccgcagatacctggagaacgggaaggagacgctgcagcgcgcgnnnccccccaagacaaatgtgacccaccaccccatctccaaccatgaggccaccctgaggtgctgggccctgggcttctgccctgtggagatcacactgacccagtagcgggatggggaggaccagactcaggactcggaacttgtagagaccaggcccgcagggaatggaaccttccagaagtaggcaactgtggtggtgtcttctggggggaagtagagatacacaggccatgtgcagcctgaggagccaccagagcccctcaccctgagatgnnnnnngtctttccagcccactatcctcatcatgggcatcattgctggactggttgtctttgcagctgttgtcactgaagctgtggtcacttttgtgctgtggaggaagaagagct

SEQ ID NO: 28491 - DNA, 1311 bp, Macaca Mulatta
  misc_feature (1)...(1311): n = A,T,C or G
accaccaccatcaccaccccccgccggctacctaccagacttccgggaacctgggggtgtcctactcccactcgagttgtggtccaagctatggctcacagaacttcagtgcgccttacagcccctacgcgttaaatcaggaagcagacgtaagtggtgggtacccccagtgcgctcccgctgtttactctggaaatctctcatctcccatggtacagcatcaccaccaccaccagggttatgccgggggcgcggtgggctcgcctcagtacattcaccactcatatggacaagagcaccagagcctggccctggctacgtataataactccttgtcccctctccacgccagccaccaagaagcctgtcgctctcctgcatcggagacatcttctccagcgcagacttttgactggatgaaagtcaaaagaaaccctcccaaaacagnnnnnnnnnnnnnnnnnnnnnnnnnnnnnnnnnnnnnnnnnnnnnnnnnnnnnnnnnnnnnnnnnnnnnnnnnnnnnnnnnnnnnnnnnnnnnnttcaacaagtacctgacgcgtgcccgcagggtggagatcgctgcatccctgcagcttaacgagacncaagtgaagatctggttccagaaccgccgaatgaagcaaaagaaacgtgagaaggagggtctcttgcccatctctccagccaccccgccaggaaacgacgagaaggctgaggaatcctcagagaagtccagctcttcgccctgcgttccttccccggggtcttctacctcagacactctgactacctcccactaaggcggctccagtcccagaccacagcccaggcatctccttgggctgggacttcttacccaaagcacatgcttagcttatctttctttccatttacagtctcttcctttctgatcctatctggggagctcctggccaggataatatgtttgcagataattctggaccagagacttggtgccgggttaacaccttaatccagattgggtgccagcacacattttctggtgggccttaacatccctcctgattttaggagaattcacagaacctactgttcctttcagatgactttttggaaaatagttccctttaccaacagaaacatgccagaaggaatcttctcatcttttatctaactatatgtacagctctctcctcccttgtccttgaaagtaggatatagtgaaaggagagtccaggagctcacgaagaagagatacactgtgtgtttacacaattaattcatcccttaatttaagtcattttcatgtgtgtgagtttgctggttg

SEQ ID NO: 28492 - DNA, 675 bp, Macaca Mulatta
gccatgagacttctcatccctgcggcgtacttggcatctgctgtctcactgcatacattgtggaaggtgtagggagtgaagtctcagataagagtacctgtgtgagcctcactacccagcgactgccagtcaacagaatcaagacctacaccatcaaggaaggctccttgaaagcagtaatttttattaccaaacgtggcctaaaagtctgtgctgatccacaagccaggtgggtgaaagacgtggtcaagagcatggacaggaaatccaacaccagaaataacatgatccagaccaagccaacaggaacccagcaatcgaccaatacagctgtgaccctgactgggtagtagcctctggcaccctgtccctctccagccagcaagctcatttcacttcacacatgcatggactgagtttatactcaccttttatgaaagtattgcatgaataaaattattccttagtatttttacttttaaatgtcttctgtattcacttatatgttctaattaataaattatttattattaagaatagttccctagtctattcattgtatgtagggaaaggtagtatatcatttgtgttagattactgtcctacttgtacctctctttgatggtaaccgtaatggaagagatttctggctagtgtttatcacaggtgaaagct

SEQ ID NO: 28493 - DNA, 683 bp, Macaca Mulatta
  misc_feature (1)...(683): n = A,T,C or G
gggaggtggccaaagatcagaacgaaaaaagtggattcactgttttgagggagtgacagcaattattttctgtgtggccctcagtgattatgaccttgttctggctgaggacgaggagatgaaccgaatgcatgaaagcatgaaactgtttgacgaggatttgtaataacaaatggttctacagaaacttcaatcattctctttcttaacaagaaagacctgtttgaggaaaaaataaagaggagtccgttaactatctgttatccagaatacacaggttccaatacatatgaagaggcagctgcctatattcaatgccagtttgaagatctgaacagaagaaaagataccaaggagatctacactcacttcacctgtgccacagacacgaagaatgtgcagtttgtttttgatgctgttacagatgtcatcattaaaaacaacttaaaggaatgtggactttattgaaaagcatggatgttagtgaaagttactacagtgtggagtgttgagaccagacaccttttgctgtcttacggggcagctacaagcatgaacggaacccagggatggcagcagcatgcagaatcttagcactctttaacacaatcctctataataggggacttttnattgacatgagatactaagtcagactttggattggaagactgtaagtggga

SEQ ID NO: 28494 - DNA, 541 bp, Macaca Mulatta
  misc_feature (1)...(541): n = A,T,C or G
aagaatctcatttggacagatgaagtcgggcacgactgacccactttttcttaaccgcagtcctagaatgccctttctataagnngggtccaaaactccttcgtaaatatcaagtgaagtcatttgttaccccatgctgttccctggagacccctatggattctcagctttataaatctgtgaagattgggctgattgaccttttaggagcaaaattatattttgctccaaaagtgttgacaccctattgttatacannnnnnnnnnnnnnnnnnnnnnnnnnnnnnnnnnnnnnnnnnnnnnnnnnnnnnnnnnnnnnnnnnnnnnnnaggatagcactgtgtattgatggtccaaaaagattttgttccaatagcaaacacttactgggaaaagaagctattaaacaaagacacctacgcttacttggttatcaagttgttcanagatcccctattatgagattgggatgctaaaatcaagacgtgaattggtggaatatttacaaagaaaactgttttctcaaaacactgttcattgg

SEQ ID NO: 28495 - DNA, 2172 bp, Macaca Mulatta
gggaggtctctctagtcactccggcgcagcgttttgtgcctggtagtcatcagaaagcaagcccacgttcttctctaatacgtgtaagccttttcttttcaagatgcctgaggaagtgcaccatggagaggaggaggtggagacttttgcctttcaggcagaaattgcccaactcatgtccctcatcatcaataccttctattccaacaaggagattttccttcgggagttgatctctaatgcttctgatgccttggacaagattcgctatgagagcttaacagacccttcgaagttggacagtggtaaagagctgaaaattgacatcatccccaaccctcaggaacgtaccctgactttggtagacacaggcattgggatgaccaaagctgatctcataaataatttgggaaccattgccaagtctggtactaaagcatttatggaggctcttcaggctggtgcagacatctccatgattggacagtttggtgttggcttttattctgcctacctggtggcagagaaagtggttgtgatcacaaagcacaacgatgatgaacagtatgcttgggagtcttctgctggaggttccttcactgtgcgggctgaccatggtgagcccattggcagaggtaccaaagtgatcctccatcttaaagaagatcagacagagtacttggaaagagaggcgggtcaaagaagtagtgaagaagcactccccagttcataggctatcccatcaccctttatttggagaaggaaccgagaagaagggaaattagtgatgattgaggcagaggaagagaaaggtgagaaagaagaggaagataaagatgatgaagaaaagcccaagatcgaagatgtgggttcagatgaggaggatgacagtggtaaggataagaagaagaaaactaagaagatcaaagagaaatacattgatcaggaagagctaaacaagaccaagcctatttggaccagaaaccctgatgacatcacccaagaggagtatggagaattctataagagcctcaccaatgactgggaagaccacttggcagtcaagcacttttctgtagaaggtcagttggaattcagggcattgctattcattcctcgtcgggctccctttgacctttttgagaacaagaagaaaaagaacaacatcaaactctatgtccgtcgtgtgttcatcatggacagctgtgatgagttaataccagagtatctcaattttattcgtggtgtggttgactctgaggatctgcccctgaacatctcccgagaaatgctccagcagagcaaaatcttgaaagtcattcgtaaaaacattgttaagaagtgtcttgagctcttctctgagctggcagaagacaaggagaattacaagaaattctatgaggcattctctaaaaatctcaagcttggaatccacgaggactccactaaccgccgccgcctgtctgagctgctgcgctatcacacctcccagtctggagatgagatgacatctctgtcagagtatgtttctcgcatgaaggagacacagaagtccatctattacatcactggtgagagcaaagagcaggtggccaactcagcttttgtggagcgagtgcggaaacggggcttcgaggtggtatatatgaccgagcccattgacgagtactgtgtgcagcagctcaaggagtttgatgggaagagcctggtctcagttaccaaggagggtctggagctgcctgaggatgaggaggagaagaagaagatggaagagagcaaggcattgtttgtgagcatttgcattcttggaaggtgcaggcctggatccaggctgatgggtgaagaggaggagtttcgtggaacctgatgagatgaggcacctggggacaggtgaccccagcggctgccactggcaggagagagcttccgaggaaagacatctgacatggcagggtgactgctgggactgtgggcaaagcatgagctcagcggtgttctcatccacccaattagaccctgcacttgatggatcagctggtcccacccagataaataaaaccggctcatcgggatcttgcgggtccccaccccaaaaactggactctgccaaaaaagaacagctttcgaacttcccctatggaattttcaatcctcctggaaccaaattccagt

SEQ ID NO: 28496 - DNA, 133 bp, Macaca Mulatta
gtcagtaacagatccaagagatggaaagagagtagcactcaaaaagatgcccaacgtcttccagaatctggtctcttgcaaaagggtcttccgggaattgaagatgttgtgtttttttaagcatgataatgta

SEQ ID NO: 28497 - DNA, 144 bp, Macaca Mulatta
atccagaataacaaaagaacagagatgaacattaacctttactagcaccatccattcactgtactacactttattggagacgcttcattagaattggaaaccctgcatgaattcatctggtaagatttcttagtcactggacaa

SEQ ID NO: 28498 - DNA, 157 bp, Macaca Mulatta
tgcttcagctttggaaatttgttctcctatgtggcgtgctcactgggacctccgagtctcttcttgacaatcttggcagtgacctaagcaatgtcgtgaatgagctgaaacctattcttcacgatggacttgagacagttgacaatactcttaaagg

SEQ ID NO: 28499 - DNA, 693 bp, Macaca Mulatta
  misc_feature (1)...(693): n = A,T,C or G
aaaagcaagtgagtcagaccaagatccgcgtcatctcaaccatcctgttcatcttggccggctgcattgtgtnnnnnnnnnnnnnnnnnnnnnnnnnnnnnnnnnnnnnnnnnnnnnnnnnnnnnnnnnnnnnnnnnnnnnnnnnnnnnnnnnnnnnnnnnnnnnnnnnnnnnnnnnnnnnnnnnnnnnnnnnnnnnnnnnnnnnnnnnnnnnnnnnnnnnnnnnnnnnnnnnnnnnnnnnnnnnnnnnnnnnnnnnnnnnnnnnnnnnnnnnnnnnnnnnnnnnnnnnnnnnnnnnnnnnnnnnnnnnnnnnnnnnnnnnnnnnnnaggtgggtgaaatcaaggcccatgcggcggagtggaaggccaacgtcacggccgagttccgggagacacggcgaaggctcagcgtggagatccacgataagctgcagcgggcagccaccatccgcagcatggagcgccggcggctgggcctggaccagcgggcccactcgctggacatgctgtcccccgagaagcgctctgtctttgccgccctggacactggtcgcttcaaggcctcatcccaggagagcatcaacaaccggcccaacaacctgcgtctgaagggaccggagcagttgaacaagcatgggcagggcgcgtctgaggacaatatcatcaacaagtacgggtccacctccagactca

SEQ ID NO: 28500 - DNA, 1425 bp, Macaca Mulatta
  misc_feature (1)...(1425): n = A,T,C or G
naccaccgccagtcctcccaccacatccattcacccactgtccacccacctgcctccggatgcacgccgccgcaagacaccccagggcccaggacggaagcctcgaaggcgcccaggagcctccccgactggagaaacccccaccattgaggaaggggaggaagatgaggatgaggctagcgaggccgagggggcccgggcagtcacgcagccatcccctgcctccacaccctcctcggtgcannnnnnnnnnnnnnnnnnnnnnnnnnnnnnnnnnnnnnnnnnnnnnnnnnnnnnnnnnnnnnnnnnnnnnnnnnnnnnnnnnnnnnnnnnnnnnnnnnnnnnnnnnnnnnnnnnnnnnnnnnnnnnnnnnnnnnnnnnnnnnnnnnnnnnnnnnnnnnnnnnnnnnnnnnnnnnnnnnnnnnnnnnnnnnnnnnnnnnnnnnnnnnnnnnnnnnnnnnnnnnnnnnnnnnnnnnnnnnnnnnnnnnnnnnnnnnnnnnnnnnnnnnnnnnnnnnnnnnnnnnnnnnnnnnnnnnnnnnnnnnnnnnnnnnnnnnnnnnnnnnnnnnnnnnnnnnnnnnnnnnnnnnnnnnnnnnnnnnnnnnnnnnnnnnnnnnnnnnnnnnnnnnnnnnnnnnnnnnnnnnnnnnnnnnnnnnnnnnnnnnnnnnnnnnnnnnnnnnnnnnnnnnnnnnnnnnnnnnnnnnnnnnnnnnnnnnnnnnnnnnnnnnnnnnnnnnnnnnnnnnnnnnnnnnnnnnnnnnnnnnnnnnnnnnnnnnnnnnnnnnnnnnnnnnnnnnnnnnnnnnnnnnnnnnnnnnnnnnnnnnnnnnnnnnnnnnnnnnnnnnnnnnnnnnnnnnnnnnnnnnnnnnnnnnnnnnnnnnnnnnnnnnnnnnnnnnnnnnnnnnnnnnnnnnnnnnnnnnnnnnnnnnngggctgtgctcttggatctggaccagcagaccctgcccggagtggcccaccaggtggtggagcagatggtcatctctgaccagatcaaggccgaggacagggccaatgtgctgcgggccctgctgctgaaacacagncagccacccgagtgatgagaaggacttctccttcccccgcaacatttcggctggctccctgggctccctgctggggcatcaccatggtcagggggctgagagtgatccccacgtcactgagcctctcattggaggtgttcctgagacccggctggaggtggagcgagagnagcgcgagctgccgcctccagcaccaccaggtggcatcacccgctccaagtccaagcacgagctgaagctgctggagaagatccctgagaatgctgaggccacggtggtcctcgtgggnggctgtgtggaattcctctctcgccccaccatggcctttgtgcggctccgggaggccgtggagttggac

SEQ ID NO: 28501 - DNA, 350 bp, Macaca Mulatta
  misc_feature (1)...(350): n = A,T,C or G
ggagaagatggtgcaggatgccgtcctcacttatcagcagttcaagaactgcaaggataacctgagctcctggctggagcacctgccccacagccaggtgcggcccagcgacggccccagccagatcgcctacaagctgcaggcacagaagngagactgatgcaggagatccagagccgagagcgggacagggccatggcatcccgcctctcccaggccctgcaggcggcgctcncaggactatgagctgcaggcagacacctaccgctgctctctggagcccaccctggcagtgtcagcccccaagagaccccgagtggctcctctgcaggagagcatccatgcccagg

SEQ ID NO: 28502 - DNA, 643 bp, Macaca Mulatta
ctcctgggctagggagttgctcagtgaggtttgaacattttgttagctgtgtgcagcattcccagagcttcagtctctgtgcattctcagctttgcagaaccatgctgcaaagccacataccgatggggttatccatgcaactatctccattcctacaatgtccttaatatgagatcatcaaacattgatagtagggactctgtggaatatttgcccagtaatggtaagaaatcttttgggtaagagtatggatggttcttcttttacccaatctgcttatagctttttttgtaaacagggaaatgttgagtggtacttgtattcccttatcaaattaatcacatagcttttatacagaaactcttctgtgtgagctgtaaggtgccaaatttgctgtcacttgtattcatgacacatcccataaagcatctgctaatgctttaagagattgattcaattaagacctgagtgacactatttgtaaatataactagttgtgaagcacacatacctttattttgggaatttatgaaaaaatatagaaaaccacagatcagggattcatatatgtagctcaaaaattcccaaaagtttactgttagagctggcagtttcctatcactatttcacgtgtcagaacaa

SEQ ID NO: 28503 - DNA, 287 bp, Macaca Mulatta
atttgtgcttctaacatgtcactgtagtttttgcaaactaaaataacaaatggcttaattttgcagagaggggctattttgccatggaaatttatatatcctagacttagaattgttgcaatagggttgtgatgagacagaatagccaactacttctttaggtgggtctgaccttcaaataagtggtctagactgaaaagtaggtaagatgatatgcataagaccaaatttccttcaatttcaagtggcatgattgtatatgtggcttatgttttaatgttttcact

SEQ ID NO: 28504 - DNA, 514 bp, Macaca Mulatta
atcaaataagtttcttctcaaagtggatttcatataatttcggagcacggaagcacacacaagctctttatgaattctgctctccatcagaaacactgcctcaaagttgtatatgcctttatatagaaactacaaatataaagaattgtaattcccataaaatatttctagcacaaggtatatgttggcatatatacaaaaagaatatagagaaaaacaatattttcataaactaaacatctcggatagagaaaaaatatatcttaaaataagactttactatattgaatctttttcaataaaaattacatgataatgccttatgaaagtaactgtacatatggtataaagtgtttatatttggttccatattcatttgctaaattctcatgacacagagtgaaatatttcataaattagccatttatctctgggacccgaataaaaataggatgaactaatttgttcaatgcctttagctaattacaatacatgcagagtttagaaacagact

SEQ ID NO: 28505 - DNA, 2547 bp, Macaca Mulatta
  misc_feature (1)...(2547): n = A,T,C or G
tcggaccatgtggaagtttctgagactagggagccggataatggggggtggggcccgttggagggtaaaggggcaatagcgtcctttcacaggctaaccccggcccttccccgtcctctggactaaaatggggaacacattgggcctggcaccaatggggactttgccccgccggagcccccgccgagaggaacccctgcccaaccctgggagcttcgatgagctgcaccggctatgcaaagnagatgtattcccagcacagatggagggcgtgaagctcgttgtcaacaaggttctgagcagccatttccaggtgnnnnnnnnnnnnnnnnnnnnnnnnnnnnnnnnnnnnnnnnnnnnnnnnnnnnnnnnnnnnnnnnnnnnnnnnnnnnnnnnnnnnnnnnnnnnnnnnnnnnnnnnnnnnnnnnnnnnnnnnnnnnnnnnnnnnnnnnnnnnnnnnnnnnnnnnnnnnnnnnnnnnnnnnnnnnnnnnnnnnnnnnnnnnnnnnnnnnnnnnnnnnnnnnnnnnnnnnnnnnnnnnnnnnnnnnnnnnnnnnnnnnnnnnnnnnnnnnnnnnnnnnnnnnnnnnnnnnnnnnnnnnnnnnnnnnnnnnngtgatcatggttgctcacttcctgcagagcctcactcatcggctggtgctgggaggagagctagtttatcaccggcggtcaagggaagagggggccatcttgacactggctgggaagtacnnnnnnnnnnnnnnnnnnnnnnnnnnnnnnnnnnnnnnnnnnnnnnnnnnnnnnnnnnnnnnnnnnnnnnnnnnnnnnnnnnnnnnnnnnnnnnnnnnnnnnnnnnnnnnnnnnnnnnnnnnnnnnnnnnnnnnnnnnnnnnnnnnnnnnnnnnnnnnnnnnnnnnnnnnnnnnnnnnnnnnnnnnnnnnnnnnnnnnnnnnnnnnnnnnnnnnnnnnnnnnnnnnnnnnnnnnnnnnnnnnnnnnnnnnnnnnnnnnnnnnnnnnnnnnnnnnnnnnnnnnnnnnnnnnnnnnnnnnnnnnnnnnnnnnnnnnnnnnnnnnnnnnnnnnnnnnnnnnnnnnnnnnnnnnnnnnnnnnnnnnnnnnnnnnnnnnnnnnnnnnnnnnnnnnnnnnnnnnnnnnnnnnnnnnnnnnnnnnnnnnnnnnnnnnnnnnnnnnnnnnnnnnnnnnnnnnnnnnnnnnnnnnnnnnnnnnnnnnnnnnnnnnnnnnnnnnnnnnnnnnnnnnnnnnnnnnnnnnnnnnnnnnnnnnnnnnnnnnnnnnnnnnnnnnnnnnnnnnnnnnnnnnnnnnnnnnnnnnnnnnnnnnnnnnnnnnnnnnnnnnnnnnnnnnnnnnnnnnnnnnnnnnnnnnnnnnnnnnnnnnnnnnnnnnnnnnnnnnnnnnnnnnnnnnnnnnnnnnnnnnnnnnnnnnnnnnnnnnnnnnnnnnnnnnnnnnnnnnnnnnnnnnnnnnnnnnnnnnnnnnnnnnnnnnnnnnnnnnnnnnnnnnnnnnnnnnnnnnnnnnnnnnnnnnnnnnnnnnnnnnnnnnnnnnnnnnnnnnnnnnnnnnnnnnnnnnnnnnnnnnnnnnnnnnnnnnnnnnnnnnnnnnnnnnnnnnnnnnnnnnnnnnnnnnnnnnnnnnnnnnnnnnnnnnnnnnnnnnnnnnnnnnnnnnnnnnnnnnnnnnnnnnnnnnnnnnnnnnnnnnnnnnnnnnnnnnnnnnnnnnnnnnnnnnnnnnnnnnnnnnnnnnnnnnnnnnnnnnnnnnnnnnnnnnnnnnnnnnnnnnnnnnnnnnnnnnnnnnnnnnnnnnnnnnnnnnnnnnnnnnnnnnnnnnnnnnnnnnnnnnnnnnnnnnnnnnnnnnnnnnnnnnnnnnnnnnnnnnnnnnnnnnnnnnnnnnnnnnnnnnnnnnnnnnnnnnnnnnnnnnnnnnnnnnnnnnnnnnnnnnnnnnnnnnnnnnnnnnnnnnnnnnnnnnnnnnnnnnnnnnnnnnnnnnnnnnnnnnnnnnnnnnnnnnnnnnnnnnnnnnnnnnnnnnnnnnnnnnnnnnnnnnnnnnnnnnnnnnnnnnnnnnnnnnnnnnnnnnnnnnnnnnnnnnnnnnnnnnnnnnnnnnnnnnnnnnnnnnnnnnnnnnnnnnnnnnnnnnnnnnnnnnnnnnnnnnnnnnnnnnnnnnnnnnnnnnnnnnnnnnnnnnnnnnnnnnnnnnnnnnnnnnnnnnnnnnnnnnnnnnnnnnnnnnnnnnnnnnnnnnnnnnnnnnnnnnnnnnnnnnnnnnnnnnnnnnnnnnnnnnnnnnnnnnnnnnnnnnnnnnnnnnnnnnnnnnnnnnnnnnnnnnnnnnnnnnnnntggaactggctttggccatgaaactgtgaattgccataacttcaagggaaatgaaaaatcaaaggaattggcccaatggcgaggagaggaaaggccaagggaagagaaatgcctgcgttagtctggagaagttggactagtgaggtgatggatgtcatcaatctcaggaatgctattacccagagcctctgagctactactttgcatctgtactgaa

SEQ ID NO: 28506 - DNA, 789 bp, Macaca Mulatta
gcctttccatcagtaacactggcaatcttcctgttaaccactctccgattagggatggtatctgaaacaacaaaggtcgccctcttgagattcgttttaagtgtaattccctaatgagcagaggtgtacgtgaagttgtgttgtgactgataaccttcagctacaaaaagataggactgacttggtttaagtgttctgttttgtaaatcattccatttgagtctttctgatgaacttggctatcctgaaatctgttattttagtgaggttccaaaatgagcaaagctaggcctgattagagtagagtaactattaaaaaacataactttctaggagctataaatcaaagttttgaaaagatgtttggatatatttgagtattcagatcatgaaaacagaaattgccctgcctactacaaggacagactgatgggaaattatgcacctggtcaacttagcttttaagcagacaatgctgtaaaaactaatggcttctctggtatttattattagttttagtactgatctcctttttcagtgctgcacactcctgtgttttgaacttttatagccttgcaacgaaatcctaaatcccgtttcctggaatttaattgaagaaaaatacttccaaataaagacttttttttttgccaacccaaagcttccgaaatctggtgccttttggatttccaaaaagtcctaactttttggggaaatttacccggaaatttcccctttagttgggaacttttgggggaaaaacccccttttaaaccccaacctccgggt

SEQ ID NO: 28507 - DNA, 295 bp, Macaca Mulatta
  misc_feature (1)...(295): n = A,T,C or G
gctgctgcagtgtgtcttgctgtgtgtttcattatctcttgttttgagtggtcagcataagcctgagacaccaggttattccagtgtgctccattgtgggctatggagcttccagtttgctgtaaacctcagtcaggaggcaacttctcctcctgtactaataacttgggngacaaccaagggctgctgcacaagctacagaatgactctgactgtggcatctgtataagaaacggtccaggcagctccgtggtgttggaggcaacctatagcatctgctatgtcactgagtggg

SEQ ID NO: 28508 - DNA, 244 bp, Macaca Mulatta
  misc_feature (1)...(244): n = A,T,C or G
aaaccatgtgtatgttatgtttgtctctaaaagaaaaaatactaatattaaataatttcttatgactgtgagtcactcacttatttttctaataattgatattgtatattcttagtgccattaagtatgtatgtatgtaacttttacagttttcagtgaaagttgtannnnnnnnnnnnnnngatcagggctctttaatctcattttaatttcatgggtttgaatgaactgtagttattttatt

SEQ ID NO: 28509 - DNA, 1195 bp, Macaca Mulatta
  misc_feature (1)...(1195): n = A,T,C or G
ggggtgtgggggattgtgggaaaagatggcggctgccgcacaatcccgggttgtccgggtcctgccaatgtcacgttctgccattactgcaatagccacatcagtgtgtcatggcccgccctgtcgccagcttcatcatgccgtcatacctcatgggaaaggtggacgttcctcagtcagtgggatcgtggccactgtgtttggagcaacaggattcctggggcgatacgttgtcaaccaccttggacgcatagggtcacaggtaatcataccccatcggtgtgatatatatgacaccatgcaccttcgtcccatgggtgacctgggccagcttctgtttctggaatgggacgcgagagataaagattctatccgacgagcagtggaacacagcaatgtggtcatcaatcttattggacgagactgggaaaccaaaaacttcgattttgatgatgtttatgtgaagattccccaggcgattgctcaagtgtccaaggaagctggagttgaaaaattcattcatgtttcccatctgaatgcgaatattaaaagctcttctagatatttgagaaataaggctgttggagagaaagcagtgagagatgcatttccagaagccattatcataaagccgtcagacatctttggaagagaggatagattccttaattcttttgcacatctgcgttcagttttgttcttacaccccttggatctttgagctggacgacagtttaaacaaccagtatatgtcgtaagatgtgtccaaaaggaattgttaacatagttaaggatcccgatgccagcgggaaaacctttgctttcgttggtccaaataggtacctcctctttgacctggtgaagtacgtctttgctgtggctcacagattgttcctcccattacccttgccactttttgtctatcgatgggtagcaagagtctttganataaacccatttcagcccttgataacaagggataaagtggagcggatgcacatcacagacatgaaatcgcctcacctgcctggcttagaagacgttggcattcaggcaatgccactggaactcaaggccatcgaggtgctgcgccgtcaccgcgcctaccgctggctgtctgccgaaaatgaaggatgtgaagcccggcccaagactggtcgactttttagtgccctcctggaccagactcctgggt

SEQ ID NO: 28510 - DNA, 83 bp, Macaca Mulatta
agttgatttatgaagactctatggatttaatcgcaaagctaccttgtatgcagcaaagatctaccgaaatctctacagagaag

SEQ ID NO: 28511 - DNA, 405 bp, Macaca Mulatta
ctattcaaaggtcaaaaagccacataagttttgatgatgatcattttgaatggaggctcgagatggattgagaggactgagacacagaagtggggggaccatggtctttactgggtggaccacagggggaccctgtccactcgcctgggttgaggaaggtgtctggggtgctcaggtgggtttgttctcagcaatgcaggcatagtcagctctgggatcctccttggtgcctctcttgtctctgtccctgaggtcaggtccttcactgctggacactggcagcctctgcagagatgcatagtggatctcctgctctgaggacccttggacctggggccaggacagaaagtgctgatgggaggcgatgccttcagacccttccctgtgagttcttctcccacctcc

SEQ ID NO: 28512 - DNA, 799 bp, Macaca Mulatta
gggattgatcagattgctgaaacactatgggaacaggtattgaagcccctgggtgataatttgatggaggaaaacataaggcagtctgtaacaaactctatcaaagcaggcctgactgaccaggtgtctcatcatgccagattaaagacagactgacagttcatctcctcacggactccactctcttttttttcatgcttgctgtacaatgagaactcaaataaaaataaaccaaagtttacaatcaactgtagaagtagtttagtgtaactggcttcacagatggctgccacagagtgtgaaaattgtttgttagttttaagcattcttttaatggctcctaagacatgcagatttgctgaggagcattggttaatcatgcacctttgtgccatgtttaattcttttatttctttttacttaatctaatgttagtgaatttgtcttacgtaaaaggatatttcagggaaatattttcagaagtctatttagagtctctttaacacagtgtcccattgaaattttagtttttagagaatttatgaatcactgtttcaagaaccagattggaatgacaatgaagcctttattgagccactacattaaaagtatatattgctttaccgcccttcaataccagtattacataaatgcatgtatcagaaaacttcccaggaaattacatgacaacttcttgtagcttaagaaagttatttcccgaaggggaacatttggtccttgcccttttttaaattttattaaaaccctgccccctaaaaaggaaggaatgcctttatct

SEQ ID NO: 28513 - DNA, 2192 bp, Macaca Mulatta
  misc_feature (1)...(2192): n = A,T,C or G
gtgggtgcctgccagtagttgaggcgccatggcggcggcggcggtgtccgaggcctggccggagctggagctggctgagcgggagcggcggcgggagctgttgctgacggggcccgggctggaggagcgagtgcgggcggcgggtgggcagctgccgccgcggcttttcaccctgccgctgctgcactacttggaagtgagcggctgcgggagcctgcgcgcgccggggcctggcctggcgcagggcctnnnnnnnnnnnnnnnnnnnnnnnnnnnnnnnnnnnnnnnnnnnnnnnnnnnnnnnnnnnnnnnnnnnnnnnnnnnnnnnnnnnnnnnnnnnnnnnnnnnnnnnnnnnnnnnnnnnnnnnnnnnnnnnnnnnnnnnnnnnnnnnnnnnnnnnnnnnnnnnnnnnnnnnnnnnnnnnnnnnnnnnnnnnnnnnnnnnnnnnnnnnnnnnnnnnnnnnnnnnnnnnnnnnnnnnnnnnnnnnnnnnnnnnnnnnnnnnnnnnnnnnnnnnnnnnnnnnnnnnnnnnnnnnnnnnnnnnnnnnnnnnnnnnnnnnnnnnnnnnnnnnnnnnnnnnnnnnnnnnnnnnnnnnnnnnnnnnnnnnnnnnnnnnnnnnnnnnnnnnnnnnnnnnnnnnnnnnnnnnnnnnnnnnnnnnnnnnnnnnnnnnnnnnnnnnnnnnnnnnnnnnnnnnnnnnnnnnnnnnnnnnnnnnnnnnnnnnnnnnnnnnnnnnnnnnnnnnnnnnnnnnnnnnnnnnnnnnnnnnnnnnnnnnnnnnnnnnnnnnnnnnnnnnnnnnnnnnnnnnnnnnnnnnnnnnnnnnnnnnnnnnnnnnnnnnnnnnnnnnnnnnnnnnnnnnnnnnnnnnnnnnnnnnnnnnnnnnnnnnnnnnnnnnnnnnnnnnnnnnnnnnnnnnnnnnnnnnnnnnnnnnnnnnnnnnnnnnnnnnnnnnnnnnnnnnnnnnnnnnnnnnnnnnnnnnnnnnnnnnnnnnnnnnnnnnnnnnnnnnnnnnnnnnnnnnnnnnnnnnnnnnnnnnnnnnnnnnnnnnnnnnnnnnnnnnnnnnnnnnnnnnnnnnnnnnnnnnnnnnnnnnnnnnnnnnnnnnnnnnnnnnnnnnnnnnnnnnnnnnnnnnnnnnnnnnnnnnnnnnnnnnnnnnnnnnnnnnnnnnnnnnnnnnnnnnnnnnnnnnnnnnnnnnnnnnnnnnnnnnnnnnnnnnnnnnnnnnnnnnnnnnnnnnnnnnnnnnnnnnnnnnnnnnnnnnnnnnnnnnnnnnnnnnnnnnnnnnnnnnnnnnnnnnnnnnnnnnnnnnnnnnnnnnnnnnnnnnnnnnnnnnnnnnnnnnnnnnnnnnnnnnnnnnnnnnnnnnnnnnnnnnnnnnnnnnnnnnnnnnnnnnnnnnnnnnnnnnnnnnnnnnnnnnnnnnnnnnnnnnnnnnnnnnnnnnnnnnnnnnnnnnnnnnnnnnnnnnnnnnnnnnnnnnnnnnnnnnnnnnnnnnnnnnnnnnnnnnnnnnnnnnnnnnnnnnnnnnnngaaaatggcagaaatgaacaagtacactttagaaaataaagaggaaggatcactctcagataccgaagctgatgcagtctctggacaactttcagatcccagaacgaatgccagtgctggaaaggacgggccctccccgctggtggtggagcaggtccgggtggtggacctggaagggagcctgaaggtggtgtacccgtccaaggccgacctggccactgcccctccccatgtgacttcgtgcgctgacgccaggaccgccnnnnnnnnnnnnnnnnnnnnnnnnnnnnnnnnnnnnnnnnnnnnnnnnnnnnnnnnnnnnnnnnnnnnnnnnnnnnnnnnnnnnnnnnnnnnnnnnnnnnnnnnnnnnnnnnnnnnnnnnnnnnnnnnnnnnnnnnnnnnnnnnnnnnnnnnnnnnnnnnnnnnnnnnnnnnnnnnnnnnnnnnnnnnnnnnnnnnnnnnnnnnnnnnnnnnnnnnnnnnnnnnnnnnnnnnnnnnnnnnnnnnnnnnnnnnnnnnnnnnnnnnnnnnnnnnnnnnnnnnnnnnnnnnnnnnnnnnnnnnnnnnnnnnnnnnnnnnnnnnnnnnnnnnnnnnnnnnnnnnnnnnnnnnnnnnnngtgatccacccacctcagccttctaaagtgctgggattacaggtgtgagc

SEQ ID NO: 28514 - DNA, 377 bp, Macaca Mulatta
  misc_feature (1)...(377): n = A,T,C or G
ggccaggcacactgagcatcagtcctgtgcctgacactatgctagatgctggggttgcagccatgagcatagacacgacagacacagtcctcgccatctactgttgagtaccgattggaacaagaggatcgtctgtagacaggnaggatatgatcatcatggcacctgtattactgatacttttgggggccactgagatactgcaagctgacttacttcctgatgacaagantttcacttctcccacctgtcaatttcaccattaaagttactggtttggctcaagttcttttacgttgggaaccaaatcctgatcaagagcaaaggaatgttaatctagaatatcaagtgaaaataaacgctccaaaagaagatga

SEQ ID NO: 28515 - DNA, 111 bp, Macaca Mulatta
taattttggaaccgcatgtgagattcatgaagcaacccagctctggaactccagccagctcaggattcagagacagctcccaaaccaaatcctattcaagaactcagacca

SEQ ID NO: 28516 - DNA, 118 bp, Macaca Mulatta
agcactcttcccagcctggatgccccttatcccatgctgatactagctggtcctacagcttgtgggaaacgagaacttgcccatcgcctctgcagacagtttagcacttacttcagat

SEQ ID NO: 28517 - DNA, 838 bp, Macaca Mulatta
  misc_feature (1)...(838): n = A,T,C or G
tcaccatcctcccttcctatgcctgcattccagagctgtgtgaagatgcagtctncgaaggtcggcagaaggcctttgggactgtgcctcccacctagtggtgtcttgtcttctatggaaccatcatgttcatgtatcttcagctgaagagtaactactctcagacccagggaaaggtccttgctcttgtttataccattgttacccccaccttgaacccactaatctatacgctgaggaacaaagaggtaaagaaggccattagaaaattgatctggaaggatccagtttttagaaattacaaatccctggaatttgagtcatagaaattatttggagagtggattaatggcaggaaggataattttcagatttcagcccaagttgattgacaaacaaatgaagcaagtactaanaatcaagctaaatgtaaaattgttgtcatcaacagtggtgattgtaatcttacaaaaattgcataatacaggcattcattcacatttttgctgtcctcaaaatctgtaatcaggatattttgcagtatttgttgatttcctcaagagattgttagagctgtagttttctagggaatactggacgtactgagggatagaacacatggtagatatggaaactgagctgaaataacttacgtatgaagatggatcatacagatctaaatctttattaatgtaaaataggaattgaaaccttacaggaaagaaaactgagtaaagcaattcagggacagtataatactttgtttttgagggaacaaggaaaattccctgcagtgagacacatagacctagtttttaaatgatgcttaggatttggg

SEQ ID NO: 28518 - DNA, 558 bp, Macaca Mulatta
aaaagaatatttgagcatttgtctgtaatcacatcaaaatgatgttttctgtgtaaagcaagatacatatttctcataatgcagcattgtgagaagtcacgtccgatcactgcgccaacactatcgtatccttgttaaaatggtgtgtaccttacaaattataatttatgtgccaggtttgttttgtacttaatttgctattattgtgatgtgtataaaatctttaatcttggttcttagtactttgaattggtctacaggtgtattcctgggatgaaaggattgccaaacccaaatatagactagattatccaaggggtttgtgtctttgttccattctcaacatttcttctttcaactataagcaagccccaggtgtggggtagcaagtgtgcttccgtcaagatattatattctcctactccagtataacagcttgcaggcaataaaaatctatttgctcataactacttctgtatttattagacttgtatagggcaaatgcagtaaaagaggtttgcagtgtttcaaacatcccaactatctgactctgtgttt

SEQ ID NO: 28519 - DNA, 522 bp, Macaca Mulatta
  misc_feature (1)...(522): n = A,T,C or G
nnnnnnnnnnnnnnnnnncgagagagatnnnnnnnnnnnnnnnnnnnnnnnnnnnnnnnnnnnnnnnnnnnnnnnnnnnnnnctacacagtgtggtgtgggcaaaaatggatcaacaatagcaggaacaagtgtcctttctccttttctccatagtggatcagtgattacattagctgcaatgatctacaagaaatccacagttcagcttttagaaaagacatccctctctttatatactgacatttggttttgtgtctgctaaaatcactaataagcttgtggttgcacacatgacgaaaagtgaaatgcatttgcatgacacagcattcataggtccagcacttgtgtttctggaccagtattttaacagcctttattgatgaatatattgtacttaggattgccctggttttctctttctgtgatttgatccgatactgtgtcagtgtttgcaatcagattgcgtctcacctgcacatacatgtcttcagaatcaaggtttctacagctcattctaatc

SEQ ID NO: 28520 - DNA, 628 bp, Macaca Mulatta
  misc_feature (1)...(628): n = A,T,C or G
agtcccaattatcccaaaccatatcccgagaactcaaggtgtgaataccagatccggctggagaaagggttccaagtggtggtgactgtgcggagagaagattttgatgtggaaccagctgactcagagggaaactgccttgacagtttagttntttgttgcaggagatcagcaatttggtccttactgcggtcgtggattccctgggccactaaatattgaaaccaagagtaatgttcttgatatcatcttccaaaccgattctaacagggcaaaacaagggctggaaacttcgctaccatggagatcnnnnnnnnnnnnnnnnnnnnnnnnnnnnnnnnnnnnnnnnnnnnnnnnnnnnnnnnnnnnnnnnnnnnnnnnnnnnnnnnnnnnnnnnnnnnnnnnnnnnnnnnnnnnnnnnnnnnnnnnnnnnnnnnnnnnnnnnnnnnnnnnnnnnnnnnnnnnnnnnnnnnnnnnnnnnnnnnnnnnnnnnnnnnnnnnnnnctgtggactgtggcattcctgaatccattgagaatggtaaagttgaagacccagagagcactttgtttggttctgtcacccgctacacttgtgaggagccgtattactacatggaaaatggagg

SEQ ID NO: 28521 - DNA, 1666 bp, Macaca Mulatta
  misc_feature (1)...(1666): n = A,T,C or G
agtccaaaatccatgcggcacgcagcctgagtgagatcgccatcgacctgaccgagacggggacgctgaagacctcgaagctggccaacatgggcagcaaggggaagatcatcagcggcagcagcggcagcctgctgtcttcaggtaggcagaggccagctggagggatgcccccctgagcatggctgggaccccagaggagacccaggaagttggggagagctgcagcaggggagactgctgacgagctgctccaaagctnnnnnnnnnnnnnnnnnnnnnnnnnnnnnnnnnnnnnnnnnnnnnnnnnnnnnnnnnnnnnnnnnnnnnnnnnnnnnnnnnnnnnnnnnnnnnnnnnnnnnnnnnnnnnnnnnnnnnnnnnnnnnnnnnnnnnnnnnnnnnnnnnnnnnnnnnnnnnnnnnnnnnnnnnnnnnnnnnnnnnnnnnnnnnnnnnnnnnnnnnnnnnnnnnnnnnnnnnnnnnnnnnnnnnnnnnnnnnnnnnnnnnnnnnnnnnnnnnnnnnnnnnnnnnnnnnnnnnnnnnnnnnnnnnnnnnnnnnnnnnnnnnnnnnnnnnnnnnnnnnnnnnnnnnnnnnnnnnnnnnnnnnnnnnnnnnnnnnnnnnnnnnnnnnnnnnnnnnnnnnnnnnnnnnnnnnnnnnnnnnnnnnnnnnnnnnnnnnnnnnnnnnnnnnnnnnnnnnnnnnnnnnnnnnnnnnnnnnnnnnnnnnnnnnnnnnnnnnnnnnnnnnnnnnnnnnnnnnnnnnnnnnnnnnnnnnnnnnnnnnnnnnnnnnnnnnnnnnnnnnnnnnnnnnnnnnnnnnnnnnnnnnnnnnnnnnnnnnnnnnnnnnnnnnnnnnnnnnnnnnnnnnnnnnnnnnnnnnnnnnnnnnnnnnnnnnnnnnnnnnnnnnnnnnnnnnnnnnnnnnnnnnnnnnnnnnnnnnnnnnnnnnnnnnnnnnnnnnnnnnnnnnnnnnnnnnnnnnnnnnnnnnnnnnnnnnnnnnnnnnnnnnnnnnnnnnnnnnnnnnnnnnnnnnnnnnnnnnnnnnnnnnnnnnnnnnnnnnnnnnnnnnnnnnnnnnnnnnnnnnnnnnnnnnnnnnnnnnnnnnnnnnnnnnnnnnnnnnnnnnnnnnnnnnnnnnnnnnnnnnnnnnnnnnnnnnnnnnnnnnnnnnnnnnnnnnnnnnnnnnnnnnnnnnnnnnncctgattgatgtaggaaccgtgcagctgtctctgagccatgcgaagaaggcaacaagccttccctggtaatttatattactatatatagtggctgtaaacaataacaaaaaggaaaagacaggagagggagaggagctaaaaattgtctcattagcttctgggctggtgtgatccaatcatagccaggaaaaagtttaaaggaccagagagaggacagacatccttcctggactgagaggcgaggttactgttctggtgagtggagcattaagttcagggcccctccttggacaggctgaggccctgaggggaccttagcagtgtgttcacacagtcatgtgttttcataaaatctgtgaacataatacattttgtattatttttcttaaatagaaccgataaaggccggtgcggtggctcacgcctgtaatctcagcactttgggaggcccgagcaggtggatcacctga

SEQ ID NO: 28522 - DNA, 3056 bp, Macaca Mulatta
  misc_feature (1)...(3056): n = A,T,C or G
cctgaaaacatcatgctggttgatccagttcgccaaccctaccgagtgaaggtcattgactttggttctgctagtcatgtttccaaagctgtgtgctcaacctacttacagtcacgttactacaggcaannnnnnnnnnnnnnnnnnnnnnnnnnnnnnnnnnnnnnnnnnnnnnnnnnnnnnnnnnnnnnnnnnnnnnnnnnnnnnnnnnnnnnnnnnnnnnnnnnnnnnnnnnnnnnnnnnnnnnnnnnnnnnnnnnnnnnnnnnnnnnnnnnnnnnnnnnnnnnnnnnnnnnnnnnnnnnnnnnnnnnnnnnnnnnnnnnnnnnnnnnnnnnnnnnnnnnnnnnnnnnnnnnnnnnnnnnnnnnnnnnnnnnnnnnnnnnnnnnnnnnnnnnnnnnnnnnnnnnnnnnnnnnnnnnnnnnnnnnnnnnnnnnnnnnnnnnnnnnnnnnnnnnnggtgaatatgtccacagacctagagggaacagatatgttggcagagaaggcagaccgaagagaatatattgatcttttaaagaaaatgctcacaattgatgcagataagagaattacccctctaaaaactcttaaccatcagtttgtgacaatgactcaccttttggattttccacatagcaatcannnnnnnnnnnnnnnnnnnnnnnnnnnnnnnnnnnnnnnnnnnnnnnnnnnnnnnnnnnnnnnnnnnnnnnnnnnnnnnnnnnnnnnnnnnnnnnnnnnnnnnnnnnnnnnnnnnnnnnnnnnnnnnnnnnnnnnnnnnnnnnnnnnnnnnnnnnnnnnnnnnnnnnnnnnnnnnnnnnnnnnnnnnnnnnnnnnnnnnnnnnnnnnnnnnnnnnnnnnnnnnnnnnnnnnnnnnnnnnnnnnnnnnnnnnnnnnnnnnnnnnnnnnnnnnnnnnnnnnnnnnnnnnnnnnnnnnnnnnnnnnnnnnnnnnnnnnnnnnnnnnnnnnnnnnnnnnnnnnnnnnnnnnnnnnnnnnnnnnnnnnnnnnnnnnnnnnnnnnnnnnnnnnnnnnnnnnnnnnnnnnnnnnnnnnnnnnnnnnnnnnnnnnnnnnnnnnnnnnnnnnnnnnnnnnnnnnnnnnnnnnnnnnnnnnnnnnnnnnnnnnnnnnnnnnnnnnnnnnnnnnnnnnnnnnnnnnnnnnnnnnnnnnnnnnnnnnnnnnnnnnnnnnnnnnnnnnnnnnnnnnnnnnnnnnnnnnnnnnnnnnnnnnnnnnnnnnnnnnnnnnnnnnnnnnnnnnnnnnnnnnnnnnnnnnnnnnnnnnnnnnnnnnnnnnnnnnnnnnnnnnnnnnnnnnnnnnnnnnnnnnnnnnnnnnnnnnnnnnnnnnnnnnnnnnnnnnnnnnnnnnnnnnnnnnnnnnnnnnnnnnnnnnnnnnnnnnnnnnnnnnnnnnnnnnnnnnnnnnnnnnnnnnnnnnnnnnnnnnnnnnnnnnnnnnnnnnnnnnnnnnnnnnnnnnnnnnnnnnnnnnnnnnnnnnnnnnnnnnnnnnnnnnnnnnnnnnnnnnnnnnnnnnnnnnnnnnnnnnnnnnnnnnnnnnnnnnnnnnnnnnnnnnnnnnnnnnnnnnnnnnnnnnnnnnnnnnnnnnnnnnnnnnnnnnnnnnnnnnnnnnnnnnnnnnnnnnnnnnnnnnnnnnnnnnnnnnnnnnnnnnnnnnnnnnnnnnnnnnnnnnnnnnnnnnnnnnnnnnnnnnnnnnnnnnnnnnnnnnnnnnnnnnnnnnnnnnnnnnnnnnnnnnnnnnnnnnnnnnnnnnnnnnnnnnnnnnnnnnnnnnnnnnnnnnnnnnnnnnnnnnnnnnnnnnnnnnnnnnnnnnnnnnnnnnnnnnnnnnnnnnnnnnnnnnnnnnnnnnnnnnnnnnnnnnnnnnnnnnnnnnnnnnnnnnnnnnnnnnnnnnnnnnnnnnnnnnnnnnnnnnnnnnnnnnnnnnnnnnnnnnnnnnnnnnnnnnnnnnnnnnnnnnnnnnnnnnnnnnnnnnnnnnnnnnnnnnnnnnnnnnnnnnnnnnnnnnnnnnnnnnnnnnnnnnnnnnnnnnnnnnnnnnnnnnnnnnnnnnnnnnnnnnnnnnnnnnnnnnnnnnnnnnnnnnnnnnnnnnnnnnnnnnnnnnnnnnnnnnnnnnnnnnnnnnnnnnnnnnnnnnnnnnnnnnnnnnnnnnnnnnnnnnnnnnnnnnnnnnnnnnnnnnnnnnnnnnnnnnnnnnnnnnnnnnnnnnnnnnnnnnnnnnnnnnnnnnnnnnnncaacccagccccccgcaggcagcaggcgtttgtggcccctctctcccaagccccctacaccttccagcacggcagcccactacactcgacggggcacccacaccttgccccagcccctgctcacctgccaagccttgctcatctgtatacgtatgctgcccccacttctgctgctgcactgggctcaaccagctccattgctcatcttttctccccacagggttcctcaaggcatgctgcagcctataccactcaccctagcactttggtgcaccaggtccctgtcagtgttgggcccagcctcctcacttctgccagcgtggcccctgctcagtaccaacaccagtttgccactcagtcgtacattgggtcttcccgaggctcaacaatttacactggatacccgctgagtcctaccaagatcagccagtattcctacttatagttggtgagcatgagggaggaggagtcatggctaccttcttctggccctgagttcttaatattgggctatggtgagatcctcctttaccctcttgaaacttcttagccagcaacttgttctgcaggggcccactgaagcagaaagtttttctctgggggaacctgtctcagtgttgactgcattgttgtagtctcccaaagtttgccctatttttaaattctttatttttgtgacagcaattttggtacttggaagagttcagatgcccatcttctgcagttaccaaggaagagagattgttgtgaagttaccctctgaaaaatattttgtctctctgacttgatttctataaatgcttttaaaaacaa

SEQ ID NO: 28523 - DNA, 607 bp, Macaca Mulatta
agccctagaggtggtagatgctttctgcagtcactacccccatgagagcttagagttcttttgatcctttccgggggacctacttaacaactttataccctgttaacaattctttatattgacttacatctgttcaaataactggtattgcttctctctcctgactcaaccctgattgacacattcccttgaaggggcagaacatcccctgagacaagatgcaactgtacacctaaataaagacacaaaatcttcaaaagaaagataatgtccttcagcaaagggtttgtcagccataggcgcctggcccagggagggtcagagaataaaccccaggatgacatcctcagcagtgacaagagaacagaccatcacgatggatagcctggatgactataaagacccctgctacagactgaatagctgctccatgtgccccctaccctctgccccaccatccattcatgtgttggaaactaatgctcaatgtgtatttagagtggggcctttagggggtgattaggtcatgagtgtggagccatcatgaatgggattggtgccctcataaaagagacttcagagagctcctttccccttctgccatgtg

SEQ ID NO: 28524 - DNA, 3759 bp, Macaca Mulatta
  misc_feature (1)...(3759): n = A,T,C or G
gcagtatatggtgctggtcccctccctgctccacactgaggcccctgagaagggctgtgtccttctgagccacctgaacgagacagtgactgtaagtgcttccttagagtctggcggggaaaacaggagcctcttcactgacctggtggcggagaaggacttattccactgtgtcgtcttcacnnnnnnnnnnnnnnnnnnnnnnnnnnnnnnnnnnnnnnnnnnnnnnnnnnnnnnnnnnnnnnnnnnnnnnnnnnnnnnnnnnnnnnnnnnnnnnnnnnnnnnnnnnnnnnnnnnnnnnnnnnnnnnnnnnnnnnnnnnnnnnnnnnnnnnnnnnnnnnnnnnnnnnnnnnnnnnnnnnnnnnnnnnnnnnnnnnnnnnnnnnnnnnnnnnnnnnnnnnnnnnnnnnnnnnnnnnnnnnnnnnnnnnnnnnnnnnnnnnnnnnnnnnnnnnnnnnnnnnnnnnnnnnnnnnnnnnnnnnnnnnnnnnnnnnnnnnnnnnnnnnnnnnnnnnnnnnnnnnnnnnnnnnnnnnnnnnnnnnnnnnnnnnnnnnnnnnnnnnnnnnnnnnnnnnnnnnnnnnnnnnnnnnnnnnnnnnnnnnnnnnnnnnnnnnnnnnnnnnnnnnnnnnnnnnnnnnnnnnnnnnnnnnnnnnnnnnnnnnnnnnnnnnnnatacacctatgggaaacctgtcccaggacttgcaactgtgagcctgtgtagaaaattctttcatgttcctaactgtgataagcacgaggtctgtgaggaattcagtcaacannnnnnnnnnnnnnnnnnnnnnnnnnnnnnnnnnnnnnnnnnnnnnnnnnnnnnnnnnnnnnnnnnnnnnnnnnnnnnnnnnnnnnnnnnnnnnnnnnnnnnnnnnnnnnnnnnnnnnnnnnnnnnnnnnnnnnnnnnnnnnnnnnnnnnnnnnnnnnnnnnnnnnnnnnnnnnnnnnnnnnnnnnnnnnnnnnnnnnnnnnnnnnnnnnnnnnnnnnnnnnnnnnnnnnnnnnnnnnnnnnnnnnnnnnnnnnnnnnnnnnnnnnnnnnnnnnnnnnnnnnnnnnnnnnnnnnnnnnnnnnnnnnnnnnnnnnnnnnnnnnnnnnnnnnnnnnnnnnnnnnnnnnnnnnnnnnnnnnnnnnnnnnnnnnnnnnnnnnnnnnnnnnnnnnnnnnnnnnnnnnnnnnnnnnnnnnnnnnnnnnnnnnnnnnnnnnnnnnnnnnnnnnnnnnnnnnnnnnnnnnnnnnnnnnnnnnnnnnnnnnnnnnnnnnnnnnnnnnnnnnnnnnnnnnnnnnnnnnnnnnnnnnnnnnnnnnnnnnnnnnnnnnnnnnnnnnnnnnnnnnnnnnnnnnnnnnnnnnnnnnnnnnnnnnnnnnnnnnnnnnnnnnnnnnnnnnnnnnnnnnnnnnnnnnnnnnnnnnnnnnnnnnnnnnnnnnnnnnnnnnnnnnnnnnnnnnnnnnnnnnnnnnnnnnnnnnnnnnnnnnnnnnnnnnnnnnnnnnnnnnnnnnnnnnnnnnnnnnnnnnnnnnnnnnnnnnnnnnnnnnnnnnnnnnnnnnnnnnnnnnnnnnnnnnnnnnnnnnnnnnnnnnnnnnnnnnnnnnnnggtggatttgagcttcagcccagcacaaagtcccccagcctcacacgcccacctgcgagtaggagctgctccgcagtccctctgcgcccttcgtgctgtggaccaaagcatgctgctcatgaagcctgaggctgagctctcnnnnnnnnnntatataatctgctaactgtgaaggatctcaccaattttcctgacaatgtggaccatcaggaggaagaacaaggacactgtccccatcctttcttcattcgtaatggagccttctatgttcccttatcaagtaatgatgaagcagatatttatagctttctcaaggnnnnnnnnnnnnnnnnnnnnnnnnnnnnnnnnnnnnnnnnnnnnnnnnnnnnnnnnnnnnnnnnnnnnnnnnnnnnnnnnnnnnnnnnnnnnnnnnnnnnnnnnnnnnnnnnnnnnnnnnnnnnnnnnnnnnnnnnnnnnnnnnnnnnnnnnnnnnnnnnnnnnnnntaaataatgaacaaagttcagggccagtccctnnnnnnnnnnnnnnnnnnnnnnnnnnnnnnnnnnnnnnnnnnnnnnnnnnnnnnnnnnnnnnnnnnnnnnntgaggtaggagtaacagtccctgacaccatcaccgagtggaaggcaggagccttctgcctgtgcgaagacgctggacttggtatatgttccactgcctccgttcgagccttccagccattatttgtggagctcacaatgccgtattctgtgatccgtggagaggcgttcacattcaaggccacggtcgtaatctaccttcccaaatgcatccgggnnnnnnnnnnnnnnnnnnnnnnnnnnnnnnnnnnnnnnnnnnnnnnnnnnnnnnnnnnnnnnnnnnnnnnnnnnnnnnnnnnnnnnnnnnnnnnnnnnnnnnnnnnnnnnnnnnnnnnnnnnnnnnnnnnnnnnnnnnnnnnnnnnnnnnnnnnnnnnnnnnnnnnnnnnnnnnnnnnnnnnnnnnnnnnnnnnnnnnnnnnnnnnnnnnnnnnnnnnnnnnnnnnnnnnnnnnnnnnnnnnnnnnnnnnnnnnnnnnnnnnnnnnnnnnnnnnnnnnnnnnnnnnnnnnnnnnnnnnnnnnnnnnnnnnnnnnnnnnnnnnnnnnnnnnnnnnnnnnnnnnnnnnnnnnnnnnnnnnnnnnnnnnnnnnnnnnnnnnnnnnnnnnnnnnnnnnnnnnnnnnnnnnnnnnnnnnnnnnnnnnnnnnnnnnnnnnnnnnnnnnnnnnnnnnnnnnnnnnnnnnnnnnnnnnnnnnnnnnnnnnnnnnnnnnnnnnnnnnnnnnnnnnnnnnnnnnnnnnnnnnnnnnnnnnnnnnnnnnnnnnnnnnnnnnnnnnnnnnnnnnnnnnnnnnnnnnnnnnnnnnnnnnnnnnnnnnnnnnnnnnnnnnnnnnnnnnnnnnnnnnnnnnnnnnnnnnnnnnnnnnnnnnnnnnnnnnnnnnnnnnnnnnnnnnnnnnnnnnnnnnnnnnnnnnnnnnnnnnnnnnnnnnnnnnnnnnnnnnnnnnnnnnnnnnnnnnnnnnnnnnnnnnnnnnnnnnnnnnnnnnnnnnnnnnnnnnnnnnnnnnnnnnnnnnnnnnnnnnnnnnnagggaggtgtagaagatgaagtgaccctctccgcctatgttactattgcccttctggaaattcctctcccagtcacnnnntattgttcgcaatgccctattctgcctggagtcagcctggaatgtagcaaaggaggggacccatgggagccatgtctacaccaaggcattgctggcctatgctttttccctagtgggaaaccaagatcagagtagagaaatactgaactcacttgataaggaaagctgtgaaagaagnnnnnnnnnnnnnnnnnnnnnnnnnnnnnnnnnnnnnnnnnnnnnnnnnnnnnnnnnnnnnnnnnnnnnnnnnnnnnnnnnnnnnnnnnnnnnnnnnnnnnnnnnnnnnnnnnnnnnnnnnnnnnnnnnnnnnnnnnnnnnnnnnnnnnnnnnnnnnnnnnnnnnnnnnnnnnnnnnnnnnnnnnnnnnnnnnnnnnnnnnnnnnnnnnnnnnnnnnnnnnnnnnnnacagtggtggctctccatgccctgtccaggtatggagcagccactttcaccagaactgagaaaactgca

SEQ ID NO: 28525 - DNA, 673 bp, Macaca Mulatta
accggctgaagaaggcacctgcagatcgaccagatcacaccgacctgaacctggagcgcagccacgcccagaagaacgagaatgctcggcagcagctggagcgccagaacaaggagctcaaggtcaagctgcaggagatggagggcactgtcaagtccaagtacaaggcctccatcactgccctcgaggccaagatcgcacagctggaggagcagctggacaacgagaccaaggagcgccaggcagcctgcaaacaggtgcgtcggacggagaagaagctgaaggatgtgctgctgcaggtggatgatgagcggaggaacgccgagcagtacaaggaccaggccgacaaggcatccacccgcctgaagcagctcaagcggcagctggaggaggcggaagaggaggcccagcgggccaacgcctcccgccggaaactgcagcgcgagctggaggacgccaccgagacggccgatgccatgaaccgcgaggtcagctccctcaagaacaagctcaggcgcggggacctgccgtttgtcatgccccgccgaatggcccggaaaggcgctggcgatggttccgacgaggaggtggatggcaaagcagatggggctgaggccaaacctgccgaataagcctcttctcctgcaggctgagatggatggacagacggaca

SEQ ID NO: 28526 - DNA, 912 bp, Macaca Mulatta
gaaggaaatacattattttagaatcatttactatttaaatgagacaatcttattattttagaatcatttatttaaatgagacaatcattttaagttttaagacagaagtgaccaatgtaatttcaaaacacctaaggattttttggttgatcaggttactgtagatttttactgattgtcctggataaatagactgtgctttttctttttctctcccttcctttcttcttggtttcccatagtataataagcatgcatactttaacttctatagttttcttgtttagagggtcttcagttttagagaattatttctcccttgcctttgactcattggactagttcagaggctttaagtagtttaaaatgggcttttgcttttctaggtcattaacggtttttatttagtttctttagccaatagtggctgagtttcgcacttgattttcaatattttatagtaagaaatgacagattgcttgggttcatttcataaactgaaactctgcatttagataactgttaaaggttattaagatgaagatttactgtttctttgttactcggtacagctgtttgttttacttgcacatttgtacatatacctaatgttttcaagtgccttaattgtttaaaatctctggcttcaaagtttcttggggaaaggtaggtttacctcacattttttgtttccattagtaatattctaggtacctcacaaaatgtattatggtgccatggctgttagtttttagtaagtgctgtaggattaatttgaaaataggcagaattccattcctccaaggtggcaaaaattagctacaatgatgtaattgtcctttacctgggtatgaattccctgacacacattaatgtcaacatatgtagcaaattttgtgaaaatgtaacaat

SEQ ID NO: 28527 - DNA, 420 bp, Macaca Mulatta
aggaatgagtgaggacagccactgagactggatgccacatgtattcacgccatgctagtttgctgtcactgttgtaaactttgcactgagtcaccagggtgtcataagctggacaggcctgcggtgcccaaagcccatgggctcatttcacccatttcactcgtgactccatcctcaaactactatggagttcacattctccagtcatttcctagagatttctgggttcctttcaaggctataacatgcctgaaatttgtcactcgggtctaatagtaagtaaaaagctaccaaactccaaagtcaacaactcgtttaaatccctaagagatagccgggcacagtggctcatgacagtaatcccagcacattgggaggccgaagcgggcggatcatgagatcacgatatcaagaacatcc

SEQ ID NO: 28528 - DNA, 1595 bp, Macaca Mulatta
  misc_feature (1)...(1595): n = A,T,C or G
gtattgtacttgttgccattaatccttatgaacagttgccaatctatggacaagatgtcatctatgcctacagtggccaaaacatgggagacatggacccccacatctttgctgtggcagaagaagcctacaagcagatggccagnnnnnnnnnnnnnnnnnnnnnnnnnnnnnnnnnnnnnnnnnnnnnnnnnnnnnnnnnnnnnnnnnnnnnnnnnnnnnnnnnnnnnnnnnnnnnnnnnnnnnnnnnnnnnnnnnnnnnnnnnnnnnnnnnnnnnnnnnnnnnnnnnnnnnnnnnnnaggccatcggaaatgctaagaccacccgcaatgacaacagcagccgttttggcaagtacatccagattggctttgacaaacaggtaccannnnnnnnnnnnnnnnnnnnnnnnnnnnnnnnnnnnnnnnnnnnnnnnnnnnnnnnnnnnnnnnnnnnnnnnnnnnnnnnnnnnnnnnnnnnnnnnnnnnnnnnnnnnnnnnnnnnnnnnnnnnnnnnnnnnnnnnnnnnnnnnnnnnnnnnnnnnnnnnnnnnnnnnnnnnnnnnnnnnnnnnnnnnnnnnnnnnnnnnnnnnnnnnnnnnnnnnnnnnnnnnnnnnnnnnnnnnnnnnnnnnnnnnnnnnnnnnnnnnnnnnnnnnnnnnnnnnnnnnnnnnnnnnnnnnnnnnnnnnnnnnnnnnnnnnnnnnnnnnnnnnnnnnnnnnnnnnnnnnnnnnnnnnnnnnnnnnnnnnnnnnnnnnnnnnnnnnnnnnnnnnnnnnnnnnnnnnnnnnnnnnnnnnnnnnnnnnnnnnnnnnnnnnnnnnnnnnnnnnnnnnnnnnnnnnnnnnnnnnnnnnnnnnnnnnnnnnnnnnnnnnnnnnnnnnnnnnnnnnnnnnnnnnnnnnnnnnnnnnnnnnnnnnnnnnnnnnnnnnnnnnnnnnnnnnnnnnnnnnnnnnnnnnnnnnnnnnnnnnnnnnnnnnnnnnnnnnnnnnnnnnnnnnnnnnnnnnnnnnnngtttgagacatttgaggtaaacagctttgagcagttctgtatcaactatgcaaatgaaaagctccagcagcagttcaactcgnnnnnnnnnnnnnnnnnnnnnnnnnnnnnnnnnnnnnnnnnnnnnnnnnnnnnnnnnnnnnnnnnnnnnnnnnnnnnnnnnnnnnnnnnnnnnnnnnnnnnnnnnnnnnnnnnnnnnnnnnnnnnnnnnnnnnnnnnnnnnnnnnnnnnnnnnnnnnnnnnnnnnnnnnnnnnnnnnnnnnnnnnnnnnnnnnnnnnnnnnnnnnnnnnnnnnnnnnnnnnnnnnnnnnnnnnnnnnnnnnnnnnnnnnnnnnnnnnnnnnnaggtggagtacctctctgatggttttctggagaaaaacagagacacggtgtatgaagagcagatcaatatcctgaaggccagcaanagttcccactagtggctgacttgtttcatgatgacaaggaccctgttcctgccaccacctctgggaaggggtcatcttcgaagatcagcatccgttctgccagaccccccatgaaagcctccaacaaggagcacaagaaaaccgttggccacca

SEQ ID NO: 28529 - DNA, 1125 bp, Macaca Mulatta
  misc_feature (1)...(1125): n = A,T,C or G
tcagaggctaactctcgctgtcagactcccacaaaacagaaggccagtccagccccacctcagctctgtgtagtggaagcaccctcggagcctgtggaatggactggggctgaagaatctctttttcgagtcttccatggcacctatttcaacaacttctgttcaatagccaggcttctagggactaagacgtgcaagcaggtnnnnnnnnnnnnnnnnnnnnnnnnnnnnnnnnnnnnnnnnnnnnnnnnnnnnnnnnnnnnnnnnnnnnnnnnnnnnnnnnnnnnnnnnnnnnnnnnnnnnnnnnnnnnnnnnnnnnnnnnnnnnnnnnnnnnnnnnnnnnnnnnnnnnnnnnnnnnnnnnnnnnnnnnnnnnnnnnnnnnnnnnnnnnnnnnnnnnnnnnnnnnnnnnnnnnnnnnnnnnnnnnnnnnnnnnnnnnnnnnnnnnnnnnnnnnnnnnnnnnnnnnnnnnnnnnnnnnnnnnnnnnnnnnnnnnnnnnnnnnnnnnnnnnnnnnnnnnnnnnnnnnnnnnnnnnnnnnnnnnnnnnnnnnnnnnnnnnnnnnnnnnnnnnnnnnnnnnnnnnnnnnnnnnnnnnnnnnnnnnnnnnnnnnnnnnnnnnnnnnnnnnnnnnnnnnnnnnnnnnnnnnnnnnnnnnnnnnnnnnnnnnnnnnnnnnnnnnnnnnnnnnnnnnnnnnnnnnnnnnnnnnnnnnnnnnnnnnnnnnnnnnnnnnnnnnnnnnnnnnnnnnnnnnnnnnnnnnnnnnnnnnnnnnnnnnnnnnnnnnnnnnnnnnnnnnnnnnnnnnnnnnnnnnnnnnnnnnnnnnnnnnnnnnnnnnnnnnnnnnnnnnnnnnnnnnnnnnnnnnnnnnnnnnnnnnnnnnnnnnnnnnnnnnnnnnnnnnnnnnnnagtggtcatggtgaatggagaccatcggattgggatctttgccaagagggcaattcaagctggcgaagagctcttctttgattacaggtnacaggtacagccaagctgatgctctcaagtacgtggggatcgagagggagaccgacgtgctttagccctcccaggccccatggcagcatttatggtagcggcactgtctggcttcatgctcacaccactg
